United States Patent Application Publication US 2024/0327476 A1 - sequence listing, part 29

SEQ ID NO: 32491 - DNA, 6900 bp, Homo sapiens
  source 1..6900: mol_type = unassigned DNA
atgtctccacttctgagaagcatctgtgacatcactgaaattttcaatcagtatgtctctcatgattgtgatggagcagcattaactaagaaagacctgaagaacctccttgaaagggaatttggagctgtgcttcggagaccacatgaccctaagacggtagatctgatcctggaacttctggatcttgacagtaatgggcgtgtcgatttcaacgaattcctcctatttattttcaaagtggctcaagcttgttactatgctctcggccaggccacgggactggatgaggagaagcgagcccggtgtgacggaaaggagagcctgttacaagatcgcaggcaagaagaagaccaaaggagattcgagccccgggacagacaactggaagaagaacctgggcaacgacgcaggcagaagaggcaggaacaggagagggagctagctgagggagaggagcaaagtgagaaacaagagcgacttgaacagcgcgacaggcagcgccgcgacgaggagctgtggcggcaaaggcaagaatggcaagaacgggaagagcgccgtgcagaggaagagcagctgcagagttgcaaaggtcacgaaactgaggagtttccagacgaagagcaactgcgaaggcgggagctgctggagctgaggaggaagggccgcgaggagaaacagcagcaaaggcgagagcggcaagacagagtgttccaggaggaagaagagaaagagtggaggaagcgcgagacagtgctccggaaggaagaagagaagttgcaggaagaggagccgcagcggcaaagagagctccaggaggaagaagagcagctacggaagctggagcggcaagagctgaggagggagcgccaggaggaagagcagcagcagcaaaggctgaggcgcgagcagcaactaaggcgcaagcaggaggaggagaggcgcgagcagcaggaggagaggcgcgagcagcaggagaggcgcgagcagcaggaggagaggcgcgagcagcagctgaggcgcgagcaggaggagaggcgcgagcagcagctgaggcgcgagcaggaggaggagaggcgcgagcagcagctgaggcgcgagcaggaggaggagaggcgcgagcagcagctgaggcgcgagcagcagctgaggcgcgagcagcagctgaggcgcgagcagcagctgaggcgcgagcagcagctgaggcgcgagcagcagctgaggcgcgagcagcagctgaggcgcgagcagcagctgaggcgcgagcagcagctgaggcgcgagcaggaggaggagaggcacgagcagaagcacgagcaggagaggcgcgagcagcggctgaagcgcgagcaggaggagaggcgcgattggctgaagcgcgaggaggagacggagaggcacgagcaggagaggcgcaagcagcagctgaagcgcgaccaggaggaggagaggcgcgaacgttggctgaagctcgaggaggaggagaggcgcgagcagcaggagaggcgcgagcagcaactaaggcgggagcaagaggagaggcgcgagcagcggctgaagcgccaggaggaggaagagaggctccagcagcggttgaggagcgagcaacaactaagacgcgagcaggaggagaggcgcgagcagctgctgaagcgcgaggaggagaagaggctcgagcaggagaggcgagagcagcggctgaagcgcgagcaggaggagaggcgcgatcagctgctgaagcgcgaggaggagaggcgccagcagcggctgaagcgcgagcaggaagagaggctcgagcagcgactgaagcgcgaggaggtggagagactcgagcaggaggagaggcgcgagcagcggctgaagcgcgaggagccggaggaagagaggcgccagcagctgctgaagagcgaggagcaggaggagaggcgccagcagcaactaaggcgcgagcagcaggaaaggcgcgagcagcggctgaagcgcgaggaggaggaagagaggctcgagcagcggctgaagcgcgagcatgaggaagagaggcgcgagcaggagctagctgaggaggagcaggaacaggcccgggagcggattaagagccgcatcccgaagtggcagtggcagctagaaagcgaggccgacgcacggcaaagcaaagtctactcgaggccccgcaagcaggaagggcagaggcgccgccaagagcaggaggaaaagaggcggcgccgggagagtgagctgcaatggcaggaggaggaacgggctcaccggcagcagcaggaagaggagcagcgccgggacttcacatggcagtggcaggcggaggaaaagagcgagaggggccgtcagaggctgtcggccaggcccccattgcgggagcagcgggagaggcagctgagggccgaggagcgccagcagcgggaacaacggtttctcccggaggaggaggagaaggagcagcggcgccgccagcgacgcgagagggagaaagagctgcagttcctggaggaagaggagcagctccagcggcgggagcgtgcccaacagctccaggaggaggaggacggcctccaggaggatcaggagaggaggcgaagccaggagcagcgccgcgaccaaaaatggaggtggcaactagaagaagaaaggaagagacgccgccacacgctgtacgccaagccagccctacaagagcagctgaggaaggaacagcagctgctgcaggaggaggaggaggagctacagagagaggagcgcgagaagagaaggcgccaagaacaggagagacaataccgcgaggaagagcagctgcagcaggaggaagagcagctgctgagagaggaacgggagaaaagaagacgccaggagcgggaaaggcaatatcggaaggataagaagctgcagcagaaggaagagcagctgctgggagaggaaccggagaagagaaggcgccaggagcgggagaaaaaataccgcgaggaagaggagttgcagcaggaggaagagcagctgctgagagaggaacgggagaagagaaggcgccaggagtgggagaggcagtaccgcaaaaaagacgagctgcagcaggaagaagagcagctgctgagagaggaacgggagaaaagaagactccaggagcgggagaggcaatatcgggaggaagaggagctgcagcaggaggaagagcagctgctgggagaggaacgggagacgagaaggcgccaggagctggagaggcaatatcggaaggaagaggagctgcagcaggaggaagagcagctgctgagagaggaaccggagaagagaaggcgccaggagcgggagaggcaatgtcgggaggaagaggagctgcagcaggaggaagagcagctgctgagagaggaacgggagaagagaaggcgccaggagctggagaggcaatatcgggaggaagaggaggtgcagcaggaggaagagcagctgctgagagaggaaccggagaagagaaggcgccaggagctggagaggcaataccgcgaggaagaggagctgcagcaggaggaagagcagctgctgagagaggaacaggagaaaaggcgccaggagcgggagaggcagtatcgggaggaggaagagcttcagcgccagaaaaggaagcagcgataccgggatgaggatcagcgcagtgatctgaaatggcagtgggaaccagaaaaagaaaatgcagttcgtgataacaaggtttactgcaaaggcagagagaatgaacagttccggcagttggaagattcccagctgcgcgacagacaatcccagcaagatctgcagcacctgctgggtgaacagcaagagcgagatcgtgagcaagagaggaggcgctggcagcagcgcgacaggcatttcccagaggaagaacagctggagcgagaagagcaaaaggaagccaaaaggcgcgacaggaagtcccaagaggaaaagcagttgctgagagaggaaagagaagagaagagacgccgtcaagagacagacagaaaattccgcgaggaggaacagctgctccaggaaagggaggaacagccgctgcgccgccaagagcgtgacagaaaattccgcgaagaggaactgcgccatcaggaacaagggagaaaattcctcgaggaggaacagcggctgcgccgccaggaacgggagagaaaattccttaaggaggaacagcagctgcgctgccaggagcgcgagcaacagctgcgtcaggaccgcgacagaaaattccgcgaggaggaacagcagctgagccgccaagagcgtgacagaaaattccgtgaagaggaacagcaggtgcgccgccaggaacgagagagaaaattcctggaggaggaacagcagctgcgccaggagcgtcacagaaaattccgcgaagaggaacagctgctccaggaaagggaagaacagcagctgcaccgccaagagcgtgacagaaaattcctggaggaggaacaacagctgcgccgccaagagcgtgacagaaaattccgcgaacaggaactgcgcagtcaggaaccagagagaaaattcctcgaggaggaacagcagctgcaccgccagcaacggcagagaaaattcctccaggaggaacagcagctgcgccgccaggagcgcgggcaacagcggcgtcaggaccgtgacagaaaattccgcgaggaggaacagctgcgccaggagagggaggaacagcagctgagccgccaagagcgtgacagaaaattccgtttagaggaacagaaagtgcgccgccaggaacaagagagaaaattcatggaggacgaacagcagctgcgccgccaggagggccaacaacagctgcgccaggagcgcgacagaaaattccgcgaagacgaacagctgctccaggaaagggaagaacagcagctgcaccgccaagagcgtgacagaaaattcctcgaggaggaaccgcagctgcgccgccaggagcgcgaacaacagctgcgtcacgaccgcgacagaaaattccgtgaagaggaacagctgctccaggaaggggaggaacagcagctgcgccgccaagagcgtgacagaaaattccgcgaagaggaacagcagctccgccgtcaggaacgagagagaaaattcctccaggaggaacagcagctgcgccgccaggaactggagagaaaattccgtgaggaggaacagctgcgccaagaaacggagcaagagcagctgcgccgccaagaacgctacagaaaaatcctagaggaagagcagctccgtccggaaagggaagaacagcagctgcgccgccaggagcgcgacagaaaattccgcgaggaggaacagctccgccaggagagggaggaacagcagctgcgcagccaagagtctgacagaaaattccgcgaggaggaacagctacgccaggagagggaagaacagcagctgcgcccccaacagcgtgacggaaagtatcgctgggaagaagagcagctccaacttgaggaacaagagcagaggctgcggcaggagcgagaccggcagtaccgggcggaggagcagtttgccacgcaggagaagagtcgtcgtgaggaacaagaactatggcaagaagaggagcagaaacgtcgccaggaacgggaaaggaaattacgggaagaacacatccgccgccagcagaaggaggaacagaggcaccgccaagtcggggagataaaatcccaagaagggaagggccatgggcggcttctggagcccggcactcatcagtttgccagtgtcccagtgcgctccagccctctctatgagtacatccaagagcagagatctcaataccgcccttaagtgatgttgccaatatcttgacacctgccaaagcttcgagcacgggaaaatgagaaacactgggtaccaagtgataactcagatgtttctggttgtgggaaaactctctgatattagaatgtcttttcttccaaaatcttaaactacgctcattttacgcactttgtacttctgctttttattcttcctcaagtagttctttactgcaagatgtctttcttttgctctttgatgcagatgtggtgtgcatttaaaaaaaatataaatcatttaatttgtttaagaaattttgtttgaggaacatgttcatttattgctttcagaagtaacaagagtaataggatgatttgagattctaaacaatgggtcggtttgtttaatgactgacccatcttgtggaaagtgcagatacttttaatgttcaagttgctatttcttcttgaacctaaattgatcattgcctccaaacagcatttcatcttttgtggcatagttagcacaaattccaggtaactaaatttttataacccttgaatagtgcagggggagtgacctctgcataaaaacttcctgtaaaatcagcccattactggaagaaatatctgttaagaataggtttagctttgaagatttagaatttaaattagattttttttaaactcaactccacttaaacacataatctcatgaagaaataatgaggtgtttctcaacttcagagttcaaattttaaaactgtgtctgttgtagtctatagtgttcattctacttccccaagttttgatgagtttcagaatattatgaacctttgttaattttagcttgttagaaggaagctgctcagaatcccataaacatctgtcttactctagggccaataagagatcacatagagcatgttgggggtgtaaaagggaaaaatgtgtgaacataggggcaaatttctagaggccctttgacaagacccatttgcccacaatcatttgaggcctattgataataccttagatatattcttgttgaaataattggactgtgaaaaattaataataaatgtttggcaagtaa

SEQ ID NO: 32492 - DNA, 5480 bp, Homo sapiens
  source 1..5480: mol_type = unassigned DNA
ggggagggaaaggggggggaggcaggaaagacctttttctctcccccccgcaataatccaagatcaactctgcaaacaacagaagacggttcatggctttggccgccgcgccaccatctttcgggctgccgagggtgttcttgacgattaatcaacagatatggtccggaaaaagaacccccctctgagaaacgttgcaagtgaaggcgagggccagatcctggagcctataggtacagaaagcaaggtatctggaaagaacaaagaattttctgcagatcagatgtcagaaaatacggatcagagtgatgctgcagaactaaatcataaggaggaacatagcttgcatgttcaagatccatcttctagcagtaagaaggacttgaaaagcgcagttctgagtgagaaggctggcttcaattatgaaagccccagtaagggaggaaactttccctcctttccgcatgatgaggtgacagacagaaatatgttggctttctcatctccagctgctgggggagtctgtgagcccttgaagtctccgcaaagagcagaggcagatgaccctcaagatatggcctgcaccccctcaggggactcactggagacaaaggaagatcagaagatgtcaccaaaggctacagaggaaacagggcaagcacagagtggtcaagccaattgtcaaggtttgagcccagtttcagtggcctcaaaaaacccacaagtgccttcagatgggggtgtaagactgaataaatccaaaactgacttactggtgaatgacaacccagacccggcacctctgtctccagagcttcaggactttaaatgcaatatctgtggatatggttactacggcaacgaccccacagatctgattaagcacttccgaaagtatcacttaggactgcataaccgcaccaggcaagatgctgagctggacagcaaaatcttggcccttcataacatggtgcagttcagccattccaaagacttccagaaggtcaaccgttctgtgttttctggtgtgctgcaggacatcaattcttcaaggcctgttttactaaatgggacctatgatgtgcaggtgacttcaggtggaacattcattggcattggacggaaaacaccagattgccaagggaacaccaagtatttccgctgtaaattctgcaatttcacttatatgggcaactcatccaccgaattagaacaacattttcttcagactcacccaaacaaaataaaagcttctctcccctcctctgaggttgcaaaaccttcagagaaaaactctaacaagtccatccctgcacttcaatccagtgattctggagacttgggaaaatggcaggacaagataacagtcaaagcaggagatgacactcctgttgggtactcagtgcccataaagcccctcgattcctctagacaaaatggtacagaggccaccagttactactggtgtaaattttgtagtttcagctgtgagtcatctagctcacttaaactgctagaacattatggcaagcagcacggagcagtgcagtcaggcggccttaatccagagttaaatgataagctttccaggggctctgtcattaatcagaatgatctagccaaaagttcagaaggagagacaatgaccaagacagacaagagctcgagtggggctaaaaagaaggacttctccagcaagggagccgaggataatatggtaacgagctataattgtcagttctgtgacttccgatattccaaaagccatggccctgatgtaattgtagtggggccacttctccgtcattatcaacagctccataacattcacaagtgtaccattaaacactgtccattctgtcccagaggactttgcagcccagaaaagcaccttggagaaattacttatccgtttgcttgtagaaaaagtaattgttcccactgtgcactcttgcttctgcacttgtctcctggggcggctggaagctcgcgagtcaaacatcagtgccatcagtgttcattcaccacccctgacgtagatgtactcctctttcactatgaaagtgtgcatgagtcccaagcatcggatgtcaaacaagaagcaaatcacctgcaaggatcggatgggcagcagtctgtcaaggaaagcaaagaacactcatgtaccaaatgtgattttattacccaagtggaagaagagatttcccgacactacaggagagcacacagctgctacaaatgccgtcagtgcagttttacagctgccgatactcagtcactactggagcacttcaacactgttcactgccaggaacaggacatcactacagccaacggcgaagaggacggtcatgccatatccaccatcaaagaggagcccaaaattgacttcagggtctacaatctgctaactccagactctaaaatgggagagccagtttctgagagtgtggtgaagagagagaagctggaagagaaggacgggctcaaagagaaagtttggaccgagagttccagtgatgaccttcgcaatgtgacttggagaggggcagacatcctgcgggggagtccgtcatacacccaagcaagcctggggctgctgacgcctgtgtctggcacccaagagcagacaaagactctaagggatagtcccaatgtggaggccgcccatctggcgcgacctatttatggcttggctgtggaaaccaagggattcctgcagggggcgccagctggcggagagaagtctggggccctcccccagcagtatcctgcatcgggagaaaacaagtccaaggatgaatcccagtccctgttacggaggcgtagaggctccggtgttttttgtgccaattgcctgaccacaaagacctctctctggcgaaagaatgcaaatggcggatatgtatgcaacgcgtgtggcctctaccagaagcttcactcgactcccaggcctttaaacatcattaaacaaaacaacggtgagcagattattaggaggagaacaagaaagcgccttaacccagaggcacttcaggctgagcagctcaacaaacagcagaggggcagcaatgaggagcaagtcaatggaagcccgttagagaggaggtcagaagatcatctaactgaaagtcaccagagagaaattccactccccagcctaagtaaatacgaagcccagggttcattgactaaaagccattctgctcagcagccagtcctggtcagccaaactctggatattcacaaaaggatgcaacctttgcacattcagataaaaagtcctcaggaaagtactggagatccaggaaatagttcatccgtatctgaagggaaaggaagttctgagagaggcagtcctatagaaaagtacatgagacctgcgaaacacccaaattattcaccaccaggcagccctattgaaaagtaccagtacccactttttggacttccctttgtacataatgacttccagagtgaagctgattggctgcggttctggagtaaatataagctctccgttcctgggaatccgcactacttgagtcacgtgcctggcctaccaaatccttgccaaaactatgtgccttatcccaccttcaatctgcctcctcatttttcagctgttggatcagacaatgacattcctctagatttggcgatcaagcattccagacctgggccaactgcaaacggtgcctccaaggagaaaacgaaggcaccaccaaatgtaaaaaatgaaggtcccttgaatgtagtaaaaacagagaaagttgatagaagtactcaagatgaactttcaacaaaatgtgtgcactgtggcattgtctttctggatgaagtgatgtatgctttgcatatgagttgccatggtgacagtggacctttccagtgcagcatatgccagcatctttgcacggacaaatatgacttcacaacacatatccagaggggcctgcataggaacaatgcacaagtggaaaaaaatggaaaacctaaagagtaaaaccttagcacttagcacaattaaatagaaataggttttcttgatgggaattcaatagcttgtaatgtcttatgaagacctattaaaaaaatacttcatagagcctgccttatccaacatgaaattcccttcttttgttattctttcttttgatgagtaggttaccaagattaaaaagtgagataaatggtcaatgagaaagaatggaagatggtaaacaatcactttttaaaacctgttaagtcaaaaccatcttggctaatatgtactggggaaataatccataagagatatcaccagactagaattaatatatttataaagaaagagaccaaaactgtctagaatttgaaagggtttacatattattatactaaagcagtactggactggccattggaccatttgttccaaaacccataaattgttgcctaaatttataatgatcatgaaaccctaggcagaggaggagaaattgaaggtccagggcaatgaaagaaaaatggcgccctctcaatttagtcttctctcattggccatgtttcagattttgacctagaaatgcgagctgtggttaggcttggttagagtgcagcaagcaacatgacagatggtggcacgctgtttttacccagccctgcctgtacatacacatgcacaccctctctgatatttttgtcctttagatgttcaaatactcagtagtccttttgtttgcggtttagattcattttgtccacacatgtacccattttaaaaaacaatgtcctcgatgcttctgtagtgatttcattttagccaggtatttctttcttgtgtgtgatgaaccagtatggatttgcttttctaagcctcctgttggttactaatctcacttggcacattataactaaaggaatcccctcaattcaaaagcatagatggatacaaatgtcagaccgtgggtttaatttgtttagaacacatggcatttcttcacaaggtaacctgctgtatttatttattttcttttggttaaatataatttccaaactttgtggtcaggcagcgtctaaggttacgttaccacagactgacagttggtatatgtaccagccaatcccttcattaaatgtatacagatttagttaagtagcattaaataggattcttagaagtatgtcctcatagaacttttaatacttaaggctttgtaaaaactatccatgaagggaaagctcctcagcataactgctcagggaaatagggctaaataactgaacattaaataattggttaaaggtgctgttagtcgagcctcaatgcttgctacaaggatgtatgtacaaggactgactttaataatttgcattatattgtcccaaccagtagtttattttttgccacggagatgtagaagatattacaagctactggatgcactgtcagattaacttatttcattaaagaagttgggagaacaaataggaaaaaa

SEQ ID NO: 32493 - DNA, 9990 bp, Homo sapiens
  source 1..9990: mol_type = unassigned DNA
aatagtgttggtgtcttgaaactgacgtaatgcgcggagactgaggtcctgacaagcgataacatttctgataaagacccgatcttactgcaatctctagcgtcctcttttttggtgctgctggtttctccagacctcgcgtcctctcgattgctctctcgccttcctatttcttttttttttttttaaacaaaaaacaacaccccctcccctctcccacccggcaccgggcacatccttgctctatttcctttctctttctctctctctctctctctctctcttttttaataagggtgggggagggaaaggggggggaggcaggaaagacctttttctctcccccccgcaataatccaagatcaactctgcaaacaacagaagacggttcatggctttggccgccgcgccaccatctttcgggctgccgagggtgttcttgacgattaatcaacagatgtacagatcagctctcaaaatgtcttctgtgtcttctgagcgtcttctaagacaattgcattagcctcctgctagttgactaatagaattaataattgtaaaaagcactctaaagccacatgccttatgaagtcaatgctgggtatgattttacaaatatggtccggaaaaagaacccccctctgagaaacgttgcaagtgaaggcgagggccagatcctggagcctataggtacagaaagcaaggtatctggaaagaacaaagaattttctgcagatcagatgtcagaaaatacggatcagagtgatgctgcagaactaaatcataaggaggaacatagcttgcatgttcaagatccatcttctagcagtaagaaggacttgaaaagcgcagttctgagtgagaaggctggcttcaattatgaaagccccagtaagggaggaaactttccctcctttccgcatgatgaggtgacagacagaaatatgttggctttctcatctccagctgctgggggagtctgtgagcccttgaagtctccgcaaagagcagaggcagatgaccctcaagatatggcctgcaccccctcaggggactcactggagacaaaggaagatcagaagatgtcaccaaaggctacagaggaaacagggcaagcacagagtggtcaagccaattgtcaaggtttgagcccagtttcagtggcctcaaaaaacccacaagtgccttcagatgggggtgtaagactgaataaatccaaaactgacttactggtgaatgacaacccagacccggcacctctgtctccagagcttcaggactttaaatgcaatatctgtggatatggttactacggcaacgaccccacagatctgattaagcacttccgaaagtatcacttaggactgcataaccgcaccaggcaagatgctgagctggacagcaaaatcttggcccttcataacatggtgcagttcagccattccaaagacttccagaaggtcaaccgttctgtgttttctggtgtgctgcaggacatcaattcttcaaggcctgttttactaaatgggacctatgatgtgcaggtgacttcaggtggaacattcattggcattggacggaaaacaccagattgccaagggaacaccaagtatttccgctgtaaattctgcaatttcacttatatgggcaactcatccaccgaattagaacaacattttcttcagactcacccaaacaaaataaaagcttctctcccctcctctgaggttgcaaaaccttcagagaaaaactctaacaagtccatccctgcacttcaatccagtgattctggagacttgggaaaatggcaggacaagataacagtcaaagcaggagatgacactcctgttgggtactcagtgcccataaagcccctcgattcctctagacaaaatggtacagaggccaccagttactactggtgtaaattttgtagtttcagctgtgagtcatctagctcacttaaactgctagaacattatggcaagcagcacggagcagtgcagtcaggcggccttaatccagagttaaatgataagctttccaggggctctgtcattaatcagaatgatctagccaaaagttcagaaggagagacaatgaccaagacagacaagagctcgagtggggctaaaaagaaggacttctccagcaagggagccgaggataatatggtaacgagctataattgtcagttctgtgacttccgatattccaaaagccatggccctgatgtaattgtagtggggccacttctccgtcattatcaacagctccataacattcacaagtgtaccattaaacactgtccattctgtcccagaggactttgcagcccagaaaagcaccttggagaaattacttatccgtttgcttgtagaaaaagtaattgttcccactgtgcactcttgcttctgcacttgtctcctggggcggctggaagctcgcgagtcaaacatcagtgccatcagtgttcattcaccacccctgacgtagatgtactcctctttcactatgaaagtgtgcatgagtcccaagcatcggatgtcaaacaagaagcaaatcacctgcaaggatcggatgggcagcagtctgtcaaggaaagcaaagaacactcatgtaccaaatgtgattttattacccaagtggaagaagagatttcccgacactacaggagagcacacagctgctacaaatgccgtcagtgcagttttacagctgccgatactcagtcactactggagcacttcaacactgttcactgccaggaacaggacatcactacagccaacggcgaagaggacggtcatgccatatccaccatcaaagaggagcccaaaattgacttcagggtctacaatctgctaactccagactctaaaatgggagagccagtttctgagagtgtggtgaagagagagaagctggaagagaaggacgggctcaaagagaaagtttggaccgagagttccagtgatgaccttcgcaatgtgacttggagaggggcagacatcctgcgggggagtccgtcatacacccaagcaagcctggggctgctgacgcctgtgtctggcacccaagagcagacaaagactctaagggatagtcccaatgtggaggccgcccatctggcgcgacctatttatggcttggctgtggaaaccaagggattcctgcagggggcgccagctggcggagagaagtctggggccctcccccagcagtatcctgcatcgggagaaaacaagtccaaggatgaatcccagtccctgttacggaggcgtagaggctccggtgttttttgtgccaattgcctgaccacaaagacctctctctggcgaaagaatgcaaatggcggatatgtatgcaacgcgtgtggcctctaccagaagcttcactcgactcccaggcctttaaacatcattaaacaaaacaacggtgagcagattattaggaggagaacaagaaagcgccttaacccagaggcacttcaggctgagcagctcaacaaacagcagaggggcagcaatgaggagcaagtcaatggaagcccgttagagaggaggtcagaagatcatctaactgaaagtcaccagagagaaattccactccccagcctaagtaaatacgaagcccagggttcattgactaaaagccattctgctcagcagccagtcctggtcagccaaactctggatattcacaaaaggatgcaacctttgcacattcagataaaaagtcctcaggaaagtactggagatccaggaaatagttcatccgtatctgaagggaaaggaagttctgagagaggcagtcctatagaaaagtacatgagacctgcgaaacacccaaattattcaccaccaggcagccctattgaaaagtaccagtacccactttttggacttccctttgtacataatgacttccagagtgaagctgattggctgcggttctggagtaaatataagctctccgttcctgggaatccgcactacttgagtcacgtgcctggcctaccaaatccttgccaaaactatgtgccttatcccaccttcaatctgcctcctcatttttcagctgttggatcagacaatgacattcctctagatttggcgatcaagcattccagacctgggccaactgcaaacggtgcctccaaggagaaaacgaaggcaccaccaaatgtaaaaaatgaaggtcccttgaatgtagtaaaaacagagaaagttgatagaagtactcaagatgaactttcaacaaaatgtgtgcactgtggcattgtctttctggatgaagtgatgtatgctttgcatatgagttgccatggtgacagtggacctttccagtgcagcatatgccagcatctttgcacggacaaatatgacttcacaacacatatccagaggggcctgcataggaacaatgcacaagtggaaaaaaatggaaaacctaaagagtaaaaccttagcacttagcacaattaaatagaaataggttttcttgatgggaattcaatagcttgtaatgtcttatgaagacctattaaaaaaatacttcatagagcctgccttatccaacatgaaattcccttcttttgttattctttcttttgatgagtaggttaccaagattaaaaagtgagataaatggtcaatgagaaagaatggaagatggtaaacaatcactttttaaaacctgttaagtcaaaaccatcttggctaatatgtactggggaaataatccataagagatatcaccagactagaattaatatatttataaagaaagagaccaaaactgtctagaatttgaaagggtttacatattattatactaaagcagtactggactggccattggaccatttgttccaaaacccataaattgttgcctaaatttataatgatcatgaaaccctaggcagaggaggagaaattgaaggtccagggcaatgaaagaaaaatggcgccctctcaatttagtcttctctcattggccatgtttcagattttgacctagaaatgcgagctgtggttaggcttggttagagtgcagcaagcaacatgacagatggtggcacgctgtttttacccagccctgcctgtacatacacatgcacaccctctctgatatttttgtcctttagatgttcaaatactcagtagtccttttgtttgcggtttagattcattttgtccacacatgtacccattttaaaaaacaatgtcctcgatgcttctgtagtgatttcattttagccaggtatttctttcttgtgtgtgatgaaccagtatggatttgcttttctaagcctcctgttggttactaatctcacttggcacattataactaaaggaatcccctcaattcaaaagcatagatggatacaaatgtcagaccgtgggtttaatttgtttagaacacatggcatttcttcacaaggtaacctgctgtatttatttattttcttttggttaaatataatttccaaactttgtggtcaggcagcgtctaaggttacgttaccacagactgacagttggtatatgtaccagccaatcccttcattaaatgtatacagatttagttaagtagcattaaataggattcttagaagtatgtcctcatagaacttttaatacttaaggctttgtaaaaactatccatgaagggaaagctcctcagcataactgctcagggaaatagggctaaataactgaacattaaataattggttaaaggtgctgttagtcgagcctcaatgcttgctacaaggatgtatgtacaaggactgactttaataatttgcattatattgtcccaaccagtagtttattttttgccacggagatgtagaagatattacaagctactggatgcactgtcagattaacttatttcattaaagaagttgggagaacaaataggaaaaaaaaaacttatttttctagtaaatattaatgtattacatttcaaataatggtgcctgacatattgaataattattttctacagtgtacgtatgcaacaaagatattccatcatgcattagagtcagttctggctctgcctagctgtttacatttgcaaatgtagcaaacaaggtaatgaagcaactatttctattgcagtagatatccttttgtgtgtgtgtgtgtgcattaaagttgtaaacggtaacatgaaacaaatgaaagttcttgctataatggtatggaaaacaagaaggaaatgaaaatatttttatgcctacttaggaaaaaaagggtagcacttattcattccaagtacttttttttttttaatttttaagctcttaactcacattgttatgcttaagatgataaacatatatcctctttttattgctttgtctatgtttcatatgaaacatttcagaaattattttgataagtgttgctggaatctgcaacgctgatttttttttgcattctgtagtcgcatttgcactccatttttacattaattcgcagttgctttgtatcattgttttgtttgggttttgtttctttttcacagtgccgggtcttcgtttcttaaagttggatggcaggtagagttcaaccagttcgtgactgttgtagcgaatgaagttaaaaaaatgtctttctgatgttgtgttgtcattttcatttttgcatttttttgtttgcatattaaaaaaagagaaaagagaaagcaagagacagaaatcaggactaagtcctctgcttcagtttcattgttaacgggccttattctgatctcacctgtcgcgtagctctaatattcacataaactgaaataaagaagtggaatgaggagctttgacattcaaattatgtgatgtaatttatcttccttaggaattttgatggatgcatctcaaaatgtatagccagacttgagaggtgacaattaaagatctaaaaaagagaggagattcccccaaacaacaatatttaattttcttagtaaaaagaataacagaatgcatcgtggcaatccttaagcaacattatctatgtggactgcttaaatcagcaaaacaccagaagtttggttaacttgggcaatatgacaagtattactttttgggcaaaactactcattaagcaatttctctagtgtgtcggacacaaataggttctttatttttggcatgtatgcctttttattttcattcaattttttttttttctcagacagacatagtagtatcgactagcattggaaaatacatatcactattcttggaatatttatggtcagtctactttttagtaaaatatttttggatagcgttgacacgatagatcttattccatacttctttattattgataattttattttcattttttgctttcattattatacatattttggtggagaagaggttgggcttttttgaaagagacaaaaatttattataacactaaacactccttttttgacatattaaagcctttattccatctctcaagatatattataaaatttatttttttaatttaagatttctgaattattttatcttaaattgtgattttaaacgagctattatggtacggaactttttttaatgaggaatttcatgatgatttaggaattttctctcttggaaaaggcttcccctgtgatgaaaatgatgtgccagctaaaattgtgtgccatttaaaaactgaaaatattttaaaattatttgtctatattctaaattgagctttggatcaaactttaggccaggaccagctcatgcgttctcattcttccttttctcactctttctctcatcactcacctctgtattcattctgttgtttgggatagaaaaatcataaagagccaacccatctcagaacgttgtggattgagagagacactacatgactccaagtatatgagaaaaggacagagctctaattgataactctgtagttcaaaaggaaaagagtatgcccaattctctctacatgacatattgagattttttttaatcaacttttaagatagtgatgttctgttctaaactgttctgttttagtgaaggtagatttttataaaacaagcatggggattcttttctaaggtaatattaatgagaagggaaaaaagtatctttaacagctctttgttgaagcctgtggtagcacattatgtttataattgcacatgtgcacataatctattatgatccaatgcaaatacagctccaaaaatattaaatgtatatatattttaaaatgcctgaggaaatacatttttcttaataaactgaagagtctcagtatggctattaaaataattattagcctcctgttgtgtggctgcaaaacatcacaaagtgaccggtcttgagacctgtgaactgctgccctgtttagtaaataaaattaatgcatttctagagggggaatatctgccatccagtggtggaaatgtggagtaaagaagctggtggtctgcttctgtgctgtatgccagccttttgccttaagttgagaggaggtcaactttagctactgtctttggtttgagagccatggcaaaaaaaaaaaaagaaaaaaagatcaagtcgtctttggtgagccagtaaggtgaaagcttgctgactgtccaaggcacaagagaaaattgaggaattgaaatgcaacctgagtatcaaactaaatattctaatcaaaggtaggtactgttaggtggaattctatcagcaggcaactgcaaatgagaagaagatagaaggacgcccgtcgggactttggagggcattgttattttcccaaagaaagacggccaagggcagaggcatggattctttgcagagcacttccttttggtttttcagtactgtttcatagacagtgggctcacatgttcctgatagtgctgcagttgcttagaaagcatcccagttaattgcagtaattagaacttctggaatatgctagggcagaagtatgtcaagtatgtcacatgaagaaaatgtgaaattcaagagtaatccacacgtgagaaactagacaatgtacattcatgtgttctcttgaaaggaaagggagagctgtaagcttcactctgtcctacaccggagaaaagcaggaataactttaccgtggaaataatgtttagcttttatcagagaaaattgtccttctagagcatagagtcccaaaactcaattctggttttcccctgttttttttttttttttttttcccaacatataaactgcagcatatcactttttctttttgtgcctcaggttcctcacctgtaaaattgaaaaatatatgtattaataatattattaataataataatggtaatgtagtacttgtttgtaaagcactttgagatccttggttgaaaggcaccataggagtgccaagtattattatgtggccaagggggttatttaaactgtcagttcccaaaggccaggaaaggttggggtcatttttcttaaagacgagctgtaaatatcaactaggcagccaatagtgttgactatgaagatgcaaaactattactaggctgataaaatcatagtttcttaatggctaccaataaggcaaatatcacaataataaacgccaaattccttagggcggactatttgacaaccacatggaaaactttgggggaggcatgaggggggaacatctcaaaatgccaatgtaaaatttaacttacagcaatattcaccagcagaaaatgtctttcatatggaatgatttcatgttgctaagaaaaagaattcaatttgtagtcctgatttgaatactagaatgttggctataatagttctgttcttacaacacatgaaattttttcgttttattttattttgttttcatagtgcatgttcatttctactcacaaacatgttcttggtgtatttcttatgcaaacaatcttcaggcagcaaagatgtctgttacatctaaacttgaataataaagttttaccaccagttacaca

SEQ ID NO: 32494 - DNA, 4083 bp, Homo sapiens
  source 1..4083: mol_type = unassigned DNA
aattctctcctaccgggcgcagcggaggagctggaggtggttggacccgaggggccgccgccgccgccgccactgcaagttttctgggggctcgtgacaagcggggcgcagactaggcaccagcatgcagagtaatatggtccggaaaaagaacccccctctgagaaacgttgcaagtgaaggcgagggccagatcctggagcctataggtacagaaagcaaggtatctggaaagaacaaagaattttctgcagatcagatgtcagaaaatacggatcagagtgatgctgcagaactaaatcataaggaggaacatagcttgcatgttcaagatccatcttctagcagtaagaaggacttgaaaagcgcagttctgagtgagaaggctggcttcaattatgaaagccccagtaagggaggaaactttccctcctttccgcatgatgaggtgacagacagaaatatgttggctttctcatctccagctgctgggggagtctgtgagcccttgaagtctccgcaaagagcagaggcagatgaccctcaagatatggcctgcaccccctcaggggactcactggagacaaaggaagatcagaagatgtcaccaaaggctacagaggaaacagggcaagcacagagtggtcaagccaattgtcaaggtttgagcccagtttcagtggcctcaaaaaacccacaagtgccttcagatgggggtgtaagactgaataaatccaaaactgacttactggtgaatgacaacccagacccggcacctctgtctccagagcttcaggactttaaatgcaatatctgtggatatggttactacggcaacgaccccacagatctgattaagcacttccgaaagtatcacttaggactgcataaccgcaccaggcaagatgctgagctggacagcaaaatcttggcccttcataacatggtgcagttcagccattccaaagacttccagaaggtcaaccgttctgtgttttctggtgtgctgcaggacatcaattcttcaaggcctgttttactaaatgggacctatgatgtgcaggtgacttcaggtggaacattcattggcattggacggaaaacaccagattgccaagggaacaccaagtatttccgctgtaaattctgcaatttcacttatatgggcaactcatccaccgaattagaacaacattttcttcagactcacccaaacaaaataaaagcttctctcccctcctctgaggttgcaaaaccttcagagaaaaactctaacaagtccatccctgcacttcaatccagtgattctggagacttgggaaaatggcaggacaagataacagtcaaagcaggagatgacactcctgttgggtactcagtgcccataaagcccctcgattcctctagacaaaatggtacagaggccaccagttactactggtgtaaattttgtagtttcagctgtgagtcatctagctcacttaaactgctagaacattatggcaagcagcacggagcagtgcagtcaggcggccttaatccagagttaaatgataagctttccaggggctctgtcattaatcagaatgatctagccaaaagttcagaaggagagacaatgaccaagacagacaagagctcgagtggggctaaaaagaaggacttctccagcaagggagccgaggataatatggtaacgagctataattgtcagttctgtgacttccgatattccaaaagccatggccctgatgtaattgtagtggggccacttctccgtcattatcaacagctccataacattcacaagtgtaccattaaacactgtccattctgtcccagaggactttgcagcccagaaaagcaccttggagaaattacttatccgtttgcttgtagaaaaagtaattgttcccactgtgcactcttgcttctgcacttgtctcctggggcggctggaagctcgcgagtcaaacatcagtgccatcagtgttcattcaccacccctgacgtagatgtactcctctttcactatgaaagtgtgcatgagtcccaagcatcggatgtcaaacaagaagcaaatcacctgcaaggatcggatgggcagcagtctgtcaaggaaagcaaagaacactcatgtaccaaatgtgattttattacccaagtggaagaagagatttcccgacactacaggagagcacacagctgctacaaatgccgtcagtgcagttttacagctgccgatactcagtcactactggagcacttcaacactgttcactgccaggaacaggacatcactacagccaacggcgaagaggacggtcatgccatatccaccatcaaagaggagcccaaaattgacttcagggtctacaatctgctaactccagactctaaaatgggagagccagtttctgagagtgtggtgaagagagagaagctggaagagaaggacgggctcaaagagaaagtttggaccgagagttccagtgatgaccttcgcaatgtgacttggagaggggcagacatcctgcgggggagtccgtcatacacccaagcaagcctggggctgctgacgcctgtgtctggcacccaagagcagacaaagactctaagggatagtcccaatgtggaggccgcccatctggcgcgacctatttatggcttggctgtggaaaccaagggattcctgcagggggcgccagctggcggagagaagtctggggccctcccccagcagtatcctgcatcgggagaaaacaagtccaaggatgaatcccagtccctgttacggaggcgtagaggctccggtgttttttgtgccaattgcctgaccacaaagacctctctctggcgaaagaatgcaaatggcggatatgtatgcaacgcgtgtggcctctaccagaagcttcactcgactcccaggcctttaaacatcattaaacaaaacaacggtgagcagattattaggaggagaacaagaaagcgccttaacccagaggcacttcaggctgagcagctcaacaaacagcagaggggcagcaatgaggagcaagtcaatggaagcccgttagagaggaggtcagaagatcatctaactgaaagtcaccagagagaaattccactccccagcctaagtaaatacgaagcccagggttcattgactaaaagccattctgctcagcagccagtcctggtcagccaaactctggatattcacaaaaggatgcaacctttgcacattcagataaaaagtcctcaggaaagtactggagatccaggaaatagttcatccgtatctgaagggaaaggaagttctgagagaggcagtcctatagaaaagtacatgagacctgcgaaacacccaaattattcaccaccaggcagccctattgaaaagtaccagtacccactttttggacttccctttgtacataatgacttccagagtgaagctgattggctgcggttctggagtaaatataagctctccgttcctgggaatccgcactacttgagtcacgtgcctggcctaccaaatccttgccaaaactatgtgccttatcccaccttcaatctgcctcctcatttttcagctgttggatcagacaatgacattcctctagatttggcgatcaagcattccagacctgggccaactgcaaacggtgcctccaaggagaaaacgaaggcaccaccaaatgtaaaaaatgaaggtcccttgaatgtagtaaaaacagagaaagttgatagaagtactcaagatgaactttcaacaaaatgtgtgcactgtggcattgtctttctggatgaagtgatgtatgctttgcatatgagttgccatggtgacagtggacctttccagtgcagcatatgccagcatctttgcacggacaaatatgacttcacaacacatatccagaggggcctgcataggaacaatgcacaagtggaaaaaaatggaaaacctaaagagtaaaaccttagcacttagcacaattaaatagaaataggttttcttgatgggaattcaatagcttgtaatgtcttatgaagacctattaaaaaaatacttcatag

SEQ ID NO: 32495 - DNA, 920 bp, Homo sapiens
  source 1..920: mol_type = unassigned DNA
attgtggtgccttgtagctgtcccgggagccctcagcagcagttggagctggtgcacaggaaggatgaggaagaccaggctctgggggctgctgtggatgctctttgtctcagaactccgagctgcaactaaattaactgaggaaaagtatgaactgaaagaggggcagaccctggatgtgaaatgtgactacacgctagagaagtttgccagcagccagaaagcttggcagataataagggacggagagatgcccaagaccctggcatgcacagagaggccttcaaagaattcccatccagtccaagtggggaggatcatactagaagactaccatgatcatggtttactgcgcgtccgaatggtcaaccttcaagtggaagattctggactgtatcagtgtgtgatctaccagcctcccaaggagcctcacatgctgttcgatcgcatccgcttggtggtgaccaagggtttttcagggacccctggctccaatgagaattctacccagaatgtgtataagattcctcctaccaccactaaggccttgtgcccactctataccagccccagaactgtgacccaagctccacccaagtcaactgccgatgtctccactcctgactctgaaatcaaccttacaaatgtgacagatatcatcagggttccggtgttcaacattgtcattctcctggctggtggattcctgagtaagagcctggtcttctctgtcctgtttgctgtcacgctgaggtcatttgtaccctaggcccacgaacccacgagaatgtcctctgacttccagccacatccatctggcagttgtgccaagggaggagggaggaggtaaaaggcagggagttaataacatgaattaaatctgtaatcaccggctatttctaaagtcagcgtctcacctt

SEQ ID NO: 32496 - DNA, 727 bp, Homo sapiens
  source 1..727: mol_type = unassigned DNA
attgtggtgccttgtagctgtcccgggagccctcagcagcagttggagctggtgcacaggaaggatgaggaagaccaggctctgggggctgctgtggatgctctttgtctcagaactccgagctgcaactaaattaactgaggaaaagtatgaactgaaagaggggcagaccctggatgtgaaatgtgactacacgctagagaagtttgccagcagccagaaagcttggcagataataagggacggagagatgcccaagaccctggcatgcacagagaggccttcaaagaattcccatccagtccaagtggggaggatcatactagaagactaccatgatcatggtttactgcgcgtccgaatggtcaaccttcaagtggaagattctggactgtatcagtgtgtgatctaccagcctcccaaggagcctcacatgctgttcgatcgcatccgcttggtggtgaccaaggggttccggtgttcaacattgtcattctcctggctggtggattcctgagtaagagcctggtcttctctgtcctgtttgctgtcacgctgaggtcatttgtaccctaggcccacgaacccacgagaatgtcctctgacttccagccacatccatctggcagttgtgccaagggaggagggaggaggtaaaaggcagggagttaataacatgaattaaatctgtaatcaccggctatttctaaagtcagcgtctcacctt

SEQ ID NO: 32497 - DNA, 2048 bp, Homo sapiens
  source 1..2048: mol_type = unassigned DNA
agcagttggagctggtgcacaggaaggatgaggaagaccaggctctgggggctgctgtggatgctctttgtctcagaactccgagctgcaactaaattaactgaggaaaagtatgaactgaaagaggggcagaccctggatgtgaaatgtgactacacgctagagaagtttgccagcagccagaaagcttggcagataataagggacggagagatgcccaagaccctggcatgcacagagaggccttcaaagaattcccatccagtccaagtggggaggatcatactagaagactaccatgatcatggtttactgcgcgtccgaatggtcaaccttcaagtggaagattctggactgtatcagtgtgtgatctaccagcctcccaaggagcctcacatgctgttcgatcgcatccgcttggtggtgaccaagggtttttcagggacccctggctccaatgagaattctacccagaatgtgtataagattcctcctaccaccactaaggccttgtgcccactctataccagccccagaactgtgacccaagctccacccaagtcaactgccgatgtctccactcctgactctgaaatcaaccttacaaatgtgacagatatcatcaggtatagtttccaggtccctgggcccctggtttggacactgagccctttgtttcccagtctgtgtgctgagaggatgtgaaagtgagggaaaggggagggtggggcaggagaagacttgagtcacattagtctgggtagaaatgtccaggggaagaaggaagtggtgatggagaataggggaggctctcagccaggctgtccttctccccagttcaccttctttgtttccttgcaacctgagtattaaagagagggaaatggcatcttccccaagttccagtggagctcatccaaccccaggggcctgatgggcagtgggaaagcactctgagtgaggggccctggatctagtgttggcctgactaactgaatgtgactttgggtgagtcaggaaccctctctggctttagcttctttgacaattcagtaggcatggtagaaacccaaagctggaagacattgtccacctaataactctcagcaggagctggagctggggctaaatgcagtattggtttttgccttattgttttttaaataacattgttgcatgtgcccaattatagataaatagaatcagaatttttgcagatgaggtccctctcagtatttttaataagatgtttaggagatttctaatgtgtaggcaaacttaagaaccactaacttagcaatttcacacctctttacagttattaaatgttgatttatattagaatgtgtttatcattaaatactgaattatcaggatggaaatacttttccacatcaccactagtctaacatgtcttttttctcatattctcttctagtctttattcatgtttatacatattttaatatggcagtaagtctaattatacatgtttttattcttttccttgctgaaattattctttgatgctgctacctaaatttcataaatataatttcaatgagtgcatatttttctatcaattgggaaagccataacttacataaccattggcctgttcttagacattgatatagtgttgataactctgagataaacatattcttgcagatatatttttcttcttttaaataattaactcgaaatttccatgagataatttaaacactgatatcattttgtatacaaatagcatctaccaatggtcttccaaaagattggaaacaatttgcagtgtgatccattaagcataaataaagcagtgtcatggcaggcttacagacacggatttagtcttttaaatcattaaatagtgtgagttaaatcacattcctgctaaaacaaatgtgaactggtgcctgctctaatttctctatgagtgtagactccacctccatatgggtagtggcagtgcctttttccccattatgttgtttggggaacaaagtgctcattaaacttctgtggaataaatcaaacgaatgatc

SEQ ID NO: 32498 - DNA, 860 bp, Homo sapiens
  source 1..860: mol_type = unassigned DNA
gggcagcgcctgacatgcctgatcctctcttttctgcagttcaagggaaagacgagatcttgcacaaggcactctgcttctgcccttggctggggaagggtggcatggagcctctccggctgctcatcttactctttgtcacagagctgtccggagcccacaacaccacagtgttccagggcgtggcgggccagtccctgcaggtgtcttgcccctatgactccatgaagcactgggggaggcgcaaggcctggtgccgccagctgggagagaagggcccatgccagcgtgtggtcagcacgcacaacttgtggctgctgtccttcctgaggaggtggaatgggagcacagccatcacagacgataccctgggtggcactctcaccattacgctgcggaatctacaaccccatgatgcgggtctctaccagtgccagagcctccatggcagtgaggctgacaccctcaggaaggtcctggtggaggtgctggcagaccccctggatcaccgggatgctggagatctctggttccccggggagtctgagagcttcgaggatgcccatgtggagcacagcatctccagggctgagagacacgtgaaggaagatgatgggaggaaaagcccaggagaagtcccaccagggaccagcccagcctgcatacttgccacttggccaccaggactccttgttctgctctggcaagagactactctgcctgaacactgcttctcctggaccctggaagcagggactggttgagggagtggggaggtggtaagaacacctgacaacttctgaatattggacattttaaacacttacaaataaatccaagactgtcatatttagctggat

SEQ ID NO: 32499 - DNA, 1044 bp, Homo sapiens
  source 1..1044: mol_type = unassigned DNA
tgacatgcctgatcctctcttttctgcagttcaagggaaagacgagatcttgcacaaggcactctgcttctgcccttggctggggaagggtggcatggagcctctccggctgctcatcttactctttgtcacagagctgtccggagcccacaacaccacagtgttccagggcgtggcgggccagtccctgcaggtgtcttgcccctatgactccatgaagcactgggggaggcgcaaggcctggtgccgccagctgggagagaagggcccatgccagcgtgtggtcagcacgcacaacttgtggctgctgtccttcctgaggaggtggaatgggagcacagccatcacagacgataccctgggtggcactctcaccattacgctgcggaatctacaaccccatgatgcgggtctctaccagtgccagagcctccatggcagtgaggctgacaccctcaggaaggtcctggtggaggtgctggcagaccccctggatcaccgggatgctggagatctctggttccccggggagtctgagagcttcgaggatgcccatgtggagcacagcatctccaggagcctcttggaaggagaaatccccttcccacccacttccatccttctcctcctggcctgcatctttctcatcaagattctagcagccagcgccctctgggctgcagcctggcatggacagaagccagggacacatccacccagtgaactggactgtggccatgacccagggtatcagctccaaactctgccagggctgagagacacgtgaaggaagatgatgggaggaaaagcccaggagaagtcccaccagggaccagcccagcctgcatacttgccacttggccaccaggactccttgttctgctctggcaagagactactctgcctgaacactgcttctcctggaccctggaagcagggactggttgagggagtggggaggtggtaagaacacctgacaacttctgaatattggacattttaaacacttacaaataaatccaagactgtcatatttagctggat

SEQ ID NO: 32500 - DNA, 856 bp, Homo sapiens
  source 1..856: mol_type = unassigned DNA
gcagcgcctgacatgcctgatcctctcttttctgcagttcaagggaaagacgagatcttgcacaaggcactctgcttctgcccttggctggggaagggtggcatggagcctctccggctgctcatcttactctttgtcacagagctgtccggagcccacaacaccacagtgttccagggcgtggcgggccagtccctgcaggtgtcttgcccctatgactccatgaagcactgggggaggcgcaaggcctggtgccgccagctgggagagaagggcccatgccagcgtgtggtcagcacgcacaacttgtggctgctgtccttcctgaggaggtggaatgggagcacagccatcacagacgataccctgggtggcactctcaccattacgctgcggaatctacaaccccatgatgcgggtctctaccagtgccagagcctccatggcagtgaggctgacaccctcaggaaggtcctggtggaggtgctggcagaccccctggatcaccgggatgctggagatctctggttccccggggagtctgagagcttcgaggatgcccatgtggagcacagcatctccagggctgagagacacgtgaaggaagatgatgggaggaaaagcccaggagaagtcccaccagggaccagcccagcctgcatacttgccacttggccaccaggactccttgttctgctctggcaagagactactctgcctgaacactgcttctcctggaccctggaagcagggactggttgagggagtggggaggtggtaagaacacctgacaacttctgaatattggacattttaaacacttacaaataaatccaagactgtcatatttagctgg

SEQ ID NO: 32501 - DNA, 1287 bp, Homo sapiens
  source 1..1287: mol_type = unassigned DNA
ctgcccagccatgggcctcaccctgctcttgctgctgctcctgggactagaaggtcagggcatagttggcagcctccctgaggtgctgcaggcacccgtgggaagctccattctggtgcagtgccactacaggctccaggatgtcaaagctcagaaggtgtggtgccggttcttgccggaggggtgccagcccctggtgtcctcagctgtggatcgcagagctccagcgggcaggcgtacgtttctcacagacctgggtgggggcctgctgcaggtggaaatggttaccctgcaggaagaggatgctggcgagtatggctgcatggtggatggggccagggggccccagattttgcacagagtctctctgaacatactgcccccagaggaagaagaagagacccataagattggcagtctggctgagaacgcattctcagaccctgcaggcagtgccaaccctttggaacccagccaggatgagaagagcatccccttgatctggggtgctgtgctcctggtaggtctgctggtggcagcggtggtgctgtttgctgtgatggccaagaggaaacaagggaacaggcttggtgtctgtggccgattcctgagcagcagagtttcaggcatgaatccctcctcagtggtccaccacgtcagtgactctggaccggctgctgaattgcctttggatgtaccacacattaggcttgactcaccaccttcatttgacaataccacctacaccagcctacctcttgattccccatcaggaaaaccttcactcccagctccatcctcattgccccctctacctcctaaggtcctggtctgctccaagcctgtgacatatgccacagtaatcttcccgggagggaacaagggtggagggacctcgtgtgggccagcccagaatccacctaacaatcagactccatccagctaagctgctcatcacactttaaactcatgaggaccatccctaggggttctgtgcatccatccagccagctcatgccctaggatccttaggatatctgagcaaccagggactttaagatctaatccaatgtcctaactttactagggaaagtgacgctcagacatgactgagatgtcttggggaagacctccctgcacccaactcccccactggttcttctaccattacacactgggctaaataaaccctaataatgatgtgcaaactcttaatggctgaatgggaaaggaaactgcccaagtttgactaattgcttggcctgtgaatggaaaagactctggtct

SEQ ID NO: 32502 - DNA, 927 bp, Homo sapiens
  source 1..927: mol_type = unassigned DNA
cagtgcccaggcaagcccaggagttgacatttctctgcccagccatgggcctcaccctgctcttgctgctgctcctgggactagaaggtcagggcatagttggcagcctccctgaggtgctgcaggcacccgtgggaagctccattctggtgcagtgccactacaggctccaggatgtcaaagctcagaaggtgtggtgccggttcttgccggaggggtgccagcccctggtgtcctcagctgtggatcgcagagctccagcgggcaggcgtacgtttctcacagacctgggtgggggcctgctgcaggtggaaatggttaccctgcaggaagaggatgctggcgagtatggctgcatggtggatggggccagggggccccagattttgcacagagtctctctgaacatactgcccccagaggaagaagaagagacccataagattggcagtctggctgagaacgcattctcagaccctgcaggcagtgccaaccctttggaacccagccaggatgagaagagcatccccttgatctggggtgctgtgctcctggtaggtctgctggtggcagcggtggtgctgtttgctgtgatggccaagaggaaacaagaatccctcctcagtggtccaccacgtcagtgactctggaccggctgctgaattgcctttggatgtaccacacattaggcttgactcaccaccttcatttgacaataccacctacaccagcctacctcttgattccccatcaggaaaaccttcactcccagctccatcctcattgccccctctacctcctaaggtcctggtctgctccaagcctgtgacatatgccacagtaatcttcccgggagggaacaagggtggagggacctcgtgtgggccagcccagaatccacctaacaatcagactccatccagctaa

SEQ ID NO: 32503 - DNA, 911 bp, Homo sapiens
  source 1..911: mol_type = unassigned DNA
tgcatcagtgcccaggcaagcccaggagttgacatttctctgcccagccatgggcctcaccctgctcttgctgctgctcctgggactagaagaggaagaagaagagacccataagattggcagtctggctgagaacgcattctcagaccctgcaggcagtgccaaccctttggaacccagccaggatgagaagagcatccccttgatctggggtgctgtgctcctggtaggtctgctggtggcagcggtggtgctgtttgctgtgatggccaagaggaaacaagggaacaggcttggtgtctgtggccgattcctgagcagcagagtttcaggcatgaatccctcctcagtggtccaccacgtcagtgactctggaccggctgctgaattgcctttggatgtaccacacattaggcttgactcaccaccttcatttgacaataccacctacaccagcctacctcttgattccccatcaggaaaaccttcactcccagctccatcctcattgccccctctacctcctaaggtcctggtctgctccaagcctgtgacatatgccacagtaatcttcccgggagggaacaagggtggagggacctcgtgtgggccagcccagaatccacctaacaatcagactccatccagctaagctgctcatcacactttaaactcatgaggaccatccctaggggttctgtgcatccatccagccagctcatgccctaggatccttaggatatctgagcaaccagggactttaagatctaatccaatgtcctaactttactagggaaagtgacgctcagacatgactgagatgtcttggggaagacctccctgcacccaactcccccactggttcttctaccattacacactgggctaaataaaccctaataatgatgtgc

SEQ ID NO: 32504 - DNA, 3302 bp, Homo sapiens
  source 1..3302: mol_type = unassigned DNA
ataggctcaatgaatccctgcggttggctgggggcagtgggtcccacactgcctcacttccctaaatgggcagcttcacttttagaaccccgggtccttccctggcaggcccaggtggcacatcctgtgtcgggtgggccctcaccttggatctccaggcctgacactgcccagctggatggaaccatggccccagccttcctgctgctgctgctgctgtggccacagggttgcgtctcaggcccctctgctgacagtgtatacacaaaagtgaggctccttgaaggggagactctgtctgtgcagtgctcctataagggctacaaaaaccgcgtggagggcaaggtttggtgcaaaatcaggaagaagaagtgtgagcctggctttgcccgagtctgggtgaaagggccccgctacttgctgcaggacgatgcccaggccaaggtggtcaacatcaccatggtggccctcaagctccaggactcaggccgatactggtgcatgcgcaacacctctgggatcctgtaccccttgatgggcttccagctggatgtgtctccagctccccaaactgagaggaacattcctttcacacatctggacaacatcctcaagagtggaactgtcacaactggccaagcccctacctcaggccctgatgccccttttaccactggtgtgatggtgttcaccccaggactcatcaccttgcctaggctcttagcctccaccagacctgcctccaagacaggctacagcttcactgctaccagcaccaccagccagggacccaggaggaccatggggtcccagacagtgaccgcgtctcccagcaatgccagggactcctctgctggcccagaatccatctccactaagtctggggacctcagcaccagatcgcccaccacagggctctgcctcaccagcagatctctcctcaacagactaccctccatgccctccatcaggcaccaggatgtttactccactgtgcttggggtggtgctgaccctcctggtgctgatgctgatcatggtctatgggttttggaagaagagacacatggcaagctacagcatgtgcagcgatccttctacacgtgacccacctggaagaccagagccctatgtggaagtctacttgatctgaggccacttaagcatggggtggggagcttctcccagagtggccccagggggttagaggaggggtgaagattggggccagtatcgatcttatgaagctggaggacttgtgcagtgctggactcacccaggacttcccaaacccagaggctgccatcctaagcagccccacagcccagtgttctccttgggggcaggaacctggggaggggcccagagcaaagggcatcagggagaaagtcccgaggaaatgtgaccagtggtttctgctcggagctgcagaccccagggctcttggtggaggcaggggaaccctgagagtgctgtttacagagaacctcagctcccgtctgcctcagaaaccctattgggctgagctgccctccccaccagggccactgtgtcctctgcttccctccgttctgcttcagcttcccctaaggttagggaagaaagaatcgggctcacgaatgccagaggcagtgatgtcccatcctggaggagaggaaacagtgactaaaagctggggacccacagaggggttggcagcttctcttgtcgggacaggtgtcctttgctgggcctctggatggccctgccctgactggggctgctcctccctcctgtcctgggaccgcgcagagcccacgctctcactgctgcctcctgctggccgctgcctccttagaaagctgtgaccaggcagctaagagcctctgggctgcagggtcagcctctcccaagactgaagtgcagaggctggacttggggctctctcccccagcttctacacctgggctccaagtctgagttcccacaggggacccagcagcctccaggaagtccataccctggggtggctgagaccttggctctgtatggaggctgctcaccccacagacactggtggggagaccatggctcagaggaagggtggagcaaccctcctcctacccctcaggatagagagagaagacacacttgggacacagtgaagacagtaacttggaactgaccacggcctggaggactggcccaggcagggggacagggaaaatggagcccaagtagcctctggccagggacccaatgtcccgaggaatctgcctcccacccactgactcagggctcagactcagcctctattgtccagagcactggcttggcgtccagcaatgaaggctggagaatgcagcctggattcccctacacacacacacacacacacacacacacacacacacacacacacacacacacaggtgtctactgacctggagtgactggaatagcacctggggataaatgtgacaactgtgcattgaaccctgggtcagggacgttccaatggccaagagagtgacacagccaggaccctggtggacagccagaggggccacttcaggatggatgtggggagagtggaagaggcagggagtaatcctgggggacagcagggaggaggcacttcttccctatgtccaggagagggcaatagagggaagactgaggctgaagaattgacggctctggacccaggacagacagacagacagacagacagacagacagacagacacgcacacacacccatctctgtctagcaagcagcctcctaagatagctgttctccctatcatgacggtgtagccaccatcctgttgtatactaggagagaacttaacccacctgggggaaaatagctccccaagagctggcaccagtaccactgatggccctgcttcctctgagtgagatgcccaggaggaggagccctagggaagaagtcagggacagggaccaggataccactctgtcactgtgtgaccctcagcaagtcactaacccttggcctcatttttcctgtcttgtgaaagaggacaataattcctacttctcaagattgttttcaagataaaataacattagcattgtacaatgatgcaaatgcctcattaccattattccttaagttgttttccagctctaatgttgtttccaacattacatttaagaccttaggattctgtttcttgcttttgtcatatctcttcccaagtgtcatcactatatggatgttgagggcccccgatgacagtccctttggtaaggtcctcttttgaggaggggagggtacagggtggactcatctca

SEQ ID NO: 32505 - DNA, 3782 bp, Homo sapiens
  source 1..3782: mol_type = unassigned DNA
tgggagaccggacgcgcgcggcctccgccgctcccagtcccgccagacccgatgccgggctggagaagcgcgggggccgacgcacctcggataggcgggggcaggggcaggggcagctctcctttaccctagagcggcgacagaagctcttcgggggatcagtggccaagggggcggacagatttgcacggcggattcctccgaagcaacccgtgtgaaagaagccaagcggcggctgcagcccgggccgcgatgggggtgacaccgcccgtggtcccgccccttcccgtggcccctcggagccacttccggcggcagcgtccgggctagttcccggcgcgagcggccgcgggccagtttctatctcctcatccagggcttgcgggcgaggcctgttttaagtctccagtaaccgagcggaggcccggcaggcgcgacccgggctgcgtacgtcagagctgcctccgaagtggtaaaatgtgctgcgagaagtggagccgcgtggcggaaatgtttctcttcattgaggagcgggaggattgtaagatactgtgcctttgctccagggcatttgtggaggatcgaaaattgtacaatttgggattaaaaggctattacatcagagacagtggcaacaattcaggagaccaggcgacagaagaagaggaaggtggttattcctgtggtactgcagaatcacatgacagcaaaggcataggcctggatgaaagtgaacttgattctgaggctgaactcatgagaagtatgggattgccacttcaatttggtaggataactgcacataaggattttgaggtatctatgaatactagaaataaagttaaaataaaaaagaaaaaacatcaaaagaaatacttagatgaaattgtgcaagaatcttggagaaaagaatatgaagaagacgacattttggcttcagatgatccatcttcaattgaacagtatgagaacaccagaacatatgaacttcaaagcaaaaaagatactgagacagaaaatcctccagttgaaaacacattatctccaaagctagaaattacagagaaatgggaaaagtattggaatgaatatggaggaggactattgtggcaaagttggcaagaaaaacatccgggtcaagcactatcttctgaaccttggaactttcctgatacaaaggaagaatgggagcaacattatagtcaactttattggtattatttggaacaatttcagtattgggaagctcagggttggacttttgatgcctcgcaaagctgtgatacagatacttacacatctaaaacagaagctgatgacaagaacgatgaaaaatgcatgaaagttgacttagtatcttttccatcttcacctattatggttgataatgatagctctggtacaagtgataaggatcatagtgaaatacttgatggaattagtaacataaaactgaattcagaggaagtaacacagagccaattagattcctgtacaagtcatgatggtcatcaacagctaagtgaagttagtagcaaaagagagtgccctgcttccggccaaagtgaaccacgtaatggaggaaccaatgaggaaagcaactcatcggggaatacaaacacagacccaccagctgaggattcacagaagtcttcaggagcaaacacaagcaaagacagaccacatgccagtggtactgatggagatgaaagtgaggaagacccacctgagcataagccaagcaaactgaagaggagccatgaactggacattgatgaaaacccagcttcagactttgatgacagtggttcccttctaggattcaagtatggctcaggacaaaaatatggtggaatcccaaatttcagtcatcggcaggtcaggtatttagagaagaatgtgaagcttaagtctaagtacctagacatgcgcagacaaataaagatgaaaaacaaacacatcttctttaccaaagagtcagaaaaaccatttttcaagaaaagcaaaattctgagtaaggtagaaaaattcctcacatgggttaataaaccaatggatgaagaagcatcacaggaatcatcttctcatgacaatgtgcacgacgcttccacaagtagtgattcagaggaacaagacatgtctgttaaaaaaggtgatgacctactggagactaataatccagaacctgaaaagtgtcagagcgtatcttcagctggtgaacttgaaacagaaaactatgaaagagacagcttgctagcaactgttccagatgagcaggattgtgttactcaagaagtgccagactcccgccaggcagaaactgaagctgaagtgaaaaagaagaagaacaagaagaagaacaaaaaggtgaatggtctgcctcctgaaatagctgctgttcctgagctggcaaaatactgggcccagaggtacaggctcttctcccgttttgatgatgggattaagttggacagagagggctggttttcagttacacccgagaagattgctgaacacattgctggccgtgttagtcagtccttcaagtgtgacgttgtagtagacgcattctgtggagttggaggaaataccattcagtttgccttaacaggaatgagagtgattgccattgatatcgatcctgttaagattgcccttgctcgcaataatgcagaagtttatgggatagcagataagatagagttcatctgtggagatttcttgctgctggcttcttttttaaaggctgatgttgtgttcctcagcccaccttggggagggccagactatgccactgcagagacctttgacattagaacaatgatgtctcctgatggctttgaaattttcagactttctaagaagatcactaataatattgtttattttcttccaagaaatgctgatattgaccaggtggcatccttagctgggcctggagggcaagtggaaatagaacagaacttccttaacaacaaattgaagacaatcactgcatattttggtgacctaattcgaagaccagcctctgaaacctaactatgcagcagtgcgaggacaaaagatcatggagtggtcaaaatattcagatgagacatttggcatgtcttcctttattcactgatattttctacccatggtcttatatcaccgtatgaaatggaaacttacaggacttaaatatcagtgaaatattttgagatctttgaataattcctttagaggaattatacaaaattaatatatatgagtcctttgtaatttatttttttttgagacaggatctcacttttaccgcccaggctggagtgcagtgccatgatcacagctcactgcaggttcagccttctgagttcaagcaatccttctgtctcagtctcctcagtagctggggctttaggtgggcactgccacaccgtactaatttttgtattttttgtagagacgaggtcccaccatgttgcccaggctggtgtcaaactcctgggctcagtcagtccccccatctcaccctccccaagtgctggaattacaggcgtgagctactgtgcccagccttacggacatccttttgaattatctttttcactcatagaatatgaatacatttatttagactttttctagaactttcctgttttcatgtctttgcttcatctggaattggcttaacacccttttataaagtttgtgtttgtaaaatttccattgtgacatcaatacgcaatatattttgtaatataggagtttctatttttttattaaaatggcaatgaaagcaa

SEQ ID NO: 32506 - DNA, 2832 bp, Homo sapiens
  source 1..2832: mol_type = unassigned DNA
ccgagcgggctgggggaggggagcgtggggccgacagttttgggggtgaaaaggcaaaaggcgggtgaaaggctgcctcccgagactctccttgcttggaattctgcccactctgcggagttagcagtcacgacctccagcacaggatgtggtaccacagattgtcccacctacacagcaggcttcaggacttgctgaagggaggagtcatatatccggcccttccacagcccaacttcaaaagcttacttcctttagctgtccattggcaccatacagcctccaagtctctgacttgtgcttggcagcaacatgaagatcattttgagctgaaatatgctaataccgtgatgcgctttgattacgtctggcttcgagaccactgccgctcagcatcgtgctacaactctaagactcaccagcgcagcctggatactgccagtgtggatttatgtatcaagccaaagaccattcgtctggatgagaccacactctttttcacttggccagatggtcatgtgactaaatatgatttgaattggctggtgaaaaacagctatgaagggcagaaacaaaaagtcatccagcctagaatactatggaatgctgaaatctaccagcaagcccaagttccatcggtagattgccagagcttcttagaaaccaacgagggactgaagaagtttctgcaaaactttctgctctatggaattgcattcgtagaaaatgtccctcccactcaagagcacacagagaagttggcagaaaggatcagcttaatcagagaaaccatttatgggaggatgtggtatttcacttcagacttctccagaggtgacactgcgtacaccaagctagctctggatcggcacactgacactacctattttcaagagccctgtggcattcaagtgtttcattgtcttaaacatgaaggaactggtggcaggacactgctagtagatggattctatgcagcagaacaggtacttcaaaaggcacctgaggaatttgaactcctcagtaaagtgccattgaagcatgaatatattgaagatgttggagaatgtcacaaccacatgattgggattgggccagtcttaaatatctacccatggaataaagagctgtatttgatcaggtacaacaactatgaccgggctgtcatcaataccgttccttatgatgtcgtccatcgctggtatacagcacaccggactctaacgatagagttgaggagacctgagaatgagttttgggtcaaactaaagcctggcagggtcctatttatagacaactggcgtgtcctacatggcagggaatgcttcactggctaccgccaactgtgtggctgctatttaacaagagatgatgtattaaacactgctcgcctcttggggcttcaggcttaaaattgacagcatctggattatgaatacacctggcaccctggctaccagaatttcatatgggcagaataatattgtgtcaaactctacttcagattgtctccttatcccatcccacaaaacagaatctgtccgtttctctagtaagggagacttgttggagaggcgggactctgagttatctaatgtcagacatctagtggggcagctctcttcctcatgttataacatggatccacttgtttgatttaaaccttttaatataattttggtcagtctccttcagaaatataatctccatattgataggaaagcaataattgccatgaggtaacgatttttttcccaagtagatcagttagaaagaaatgcattctagaaataacaaaaatcctgataaagcaacaatttgcaaaatgtttggtcttaggacaccttaacactcttaaaagttattgaaggccccaaggagttcttgggtgtgggttctatctattgatactaattattttaggtattaagactgagaaatatttaaagctcaagaagaacacagaagcacacatccctcagctatgagagagatgacataaccatatgtcatgtagcctctggaaaagtcctctgtatcctcatgagataacgagagggggaaaaaaagctactactgcctttgtaacttccacttagcctactacagggctatgcacatcttagtttccaaaagtctgcttaatttcaaaagaaaaatgcctaattgaatgtaactcatcttggtgttattatacaaaataatttttaatctgcagacccacgaaaagggtctcagggactcctccaggggtcttcagaccatactttgagaacccatgggctagcgactaccttgagacagtcctttacctaggcctgtggattaaagggtttagctgaaaccctagattcttctctgtagtctaatagaactccaaacattgtaagaattgcttggtagcataagctcagggataaggtgggaattgagttcaaatatagtgttttatcttccacacaaatcatctctataggagttaaattaggaagtcacaacagcgcctgttgaacaaactcatcagtgtggtaatcctatgagggataattgcagaaaggttttagagacttgtgaggttccatatgataattctttacacctccccccccaagagaaagtacacagggctattctgtaatattgttcagggaaatcagcatgatagatgctgtgcctccagagagttctctggagattactacccaaatgtgtattttggcaatttggtggtatttaggatgtaatatgttttcctccatttctgctaattttctctctctctctctcataacatactatacatgctaattgccaagatttgaatgagtcaaa

SEQ ID NO: 32507 - DNA, 1248 bp, Homo sapiens
  source 1..1248: mol_type = unassigned DNA
ggcgggtgaaaggctgcctcccgagactctccttgcttggaattctgcccactctgcggagttagcagtcacgacctccagcacaggatgtggtaccacagattgtcccacctacacagcaggcttcaggacttgctgaagggaggagtcatatatccggcccttccacagcccaacttcaaaagcttacttcctttagctgtccattggcaccatacagcctccaagtctctgacttgtgcttggcagcaacatgaagatcattttgagctgaaatatgctaataccgtgatgcgctttgattacgtctggcttcgagaccactgccgctcagcatcgtgctacaactctaagactcaccagcgcagcctggatactgccagtgtggatttatgtatcaagccaaagaccattcgtctggatgagaccacactctttttcacttggccagatggtcatgtgactaaatatgatttgaattggctggtgaaaaacagctatgaagggcagaaacaaaaagtcatccagcctagaatactatggaatgctgaaatctaccagcaagcccaagttccatcggtagattgccagagcttcttagaaaccaacgagggactgaagaagtttctgcaaaactttctgctctatggaattgcattcgtagaaaatgtccctcccactcaagagcacacagagaagttggcagaaaggatcagcttaatcagagaaaccatttatgggaggatgtggtatttcacttcagacttctccagaggtgacactgcgtacaccaagctagctctggatcggcacactgacactacctattttcaagagccctgtggcattcaagtgtttcattgtcttaaacatgaaggaactggtggcaggacactgctagtagatggattctatgcagcagaacaggtacttcaaaaggcacctgaggaatttgaactcctcagtaaagtgccattgaagcatgaatatattgaagatgttggagaatgtcacaaccacatgattgggattgggccagtcttaaatatctacccatggaataaagagctgtatttgatcagattattcaaagaaaaacaaaacacggtcaacaggcagtggaactcctcactccaatgtgatattcctgagagaatattgacttatcgtcacttcgtctctgggacaagtattgaacataggggaagccttatataaaattgttcaataaacaaaagatgtctttaa

SEQ ID NO: 32508 - DNA, 8438 bp, Homo sapiens
  source 1..8438: mol_type = unassigned DNA
ggcggcagcgggtcggtgtagaaaatggcgctggtgcagcggctcgggcctctccccgcggcgctgcggagggcttgaggctcgcgagcctccttcgccgcgccccacttgctcgtgcactttacacacatgagagaattggaagctaaagctaccaaagacgtagaaagaaatcttagcagggatttagtgcaagaagaagaacagttgatggaagaaaagaaaaagaaaaaagacgacaagaaaaagaaggaagctgctcaaaagaaggccactgaacaaaaaatcaaagtgccagaacagataaagcccagtgtaagccagcctcagcctgccaactctaataacggcacttccacagcaaccagcactaataataatgccaagcgagctacagccaacaatcagcagccacagcagcagcagcaacagcagcagccgcagcagcagcagccacagcagcagccacagccgcagccgcagcagcagcagccacagcagcagccacaggccttgcctcggtatcctcgtgaagtacctccacgatttcgccaccaggaacacaaacagcttctaaagaggggtcagcattttcctgttatagcagcaaaccttggatctgctgttaaggtgttaaacagccagtcagaaagcagtgctttaacaaatcaacagccacaaaataacggagaggtgcagaacagcaaaaaccagtcagatataaaccacagtacttcaggatcccattatgaaaattcccagcggggacctgtgtcttctacaagtgattctagcacaaactgtaagaatgctgttgtaagtgacttgtcggaaaaagaagcatggccctcagcccctggcagtgatccggagttggcttcagaatgtatggatgctgattctgcctccagttctgaatcagagagaaacatcactatcatggcttcagggaacacaggtggtgaaaaagatggccttcggaatagcactggacttggttcccaaaacaagtttgtagttggtagcagcagcaataatgtgggccatggaagtagtactgggccatggggtttttcccatggagccataataagcacatgtcaggtctctgtggatgctcctgaaagcaaatctgaaagtagcaacaatagaatgaatgcttggggcactgtaagttcttcatcaaatggagggttaaatccaagcactttgaattcagctagcaaccatggtgcctggccagtattagagaacaatggacttgccctaaaagggcctgtagggagtggtagttctggcattaatattcagtgcagtactataggccagatgcctaacaatcagagtattaactctaaagtgagtggtggttctacccatggtacctggggaagccttcaggaaacttgtgaatctgaagtaagtggtacacagaaggtttcattcagtggtcaacctcaaaatattaccactgaaatgactggaccaaataacactactaactttatgacctctagtttaccaaactccggttcagtgcagaataatgagctgcctagtagtaacacaggggcctggcgtgtgagcacaatgaatcatcctcagatgcaggctccatcaggtatgaatggcacttccctttctcaccttagcaatggagagtcaaaaagtggaggctcttatggtactacatggggtgcctatggttctaattactctggagacaaatgttcaggccctaatggccaagctaatggtgacactgtgaatgcaactctaatgcagcctggcgtaaatggtcctatgggcactaactttcaagttaacacaaacaaaggaggtggtgtgtgggaatctggtgcagcaaactcccagagtacatcatggggaagtggaaatggcgcaaattctggaggaagtcgaagaggatggggaacccctgcacaaaacactggcactaatttacccagcgttgagtggaacaaactgcctagcaatcagcattccaatgatagtgcaaatggcaatggtaagacgtttacaaatggatggaaatctactgaggaagaggatcagggttctgccacatctcagacaaatgagcaaagcagtgtgtgggccaaaacaggaggtacagtggagagcgatggtagtacagaaagcactggacgccttgaggaaaaaggaactggggaaagtcagagtagagacagaagaaaaattgatcagcacacattactccaaagcattgtaaacagaactgacttagatccacgtgtcctgtccaactctggttggggacagactcctattaagcagaatactgcctgggatacagaaacatcacctagaggggaacgaaagactgacaatgggacagaggcctggggaagctctgcaacacagacttttaactcaggggcatgtatagataagactagccctaatggtaatgatacctcatctgtatcagggtggggcgatcccaaacctgctctgaggtggggagattccaaaggctcaaactgccagggggggtgggaagatgattctgctgctacaggaatggtcaagagcaatcagtgggggaattgcaaagaggagaaggctgcatggaatgactcgcaaaagaataaacagggatggggtgatggacaaaaatcaagccaagggtggtctgtttctgccagtgataactggggagaaacttcaaggaataaccattggggtgaggccaataagaaatccagctcaggaggtagtgacagtgacaggtccgtttccggttggaacgaacttggtaaaactagttctttcacttggggaaacaacataaatccaaataattcatcaggatgggatgaatcttctaaacctactccttcccagggatggggagaccctccaaagtctaatcagtctctaggttggggagattcgtcaaagccagtcagctctccagactggaacaagcaacaagacattgttggatcttggggaatcccaccagctacaggcaaacctcctggtacaggctggctggggggacctataccagccccagcaaaagaagaagaacccacaggctgggaggaaccatccccagaatctatacgtcgcaaaatggagattgatgatggaacttcagcttggggagatccaagcaaatacaactacaaaaatgtgaacatgtggaacaaaaacgtcccaaatggcaacagccgttcagaccagcaagcacaggtacatcagctgctaacgcctgcaagtgccatctcaaacaaagaggcaagcagtggctctggctggggtgagccctggggggagccttctactccagccacaactgtggataatggtacttcagcatggggtaagcccatagacagtggtcccagctggggggaacccattgctgcggcatccagcacatccacgtggggctccagctctgttggtccacaagcattaagcaaatctgggccaaaatctatgcaagatggctggtgtggtgatgatatgccattgcctggaaatcgccccactggctgggaagaggaagaggatgtggagattggaatgtggaatagtaattcatctcaagagcttaactcatctttaaattggccaccatatacaaagaaaatgtcatcgaagggtctgagtggcaaaaaaaggagaagggaaaggggaatgatgaaaggtggaaacaaacaagaagaagcgtggataaatccatttgttaaacagttttcaaacatcagtttttcgagagactcaccagaggaaaatgtacaaagcaataagatggacctttctggaggaatgttacaagacaaacgaatggagatagataaacatagcctaaatattggtgattacaatcgaacggtcgggaaaggccctggttctcggcctcagatttccaaagagtcttccatggagcgcaatccttattttgataaggatggcattgtagcagatgaatcccaaaacatgcagtttatgtccagtcaaagcatgaagcttcccccttcaaatagtgcactacctaaccaggcccttggctccatagcagggctgggtatgcaaaacttgaattctgttagacagaatggcaatcccagtatgtttggtgttggaaacacagcagcacaaccccggggcatgcagcagcctccagcacaacctcttagttcatctcagcctaatctccgtgctcaagtgcctcctccattactctcccctcaggttccagtttcattgctgaagtatgcaccaaacaacggtggcctgaatccactctttggccctcaacaggtagccatgctgaaccagctatcccagctaaaccagctttctcagatctcccagttacagcgattgttagcgcagcagcaaagggcgcagagtcagagaagcgtgccttctgggaaccggccgcagcaagaccagcagggtcgacctcttagtgtgcagcagcaaatgatgcaacaatctcgtcaacttgatccaaacctgttggtgaagcagcagactccaccatctcagcagcagccactccatcagccagccatgaagtctttccttgacaatgtcatgccccacactacacctgagctgcaaaaagggccatcaccaataaatgctttcagcaacttccctataggcttgaactcaaacttgaatgtaaatatggatatgaacagtattaaagagccacagtcaagactaaggaagtggacgacagtggacagcatttctgtgaacacatctttggatcaaaactccagcaaacatggtgctatttcaagtggtttcaggctggaagagtctccatttgttccctatgactttatgaacagcagtacttcaccagccagtcctccaggttcaataggagatggctggccacgtgccaaatcgcctaacggctctagcagtgttaattggccaccagaatttcgtcctggtgagccatggaaaggttatccaaacattgaccctgaaactgacccttacgtcactcctggcagtgtcataaacaatctttcaattaatactgtgcgggaagttgaccacctcagggacaggaacagtgggtcatcctcatccttgaacaccacgctgccttcaactagtgcctggtcatccattcgtgcctccaactacaacgttcccctcagcagtacagcacaaagcacttcagccagaaatagtgattccaaattgacatggtctcctggttcagttacaaacacctctctggctcatgagctgtggaaggtccctttgccacctaaaaacatcactgctccgtcccgcccacctccgggactgactggtcagaagccacccttgtctacgtgggataattctccccttcgtataggtggaggatggggaaattctgacgccagatataccccaggttccagctggggtgagagcagctcagggagaataacaaattggcttgttctaaaaaaccttacacctcagatcgatggctcaactctgcgcactctgtgcatgcagcacggcccgctgatcacattccacctgaacctccctcacggaaatgctctggtccgctacagttcaaaagaagaggtagtgaaggcacaaaagtctctgcacatgtgtgtactggggaacactactattcttgctgagtttgccagtgaagaggagatcagtcgtttctttgcacaaagccagtctctgaccccttctcccggctggcagtctctcgggtccagccagagccggctgggctccctcgactgttcccactcattctccagccggaccgatctcaatcactggaatggtgctgggctgtcgggaactaactgtggagaccttcacggcacttcactctgggggaccccgcattattccacaagcctgtggggtcccccaagcagcagcgacccccgaggaattagcagcccatctcccattaacgcttttctttctgttgaccacctgggtgggggtggagagtccatgtaacagtgtagatgcagactcaccgaccgggacctcagacgcgagggaaaggagcactaagtggggctcgccgcctgcagccaggggccgcctgtgggaacagctattctctgcacattttccactttgttttccccaaaacatatcagtttgaatacttgaatcatgcaggccaatattataatgtgaaaaggtatctactctatttacactcccaaatagcgccatacatgctaaaccgtagagaatgagctcgcttgtgtctattcatcatgtttagcctttggattctttttttttttttccttctattcctccccaacccccccccccgcccctttttttctctcttgcaaaaccattttttgggctgataacgtatgagcttttccctttgcactgaatgatgttctctccgtctcatcggcagtatggggggcagctgtcccagtgtcaatgtttactcaagggtgttcttaggaggcgtgcgctctctactatgccttgatgttgcctaccttattgtggtatcgtggagtttaaaagatcaagttaggatgctgacttaggattattaatgaaagtgttgcaccagttttttcatgttgtaaaactaaagaatttcgctctgcagtttgaaaaactgtggccacagctgtgacttgcagcccacctgccacccaggacgggccctgcactttgaataggctttccattttgttttggaggttctcactttgaaccttcttgtttacagatttttttgtttgttttttgagaaaaaaaaatgtttactcttccatcatttaaaaaaaatgtaaaagacaaaaaaaaaatggaggatgatttaaaagatgctttctatctctgggaaaaaggagcagcatttggccatgttcttttgtttttctattcctgtcccaaatcaaagagcatggttctcaggaaaaccagttccccagtttaaaaaaaaaaaaaaaaattccttgtagtttcttagaggaaaaaaagaaaaaccccaacttttagcactgatactacatattgctctgttaaagaattttctctgccaaaaaaaaagaaaaaacaaaaaaacgcttaaagctggagtttgacattctgctttcagatgctgtctttttattagtgagtgatgatggtttgctaataatcaataggtaataattttttgtaatcccatcaagtggctccatatgtttctgctctctcgtgactgtgttaatgtttaactgttgtaccttaaagccgaaatcagtaactatgcatactgtaaccaaggtattgggcttacagagttgtttgttgtataaagaaaattttaaatgttgttgcaaactaacgagttacaccattttaaactttctttcctcccccctttttttgcccacaaatggtattataatgcttgcttagtcaaagaagagagactaaacaagggtaaaaattttaacagtacagaatttgccatcatatcattgccttgattctaactgtttgtgtcctaagatgcaaaagaagtcagtggcttttaactgtttacaaatagaatgtgattgtaaaatgtacagtttggttgtgtttgaattatgaaatttcttcagatataataaaccatgactttttggctgctcaacattaattgtctcctttttgtgaatttatttgtaggctcttttttataatgaaagtttcaaagttgctatgtatgagggttctcatagagcaaccgattaaaaatctaagcaaatatttgaacattttatctgaactcatcacaatttcaccctgaaataatgtgagaacaatgggaaactgtagcttgctccttcccaccctctctgagcatctttgggatcttgttgctcaaaactcttctgtgacttcatcttccccaccatttgtgcccatctcaagcctcagcaagaaaccatgtggaacatgaagcttaatgacttgacagtgtactagtgttaaactctcatacctctgttacaaagcgagaaacgccacacccggactggccttttcttcccccttcacggccctcgcttctccctgcaggagctcgggggcgaaacctgtgtatggatttcagtgtatgacttcagatcatgctccaacttgccaggtgtgagctaatgttgtcggacaccttactataagcaaatgttattcagtgcgttcaatgtatattgacttccatactggtttttccaaaaaccaaaggtagctttgaaaaaccatgtctggaaatgtttggagcgttaagctgattgaccttctgaccttggggctttgagtagtatataattcataactgcgttaattgtattgttaaagtgtttgggagttttttgcgcttgttatgtggaaataaagtgtttgatttaaaattttttaaa

SEQ ID NO: 32509 - DNA, 2398 bp, Homo sapiens
  source 1..2398: mol_type = unassigned DNA
taaatatggatatgaacagtattaaagagccacagtcaagactaaggaagtggacgacagtggacagcatttctgtgaacacatctttggatcaaaactccagcaaacatggtgctatttcaagtggtttcaggctggaagagtctccatttgttccctatgactttatgaacagcagtacttcaccagccagtcctccaggttcaataggagatggctggccacgtgccaaatcgcctaacggctctagcagtgttaattggccaccagaatttcgtcctggtgagccatggaaaggttatccaaacattgaccctgaaactgacccttacgtcactcctggcagtgtcataaacaatctttcaattaatactgtgcgggaagttgaccacctcagggacaggaacagtgggtcatcctcatccttgaacaccacgctgccttcaactagtgcctggtcatccattcgtgcctccaactacaacgttcccctcagcagtacagcacaaagcacttcagccagaaatagtgattccaaattgacatggtctcctggttcagttacaaacacctctctggctcatgagctgtggaaggtccctttgccacctaaaaacatcactgctccgtcccgcccacctccgggactgactggtcagaagccacccttgtctacgtgggataattctccccttcgtataggtggaggatggggaaattctgacgccagatataccccaggttccagctggggtgagagcagctcagggagaataacaaattggcttgttctaaaaaaccttacacctcagatcgatggctcaactctgcgcactctgtgcatgcagcacggcccgctgatcacattccacctgaacctccctcacggaaatgctctggtccgctacagttcaaaagaagaggtagtgaaggcacaaaagtctctgcacatgtgtgtactggggaacactactattcttgctgagtttgccagtgaagaggagatcagtcgtttctttgcacaaagccagtctctgaccccttctcccggctggcagtctctcgggtccagccagagccggctgggctccctcgactgttcccactcattctccagccggaccgatctcaatcactggaatggtgctgggctgtcgggaactaactgtggagaccttcacggcacttcactctgggggaccccgcattattccacaagcctgtggggtcccccaagcagcagcgacccccgaggaattagcagcccatctcccattaacgcttttctttctgttgaccacctgggtgggggtggagagtccatgtaacagtgtagatgcagactcaccgaccgggacctcagacgcgagggaaaggagcactaagtggggctcgccgcctgcagccaggggccgcctgtgggaacagctattctctgcactttgaataggctttccattttgttttggaggttctcactttgaaccttcttgtttacagatttttttgtttgttttttgagaaaaaaaaatgtttactcttccatcatttaaaaaaaatgtaaaagacaaaaaaaaaatggaggatgatttaaaagatgctttctatctctgggaaaaaggagcagcatttggccatgttcttttgtttttctattcctgtcccaaatcaaagagcatggttctcaggaaaaccagttccccagtttaaaaaaaaaaaaaaaaattccttgtagtttcttagaggaaaaaaagaaaaaccccaacttttagcactgatactacatattgctctgttaaagaattttctctgccaaaaaaaaagaaaaaacaaaaaaacgcttaaagctggagtttgacattctgctttcagatgctgtctttttattagtgagtgatgatggtttgctaataatcaataggtaataattttttgtaatcccatcaagtggctccatatgtttctgctctctcgtgactgtgttaatgtttaactgttgtaccttaaagccgaaatcagtaactatgcatactgtaaccaaggtattgggcttacagagttgtttgttgtataaagaaaattttaaatgttgttgcaaactaacgagttacaccattttaaactttctttcctcccccctttttttgcccacaaatggtattataatgcttgcttagtcaaagaagagagactaaacaagggtaaaaattttaacagtacagaatttgccatcatatcattgccttgattctaactgtttgtgtcctaagatgcaaaagaagtcagtggcttttaactgtttacaaatagaatgtgattgtaaaatgtacagtttggttgtgtttgaattatgaaatttcttcagatataataaaccatgactttttggctgctcaac

SEQ ID NO: 32510 - DNA, 9632 bp, Homo sapiens
  source 1..9632: mol_type = unassigned DNA
aggctgctgatcaaaaaaccaaagtgccagaacctactaagacctgttcaagccagccccaacctgccggtaccagtaccagtacttccaccagcactatctcaagcagcaacaatggcaaacgtgcatctgccagtggccagcagccagctgcatcccgttacctgcctcgtgaggtgcctccacgcttccgccagcaagaacagaagcagctattaaagagaggccagccattgcctacggggactctaaccagtgtgagcccaacccagggtgctgggcctgcaggggtaagcccacctcccctacctggagccggaacacagcatcatcccagtaagctccaaccagatctcagtcatagtggattggcagatcattatgaaaattcccactggggacagcagcctacttacagaagcgaagccaactgcagctgggataaagtgataatagataggactgacaaggaggcgtggccttccatcacaggaacagagactgaatctgcctcagaatgtactacagacactgactctgcctccaactgtggctcagagaacagtagcatggctacagggagtgcccagggcaacttcactggacataccaagaagacaaatggcaataatggcaccaatggcgcactcgtccaaagcccttctaatcagagtgcccttggagcagggggagcgaacagtaatggaagtgcggccagagtgtggggtgtagccacaggctccagctctggcctggctcactgctctgtcagtggtggggatggaaaaatggacactatgattggagatgggagaagtcagaattgctggggtgcttccaactccaatgctggcattaatcttaaccttaatcctaatgccaacccagctgcctggcctgtacttggacatgaaggaaccgtggcgacaggcaacccttccagtatttgcagtccagtcagtgccataggtcaaaatatgggcaaccagaacgggaacccaacaggcactttaggtgcttggggaaacttgctgccacaagagagcacagaaccacaaacgtccacttctcagaatgtgtctttcagcgcacaacctcagaaccttaacactgatggaccaaataacactaaccccatgaactcttcacccaaccctatcaatgcaatgcagacaaatggactgccaaactggggcatggctgttggtatgggggccatcatcccgccccacctgcaaggccttcctggtgctaatggatcatcagtttctcaagtcagtgggggcagtgctgaaggaataagcaattctgtgtggggactgtccccaggtaaccctgccacaggaaatagcaattctgggttcagtcaggggaatggagacactgtgaactcagcattaagtgctaaacaaaatggatccagcagtgctgtgcaaaaggaaggaagtggaggaaatgcttgggattcaggacctcctgctggtcctggaatactcgcctggggaaggggcagtggcaacaatggcgttggtaatatccattcaggagcttggggccaccccagccgaagcacctctaacggtgtgaatggggaatggggaaagcccccaaaccagcattccaacagtgacatcaatgggaaaggatcaacagggtgggagagtcctagtgtcaccagccagaaccctaccgtacagcctggtggtgaacacatgaactcctgggccaaagcggcatcttctggaactacagcaagtgaaggaagtagtgatggttctggcaaccacaatgaaggaagcactgggagggaaggaacgggagaaggccgaaggcgagataaagggattatagaccaagggcacatccagttgccaaggaatgatcttgacccaagagttctgtctaatactggttggggacagactcctgtaaagcaaaacactgcctgggaatttgaagaatcccctaggtctgaaaggaaaaatgacaatgggacagaggcctggggttgtgcagctactcaggcttcaaactcaggggggaagaacgatgggtccatcatgaacagtacaaatacctcttcagtatctgggtgggtcaacgcgccacctgccgctgtgccagcaaacacaggttggggagacagcaacaacaaagcgccaagtggcccgggggtttggggggactcgataagctctactgctgttagtactgctgctgctgccaagagtggccatgcttggagtggggccgcaaatcaggaggacaagtcacccacctggggtgagcctccaaagcccaaatcccaacactggggagatggacaaagatcaaatccagcctggagtgcaggagggggagattgggcagattcatcgtctgtccttggacacttgggggatgggaaaaaaaatggatctggatgggatgctgacagtaataggtcagggtctggttggaatgacaccacgagatctgggaacagtggctggggcaacagcacaaatacaaaggccaatccaggtacaaactggggggagactttaaaacctggcccccaacagaactgggctagcaaaccccaagacaacaatgtgagtaactggggaggagctgcttctgtgaaacagacaggaacagggtggatcggggggccggtaccggtcaaacagaaggacagcagtgaagcaactggctgggaagaaccctctccaccgtccattcgccgcaaaatggaaattgatgatggtacctcagcttggggggacccaagcaactataacaataaaactgtaaacatgtgggatagaaacaacccggtcatccagagcagtaccacgaccaataccaccaccaccaccaccactaccacgagcaacaccacacacagggtcgagacgccgcccccgcaccaggccggtactcagctgaatcgatcaccgttgcttggtccaggtaggaaagtttcatcaggctggggagaaatgcctaatgttcactcaaagactgaaaactcttggggagaaccatcctccccttctaccctggtggataatggcacagcagcatgggggaagccacccagcagtggcagcgggtggggagatcaccctgcagagccgccggtggcatttggaagagctggcgcacctgttgctgcctcagccctgtgcaaaccagcttcaaaatctatgcaagaaggctggggcagtggtggggatgaaatgaacctcagtaccagccagtgggaggatgaagaaggggacgtgtggaataatgctgcttcccaagaaagcacctcctcctgcagctcctgggggaacgcccccaaaaaaggacttcaaaagggcatgaagacgtctggcaagcaggatgaggcctggatcatgagccggctgatcaaacaactcacagacatgggcttcccgagagagccagctgaggaggccttgaagagtaacaatatgaatcttgatcaggccatgagcgctctgctggaaaagaaggtggacgtggacaagcgtgggctgggagtgaccgaccataatggaatggccgccaagcccctcggctgccgcccgccaatctccaaagagtcttccgtggaccgccccacctttcttgacaaggatggcggcctcgtggaagagcccacgccttcaccgttcttgccttccccaagcctgaagctccccctttcacacagtgcactccccagtcaggccctgggtgggattgcctccgggctgggcatgcaaaacttgaattcttctagacagataccgagtggcaatctgggtatgtttggcaatagtggagcagcacaagccaggaccatgcagcagccgccacagccaccagtgcagcctcttaactcttcccagcccagtctccgtgctcaagtgcctcagtttctatcccctcaggttcaagcacagcttttgcagtttgcagcaaaaaacattggtctcaaccctgcactattaacctcgccaattaatcctcaacatatgacgatgttgaaccagctctatcagctgcagctggcataccaacgtttacaaatccagcagcagatgttacaggcccagcgtaatgtgtccggatccatgagacaacaggagcagcaagttgcgcgcacaatcactaatctgcagcagcagatccagcagcaccagcgccagctggcccaggccctgctcgtgaagcagccaccaccgccaccgcccccgccgcacctgtctctgcacccctctgcaggcaaatcggccatggacagcttcccctcgcacccacagactcccggcctacctgacctgcagaccaaagagcagcagtcttcacccaacacctttgctccttaccctctcgctggactgaacccaaacatgaatgtcaacagcatggacatgaccggtggcttgtcggtgaaggacccatcccagtcccagtcacgcctcccccagtggacgcaccccaactccatggataacttgcccagtgccgcttcccccctggagcagaaccctagcaagcatggtgctatccctggaggtctaagcattgggcctccaggtaagtcctccattgatgactcctatggccggtacgatttaatccagaacagtgagtcaccagccagtcctcccgtagctgttccccatagctggtcacgtgccaaatctgacagtgataaaatctcaaatggctctagcatcaactggcccccagaattccatccgggagttccatggaaaggactgcagaatattgaccctgagaatgaccctgacgtcactcctggcagtgtccccactgggcctaccatcaacaccaccatccaggatgtcaaccgctacctcctcaagagtggaggtaaactgtcagacatcaaatcgacgtggtcctctggccctacctcccacacgcaagcctctctgtctcatgaactatggaaggtgcccagaaacagtactgcacccacgaggccacctccagggttaaccaatcccaagccctcctccacctggggtgccagccccctcggctggaccagctcctactcctcgggttctgcctggagcaccgacacctcaggaagaaccagcagctggctcgttcttcgaaacctcactccccagattgatggttctacactgcggacattgtgtttgcaacatgggcctcttatcacattccacctgaatctgactcaaggcaatgctgtggtccggtacagctccaaggaggaggctgccaaggcccagaagtctctgcacatgtgcgtcctgggaaacactaccatcctggccgagttcgctggtgaagaagaagtgaatcgcttcttagcccaaggccaggcgctgccacccacttccagctggcagtccagcagcgcgtccagccagccgcggctcagcgcagcgggcagctcccatggcctggtacgcagcgacgctggccactggaacgccccgtgcctgggtggcaaggggagcagtgagctgctgtggggcggggtgccccagtactccagcagcctgtggggcccgcccagcgccgacgacagcagggtgataggcagccccacgccgctaaccaccctgctgcctggggacctgctcagcggggagtccctgtaggctctgccatcatcagcaccaggagagccgacccctcccgggacccctcccggctgggcggccccacagacccgctggaacccagcagcggccgcccttttgagtacctctgtccaggactgaagacgaaccttggccgcagtccttgcgaactgttcgcaaaacagtgcgggctgcggtgggtcagcgtcacatgctaatgacaggatgttcctcgtagctttttattttgtgcgtcttatgtttgtatagtgtgttgtcattttgattttttttttttttttaagtataaaagctgcttagaatagttctatcatgaagggcacttttcagattgtgggctggaaagggttattttatctgtgggggagggagggagacgtgaagcctatttaaaatgagcctgtgacgattatgcacatgaccagaggcggccggtaatcagggcagagtctggtgtggaccgccgggcgcagagcggctccgcggcgggagctgagcggaaggcgcgggctgcgatctgctctctgttcccctggatccgcctatgcacattacccttgtttcattactttttcatgtcatttttttatcccaaaaaatattttttaaaagttaaaaaaagacatatcaaacatgcaaatacttgaatccagcaggccaatagtgaaatgtgaacactttctaattctacacttccaggttgacatcagtacacagaaacaggctctaggaaaaatttctaagttcatagcctacgtgtgtgtatgtgtgcgtgttgaaacagaagtgtgtgtgtgtgtgcatgtgtggcgcgtgctcctgcacggcgtgcagttttctgtgtttgtgtgtttgaaagcgtgtgaggatttaactgtgggttttcccttgtattcagtatacgctttttttttggcgcattggtcaaacggttgttattattagcttctaactttgcactgagtgtcctcgcccttcctttagctaatcctatacattacagagaattcctaggacagggctggcgacaattcatgtgtaaatgtttactcaaggactctgtgactgcgtttaaaaagtacagtgtatatctctggagaaataacatgtatacctacctttagcagctttttattgtggactaatgcaagaaaattattaccagagtattgcaccatttttccatttggaatataaagttaaagagaaaaaaaaaaaaaactgttgttgaactgtggccatagatacttgtaaagaatggatggttccgtggaaggaacagaaacaagcacttgggcgtgggttgtgactgcttttgggggagcctggggtttgggctcccacctgtttacagacctttttttctccttcagactttaaaattttaaaaatttaaaaaggaattaaaaaaaaaaaaagacttccgtcgtaaagaaacctattttcagaatgcagatgcgttccttcagagctctgggacgggacagtgttgttccctcggccatcgtcgtggactctgtcgattgctttcgccccttcgtcaaggtgacaggcgttgtggccactgtcttgcacatgccggacgcgctctcaggaaagccagggctcccgagggcagctccacaccatttcatgtatttttaaacccaactcctagcactgaagatgttatttaaaaaaaaaaaaaacaaaacaaaacaaaaaaatgaaaaaaaagaaaaagaggaaaaaaaaacacaaagaagaaaaatacctaatctctaatgtgtagcagttacatatttaccaaataatggactcaaaagaaatagatgtttgaagagtgctttatatattaaaaattgctttatgttttaaaaatgatcaatgttttgattgttttgcaaggaagaaagacaatggaataacataccttcaagtatgttttaaaaaatatatatatgaacattgtgctccctgcctgcttgatcaggaaacttgtgcattacatttttttaattagctttttaatggttttatcaaaacaaaaaaaatacaaaaaaaaaaaaaaaagtcctgcaagactgcagatccacaaaagctggttttatagaggatcatgaactatgcacaaactgggttcaagactttttttctcaagtttagtaggatatttagaaaaaccaaccttcctcagagtgactgcatctcattgccattacatgcgttctatatattcgatggacatacacctgcgtatgtatatccaatatgtgtgcgtgtgagcatgcgtgtgcgtatgtgcgtccgacataccacttcccgtgctgccggcgagcattgagttgtagaaaaactgttgttttaaaattggggatggaagtcaagaatatgtttgtttgtttttgggttttgttgggtttgaggggttttttgtttgtttgttttttgttttttttaccttttattttgaacttaatatgtctgtaactctgagattaaacaacaagttcgtggctcttaatgttttcctcatagaatgtgactgttgaagaacatgcatcgaaagttgctttcgaaagtacaacgctttattgaatcttaataaattgcaatttttttcttggctgttcaaagtaatgtgtttttcatttttcaaaagacactatggatgtctactttgcacgctgcgattgggagagctgtcccgctgcatgcgttccctctgtaatttcctcagagctcacatacgtacctctctcacgagtgaactcagattttccattgttttgctttattctatcatttgctttgtggttttgctgtaaatattgaaatcttaatcatcatcgagaggcacagccaagctttccagctctccacccccgtggcccatccaagtctgttcatctggtaacttctgttgtctgggacggcagcaagaagatgccggggcttgcctggagtcctggcagaggagtgccactcacttttgcctagggtccagttggggcttaaaaaatatttggagagaagagtaatgaggattttttgtgtttcctagacattttatgcatctatttttgtaaaatcaccttcgctaactttcaccaagcactttgagcacagtggaacttcagaagcacaaccagcctaaccccagaatctcaggtggcacagctagaaattgagtcccttcctaggacactggccgtggccttcagggtgaccagtcagtgccaccgggttggcattggtgttacagacaggcctctgaagacaaaccgagcaccccagcggcccctcaaactaagcaaggatcttttttctgtctgcgctccctggggcaaggtcaaaggtggacccgcccactgtgggtcaattccttcgaaaagatgggacccgcacccccgccacaggctggcccccccccacccatggggaaggtggtgtgctgctggctctgaccatactcttttggaaattgagaaggaaagcattgagtgggacctaatccggagaagaaattaaagaccagaaaaagaaggaagctgggaatgaaactcaaaatgcacttgaacctggaagcggcaaccctcagctctgcgcggccgagcctcagcaagagttcgttttgtgcctgagttactactacaggggcaaactgtacccgtgcctgtgcgctgggagaacaaggtcagcgcccaagggtgtgcaaaggatgtggcaggcttcatggaggaggtggcatttgccctgggcctgggagaccaggttggattttgacagactgggaactcgggggacaggagggcagcacagtgtaagctaaagccctgtgtagggaccccacgcaaagacctcgtgggcctgggtgtccagggcaccatttccacccatgggtgaaaaagaggcttgaggaagacaacaggttcttcacctgcatctgtggatatatatttttttaagtttattaaatttttttttaaatggcagtttcagacctgc

SEQ ID NO: 32511 - DNA, 9740 bp, Homo sapiens
  source 1..9740: mol_type = unassigned DNA
aggctgctgatcaaaaaaccaaagtgccagaacctactaagacctgttcaagccagccccaacctgccggtaccagtaccagtacttccaccagcactatctcaagcagcaacaatggcaaacgtgcatctgccagtggccagcagccagctgcatcccgttacctgcctcgtgaggtgcctccacgcttccgccagcaagaacagaagcagctattaaagagaggccagccattgcctacggggactctaaccagtgtgagcccaacccagggtgctgggcctgcaggggtaagcccacctcccctacctggagccggaacacagcatcatcccagtaagctccaaccagatctcagtcatagtggattggcagatcattatgaaaattcccactggggacagcagcctacttacagaagcgaagccaactgcagctgggataaagtgataatagataggactgacaaggaggcgtggccttccatcacaggaacagagactgaatctgcctcagaatgtactacagacactgactctgcctccaactgtggctcagagaacagtagcatggctacagggagtgcccagggcaacttcactggacataccaagaagacaaatggcaataatggcaccaatggcgcactcgtccaaagcccttctaatcagagtgcccttggagcagggggagcgaacagtaatggaagtgcggccagagtgtggggtgtagccacaggctccagctctggcctggctcactgctctgtcagtggtggggatggaaaaatggacactatgattggagatgggagaagtcagaattgctggggtgcttccaactccaatgctggcattaatcttaaccttaatcctaatgccaacccagctgcctggcctgtacttggacatgaaggaaccgtggcgacaggcaacccttccagtatttgcagtccagtcagtgccataggtcaaaatatgggcaaccagaacgggaacccaacaggcactttaggtgcttggggaaacttgctgccacaagagagcacagaaccacaaacgtccacttctcagaatgtgtctttcagcgcacaacctcagaaccttaacactgatggaccaaataacactaaccccatgaactcttcacccaaccctatcaatgcaatgcagacaaatggactgccaaactggggcatggctgttggtatgggggccatcatcccgccccacctgcaaggccttcctggtgctaatggatcatcagtttctcaagtcagtgggggcagtgctgaaggaataagcaattctgtgtggggactgtccccaggtaaccctgccacaggaaatagcaattctgggttcagtcaggggaatggagacactgtgaactcagcattaagtgctaaacaaaatggatccagcagtgctgtgcaaaaggaaggaagtggaggaaatgcttgggattcaggacctcctgctggtcctggaatactcgcctggggaaggggcagtggcaacaatggcgttggtaatatccattcaggagcttggggccaccccagccgaagcacctctaacggtgtgaatggggaatggggaaagcccccaaaccagcattccaacagtgacatcaatgggaaaggatcaacagggtgggagagtcctagtgtcaccagccagaaccctaccgtacagcctggtggtgaacacatgaactcctgggccaaagcggcatcttctggaactacagcaagtgaaggaagtagtgatggttctggcaaccacaatgaaggaagcactgggagggaaggaacgggagaaggccgaaggcgagataaagggattatagaccaagggcacatccagttgccaaggaatgatcttgacccaagagttctgtctaatactggttggggacagactcctgtaaagcaaaacactgcctgggaatttgaagaatcccctaggtctgaaaggaaaaatgacaatgggacagaggcctggggttgtgcagctactcaggcttcaaactcaggggggaagaacgatgggtccatcatgaacagtacaaatacctcttcagtatctgggtgggtcaacgcgccacctgccgctgtgccagcaaacacaggttggggagacagcaacaacaaagcgccaagtggcccgggggtttggggggactcgataagctctactgctgttagtactgctgctgctgccaagagtggccatgcttggagtggggccgcaaatcaggaggacaagtcacccacctggggtgagcctccaaagcccaaatcccaacactggggagatggacaaagatcaaatccagcctggagtgcaggagggggagattgggcagattcatcgtctgtccttggacacttgggggatgggaaaaaaaatggatctggatgggatgctgacagtaataggtcagggtctggttggaatgacaccacgagatctgggaacagtggctggggcaacagcacaaatacaaaggccaatccaggtacaaactggggggagactttaaaacctggcccccaacagaactgggctagcaaaccccaagacaacaatgtgagtaactggggaggagctgcttctgtgaaacagacaggaacagggtggatcggggggccggtaccggtcaaacagaaggacagcagtgaagcaactggctgggaagaaccctctccaccgtccattcgccgcaaaatggaaattgatgatggtacctcagcttggggggacccaagcaactataacaataaaactgtaaacatgtgggatagaaacaacccggtcatccagagcagtaccacgaccaataccaccaccaccaccaccactaccacgagcaacaccacacacagggtcgagacgccgcccccgcaccaggccggtactcagctgaatcgatcaccgttgcttggtccagtttcatcaggctggggagaaatgcctaatgttcactcaaagactgaaaactcttggggagaaccatcctccccttctaccctggtggataatggcacagcagcatgggggaagccacccagcagtggcagcgggtggggagatcaccctgcagagccgccggtggcatttggaagagctggcgcacctgttgctgcctcagccctgtgcaaaccagcttcaaaatctatgcaagaaggctggggcagtggtggggatgaaatgaacctcagtaccagccagtgggaggatgaagaaggggacgtgtggaataatgctgcttcccaagaaagcacctcctcctgcagctcctgggggaacgcccccaaaaaaggacttcaaaagggcatgaagacgtctggcaagcaggatgaggcctggatcatgagccggctgatcaaacaactcacagacatgggcttcccgagagagccagctgaggaggccttgaagagtaacaatatgaatcttgatcaggccatgagcgctctgctggaaaagaaggtggacgtggacaagcgtgggctgggagtgaccgaccataatggaatggccgccaagcccctcggctgccgcccgccaatctccaaagagtcttccgtggaccgccccacctttcttgacaaggatggcggcctcgtggaagagcccacgccttcaccgttcttgccttccccaagcctgaagctccccctttcacacagtgcactccccagtcaggccctgggtgggattgcctccgggctgggcatgcaaaacttgaattcttctagacagataccgagtggcaatctgggtatgtttggcaatagtggagcagcacaagccaggaccatgcagcagccgccacagccaccagtgcagcctcttaactcttcccagcccagtctccgtgctcaagtgcctcagtttctatcccctcaggttcaagcacagcttttgcagtttgcagcaaaaaacattggtctcaaccctgcactattaacctcgccaattaatcctcaacatatgacgatgttgaaccagctctatcagctgcagctggcataccaacgtttacaaatccagcagcagatgttacaggcccagcgtaatgtgtccggatccatgagacaacaggagcagcaagttgcgcgcacaatcactaatctgcagcagcagatccagcagcaccagcgccagctggcccaggccctgctcgtgaagcagccaccaccgccaccgcccccgccgcacctgtctctgcacccctctgcaggcaaatcggccatggacagcttcccctcgcacccacagactcccggcctacctgacctgcagaccaaagagcagcagtcttcacccaacacctttgctccttaccctctcgctggactgaacccaaacatgaatgtcaacagcatggacatgaccggtggcttgtcggtgaaggacccatcccagtcccagtcacgcctcccccagtggacgcaccccaactccatggataacttgcccagtgccgcttcccccctggagcagaaccctagcaagcatggtgctatccctggaggtctaagcattgggcctccaggtaagtcctccattgatgactcctatggccggtacgatttaatccagaacagtgagtcaccagccagtcctcccgtagctgttccccatagctggtcacgtgccaaatctgacagtgataaaatctcaaatggctctagcatcaactggcccccagaattccatccgggagttccatggaaaggactgcagaatattgaccctgagaatgaccctgacgtcactcctggcagtgtccccactgggcctaccatcaacaccaccatccaggatgtcaaccgctacctcctcaagagtggagggtcctccccgccatcatctcagaatgccacgctgccttcttcgagtgcctggccactcagtgcctccggctacagtagctctttcagcagcattgcatccgcacctagtgttgcaggtaaactgtcagacatcaaatcgacgtggtcctctggccctacctcccacacgcaagcctctctgtctcatgaactatggaaggtgcccagaaacagtactgcacccacgaggccacctccagggttaaccaatcccaagccctcctccacctggggtgccagccccctcggctggaccagctcctactcctcgggttctgcctggagcaccgacacctcaggaagaaccagcagctggctcgttcttcgaaacctcactccccagattgatggttctacactgcggacattgtgtttgcaacatgggcctcttatcacattccacctgaatctgactcaaggcaatgctgtggtccggtacagctccaaggaggaggctgccaaggcccagaagtctctgcacatgtgcgtcctgggaaacactaccatcctggccgagttcgctggtgaagaagaagtgaatcgcttcttagcccaaggccaggcgctgccacccacttccagctggcagtccagcagcgcgtccagccagccgcggctcagcgcagcgggcagctcccatggcctggtacgcagcgacgctggccactggaacgccccgtgcctgggtggcaaggggagcagtgagctgctgtggggcggggtgccccagtactccagcagcctgtggggcccgcccagcgccgacgacagcagggtgataggcagccccacgccgctaaccaccctgctgcctggggacctgctcagcggggagtccctgtaggctctgccatcatcagcaccaggagagccgacccctcccgggacccctcccggctgggcggccccacagacccgctggaacccagcagcggccgcccttttgagtacctctgtccaggactgaagacgaaccttggccgcagtccttgcgaactgttcgcaaaacagtgcgggctgcggtgggtcagcgtcacatgctaatgacaggatgttcctcgtagctttttattttgtgcgtcttatgtttgtatagtgtgttgtcattttgattttttttttttttttaagtataaaagctgcttagaatagttctatcatgaagggcacttttcagattgtgggctggaaagggttattttatctgtgggggagggagggagacgtgaagcctatttaaaatgagcctgtgacgattatgcacatgaccagaggcggccggtaatcagggcagagtctggtgtggaccgccgggcgcagagcggctccgcggcgggagctgagcggaaggcgcgggctgcgatctgctctctgttcccctggatccgcctatgcacattacccttgtttcattactttttcatgtcatttttttatcccaaaaaatattttttaaaagttaaaaaaagacatatcaaacatgcaaatacttgaatccagcaggccaatagtgaaatgtgaacactttctaattctacacttccaggttgacatcagtacacagaaacaggctctaggaaaaatttctaagttcatagcctacgtgtgtgtatgtgtgcgtgttgaaacagaagtgtgtgtgtgtgtgcatgtgtggcgcgtgctcctgcacggcgtgcagttttctgtgtttgtgtgtttgaaagcgtgtgaggatttaactgtgggttttcccttgtattcagtatacgctttttttttggcgcattggtcaaacggttgttattattagcttctaactttgcactgagtgtcctcgcccttcctttagctaatcctatacattacagagaattcctaggacagggctggcgacaattcatgtgtaaatgtttactcaaggactctgtgactgcgtttaaaaagtacagtgtatatctctggagaaataacatgtatacctacctttagcagctttttattgtggactaatgcaagaaaattattaccagagtattgcaccatttttccatttggaatataaagttaaagagaaaaaaaaaaaaaactgttgttgaactgtggccatagatacttgtaaagaatggatggttccgtggaaggaacagaaacaagcacttgggcgtgggttgtgactgcttttgggggagcctggggtttgggctcccacctgtttacagacctttttttctccttcagactttaaaattttaaaaatttaaaaaggaattaaaaaaaaaaaaagacttccgtcgtaaagaaacctattttcagaatgcagatgcgttccttcagagctctgggacgggacagtgttgttccctcggccatcgtcgtggactctgtcgattgctttcgccccttcgtcaaggtgacaggcgttgtggccactgtcttgcacatgccggacgcgctctcaggaaagccagggctcccgagggcagctccacaccatttcatgtatttttaaacccaactcctagcactgaagatgttatttaaaaaaaaaaaaaacaaaacaaaacaaaaaaatgaaaaaaaagaaaaagaggaaaaaaaaacacaaagaagaaaaatacctaatctctaatgtgtagcagttacatatttaccaaataatggactcaaaagaaatagatgtttgaagagtgctttatatattaaaaattgctttatgttttaaaaatgatcaatgttttgattgttttgcaaggaagaaagacaatggaataacataccttcaagtatgttttaaaaaatatatatatgaacattgtgctccctgcctgcttgatcaggaaacttgtgcattacatttttttaattagctttttaatggttttatcaaaacaaaaaaaatacaaaaaaaaaaaaaaaagtcctgcaagactgcagatccacaaaagctggttttatagaggatcatgaactatgcacaaactgggttcaagactttttttctcaagtttagtaggatatttagaaaaaccaaccttcctcagagtgactgcatctcattgccattacatgcgttctatatattcgatggacatacacctgcgtatgtatatccaatatgtgtgcgtgtgagcatgcgtgtgcgtatgtgcgtccgacataccacttcccgtgctgccggcgagcattgagttgtagaaaaactgttgttttaaaattggggatggaagtcaagaatatgtttgtttgtttttgggttttgttgggtttgaggggttttttgtttgtttgttttttgttttttttaccttttattttgaacttaatatgtctgtaactctgagattaaacaacaagttcgtggctcttaatgttttcctcatagaatgtgactgttgaagaacatgcatcgaaagttgctttcgaaagtacaacgctttattgaatcttaataaattgcaatttttttcttggctgttcaaagtaatgtgtttttcatttttcaaaagacactatggatgtctactttgcacgctgcgattgggagagctgtcccgctgcatgcgttccctctgtaatttcctcagagctcacatacgtacctctctcacgagtgaactcagattttccattgttttgctttattctatcatttgctttgtggttttgctgtaaatattgaaatcttaatcatcatcgagaggcacagccaagctttccagctctccacccccgtggcccatccaagtctgttcatctggtaacttctgttgtctgggacggcagcaagaagatgccggggcttgcctggagtcctggcagaggagtgccactcacttttgcctagggtccagttggggcttaaaaaatatttggagagaagagtaatgaggattttttgtgtttcctagacattttatgcatctatttttgtaaaatcaccttcgctaactttcaccaagcactttgagcacagtggaacttcagaagcacaaccagcctaaccccagaatctcaggtggcacagctagaaattgagtcccttcctaggacactggccgtggccttcagggtgaccagtcagtgccaccgggttggcattggtgttacagacaggcctctgaagacaaaccgagcaccccagcggcccctcaaactaagcaaggatcttttttctgtctgcgctccctggggcaaggtcaaaggtggacccgcccactgtgggtcaattccttcgaaaagatgggacccgcacccccgccacaggctggcccccccccacccatggggaaggtggtgtgctgctggctctgaccatactcttttggaaattgagaaggaaagcattgagtgggacctaatccggagaagaaattaaagaccagaaaaagaaggaagctgggaatgaaactcaaaatgcacttgaacctggaagcggcaaccctcagctctgcgcggccgagcctcagcaagagttcgttttgtgcctgagttactactacaggggcaaactgtacccgtgcctgtgcgctgggagaacaaggtcagcgcccaagggtgtgcaaaggatgtggcaggcttcatggaggaggtggcatttgccctgggcctgggagaccaggttggattttgacagactgggaactcgggggacaggagggcagcacagtgtaagctaaagccctgtgtagggaccccacgcaaagacctcgtgggcctgggtgtccagggcaccatttccacccatgggtgaaaaagaggcttgaggaagacaacaggttcttcacctgcatctgtggatatatatttttttaagtttattaaatttttttttaaatggcagtttcagacctgc

SEQ ID NO: 32512 - DNA, 6003 bp, Homo sapiens
  source 1..6003: mol_type = unassigned DNA
agggagaaagagcaagaaacacaagaagaggaacgtttgatggaagaaaagaaaaagaaaaagcaggaagaaaagaaaaagaaggaaggtgctcagaaaaaggctgctgatcaaaaaaccaaagattggtttctgatactaaattggcctctagagttgggcagaaagactcatcgctacagtgccagaacctactaagacctgttcaagccagccccaacctgccggtaccagtaccagtacttccaccagcactatctcaagcagcaacaatggcaaacgtgcatctgccagtggccagcagccagctgcatcccgttacctgcctcgtgaggtgcctccacgcttccgccagcaagaacagaagcagctattaaagagaggccagccattgcctacggggactctaaccagtgtgagcccaacccagggtgctgggcctgcaggggtaagcccacctcccctacctggagccggaacacagcatcatcccagtaagctccaaccagatctcagtcatagtggattggcagatcattatgaaaattcccactggggacagcagcctacttacagaagcgaagccaactgcagctgggataaagtgataatagataggactgacaaggaggcgtggccttccatcacaggaacagagactgaatctgcctcagaatgtactacagacactgactctgcctccaactgtggctcagagaacagtagcatggctacagggagtgcccagggcaacttcactggacataccaagaagacaaatggcaataatggcaccaatggcgcactcgtccaaagcccttctaatcagagtgcccttggagcagggggagcgaacagtaatggaagtgcggccagagtgtggggtgtagccacaggctccagctctggcctggctcactgctctgtcagtggtggggatggaaaaatggacactatgattggagatgggagaagtcagaattgctggggtgcttccaactccaatgctggcattaatcttaaccttaatcctaatgccaacccagctgcctggcctgtacttggacatgaaggaaccgtggcgacaggcaacccttccagtatttgcagtccagtcagtgccataggtcaaaatatgggcaaccagaacgggaacccaacaggcactttaggtgcttggggaaacttgctgccacaagagagcacagaaccacaaacgtccacttctcagaatgtgtctttcagcgcacaacctcagaaccttaacactgatggaccaaataacactaaccccatgaactcttcacccaaccctatcaatgcaatgcagacaaatggactgccaaactggggcatggctgttggtatgggggccatcatcccgccccacctgcaaggccttcctggtgctaatggatcatcagtttctcaagtcagtgggggcagtgctgaaggaataagcaattctgtgtggggactgtccccaggtaaccctgccacaggaaatagcaattctgggttcagtcaggggaatggagacactgtgaactcagcattaagtgctaaacaaaatggatccagcagtgctgtgcaaaaggaaggaagtggaggaaatgcttgggattcaggacctcctgctggtcctggaatactcgcctggggaaggggcagtggcaacaatggcgttggtaatatccattcaggagcttggggccaccccagccgaagcacctctaacggtgtgaatggggaatggggaaagcccccaaaccagcattccaacagtgacatcaatgggaaaggatcaacagggtgggagagtcctagtgtcaccagccagaaccctaccgtacagcctggtggtgaacacatgaactcctgggccaaagcggcatcttctggaactacagcaagtgaaggaagtagtgatggttctggcaaccacaatgaaggaagcactgggagggaaggaacgggagaaggccgaaggcgagataaagggattatagaccaagggcacatccagttgccaaggaatgatcttgacccaagagttctgtctaatactggttggggacagactcctgtaaagcaaaacactgcctgggaatttgaagaatcccctaggtctgaaaggaaaaatgacaatgggacagaggcctggggttgtgcagctactcaggcttcaaactcaggggggaagaacgatgggtccatcatgaacagtacaaatacctcttcagtatctgggtgggtcaacgcgccacctgccgctgtgccagcaaacacaggttggggagacagcaacaacaaagcgccaagtggcccgggggtttggggggactcgataagctctactgctgttagtactgctgctgctgccaagagtggccatgcttggagtggggccgcaaatcaggaggacaagtcacccacctggggtgagcctccaaagcccaaatcccaacactggggagatggacaaagatcaaatccagcctggagtgcaggagggggagattgggcagattcatcgtctgtccttggacacttgggggatgggaaaaaaaatggatctggatgggatgctgacagtaataggtcagggtctggttggaatgacaccacgagatctgggaacagtggctggggcaacagcacaaatacaaaggccaatccaggtacaaactggggggagactttaaaacctggcccccaacagaactgggctagcaaaccccaagacaacaatgtgagtaactggggaggagctgcttctgtgaaacagacaggaacagggtggatcggggggccggtaccggtcaaacagaaggacagcagtgaagcaactggctgggaagaaccctctccaccgtccattcgccgcaaaatggaaattgatgatggtacctcagcttggggggacccaagcaactataacaataaaactgtaaacatgtgggatagaaacaacccggtcatccagagcagtaccacgaccaataccaccaccaccaccaccactaccacgagcaacaccacacacagggtcgagacgccgcccccgcaccaggccggtactcagctgaatcgatcaccgttgcttggtccagtttcatcaggctggggagaaatgcctaatgttcactcaaagactgaaaactcttggggagaaccatcctccccttctaccctggtggataatggcacagcagcatgggggaagccacccagcagtggcagcgggtggggagatcaccctgcagagccgccggtggcatttggaagagctggcgcacctgttgctgcctcagccctgtgcaaaccagcttcaaaatctatgcaagaaggctggggcagtggtggggatgaaatgaacctcagtaccagccagtgggaggatgaagaaggggacgtgtggaataatgctgcttcccaagaaagcacctcctcctgcagctcctgggggaacgcccccaaaaaaggacttcaaaagggcatgaagacgtctggcaagcaggatgaggcctggatcatgagccggctgatcaaacaactcacagacatgggcttcccgagagagccagctgaggaggccttgaagagtaacaatatgaatcttgatcaggccatgagcgctctgctggaaaagaaggtggacgtggacaagcgtgggctgggagtgaccgaccataatggaatggccgccaagcccctcggctgccgcccgccaatctccaaagagtcttccgtggaccgccccacctttcttgacaaggatggcggcctcgtggaagagcccacgccttcaccgttcttgccttccccaagcctgaagctccccctttcacacagtgcactccccagtcaggccctgggtgggattgcctccgggctgggcatgcaaaacttgaattcttctagacagataccgagtggcaatctgggtatgtttggcaatagtggagcagcacaagccaggaccatgcagcagccgccacagccaccagtgcagcctcttaactcttcccagcccagtctccgtgctcaagtgcctcagtttctatcccctcaggttcaagcacagcttttgcagtttgcagcaaaaaacattggtctcaaccctgcactattaacctcgccaattaatcctcaacatatgacgatgttgaaccagctctatcagctgcagctggcataccaacgtttacaaatccagcagcagatgttacaggcccagcgtaatgtgtccggatccatgagacaacaggagcagcaagttgcgcgcacaatcactaatctgcagcagcagatccagcagcaccagcgccagctggcccaggccctgctcgtgaagcagccaccaccgccaccgcccccgccgcacctgtctctgcacccctctgcaggcaaatcggccatggacagcttcccctcgcacccacagactcccggcctacctgacctgcagaccaaagagcagcagtcttcacccaacacctttgctccttaccctctcgctggactgaacccaaacatgaatgtcaacagcatggacatgaccggtggcttgtcggtgaaggacccatcccagtcccagtcacgcctcccccagtggacgcaccccaactccatggataacttgcccagtgccgcttcccccctggagcagaaccctagcaagcatggtgctatccctggaggtctaagcattgggcctccaggtaagtcctccattgatgactcctatggccggtacgatttaatccagaacagtgagtcaccagccagtcctcccgtagctgttccccatagctggtcacgtgccaaatctgacagtgataaaatctcaaatggctctagcatcaactggcccccagaattccatccgggagttccatggaaaggactgcagaatattgaccctgagaatgaccctgacgtcactcctggcagtgtccccactgggcctaccatcaacaccaccatccaggatgtcaaccgctacctcctcaagagtggagggtcctccccgccatcatctcagaatgccacgctgccttcttcgagtgcctggccactcagtgcctccggctacagtagctctttcagcagcattgcatccgcacctagtgttgcaggtaaactgtcagacatcaaatcgacgtggtcctctggccctacctcccacacgcaagcctctctgtctcatgaactatggaaggtgcccagaaacagtactgcacccacgaggccacctccagggttaaccaatcccaagccctcctccacctggggtgccagccccctcggctggaccagctcctactcctcgggttctgcctggagcaccgacacctcaggaagaaccagcagctggctcgttcttcgaaacctcactccccagattgatggttctacactgcggacattgtgtttgcaacatgggcctcttatcacattccacctgaatctgactcaaggcaatgctgtggtccggtacagctccaaggaggaggctgccaaggcccagaagtctctgcacatgtgcgtcctgggaaacactaccatcctggccgagttcgctggtgaagaagaagtgaatcgcttcttagcccaaggccaggcgctgccacccacttccagctggcagtccagcagcgcgtccagccagccgcggctcagcgcagcgggcagctcccatggcctggtacgcagcgacgctggccactggaacgccccgtgcctgggtggcaaggggagcagtgagctgctgtggggcggggtgccccagtactccagcagcctgtggggcccgcccagcgccgacgacagcagggtgataggcagccccacgccgctaaccaccctgctgcctggggacctgctcagcggggagtccctgtaggctctgccatcatcagcaccaggagagccgacccctcccgggacccctcccggctgggcggccccacagacccgctggaacccagcagcggccgc

SEQ ID NO: 32513 - DNA, 5895 bp, Homo sapiens
  source 1..5895: mol_type = unassigned DNA
agggagaaagagcaagaaacacaagaagaggaacgtttgatggaagaaaagaaaaagaaaaagcaggaagaaaagaaaaagaaggaaggtgctcagaaaaaggctgctgatcaaaaaaccaaagattggtttctgatactaaattggcctctagagttgggcagaaagactcatcgctacagtgccagaacctactaagacctgttcaagccagccccaacctgccggtaccagtaccagtacttccaccagcactatctcaagcagcaacaatggcaaacgtgcatctgccagtggccagcagccagctgcatcccgttacctgcctcgtgaggtgcctccacgcttccgccagcaagaacagaagcagctattaaagagaggccagccattgcctacggggactctaaccagtgtgagcccaacccagggtgctgggcctgcaggggtaagcccacctcccctacctggagccggaacacagcatcatcccagtaagctccaaccagatctcagtcatagtggattggcagatcattatgaaaattcccactggggacagcagcctacttacagaagcgaagccaactgcagctgggataaagtgataatagataggactgacaaggaggcgtggccttccatcacaggaacagagactgaatctgcctcagaatgtactacagacactgactctgcctccaactgtggctcagagaacagtagcatggctacagggagtgcccagggcaacttcactggacataccaagaagacaaatggcaataatggcaccaatggcgcactcgtccaaagcccttctaatcagagtgcccttggagcagggggagcgaacagtaatggaagtgcggccagagtgtggggtgtagccacaggctccagctctggcctggctcactgctctgtcagtggtggggatggaaaaatggacactatgattggagatgggagaagtcagaattgctggggtgcttccaactccaatgctggcattaatcttaaccttaatcctaatgccaacccagctgcctggcctgtacttggacatgaaggaaccgtggcgacaggcaacccttccagtatttgcagtccagtcagtgccataggtcaaaatatgggcaaccagaacgggaacccaacaggcactttaggtgcttggggaaacttgctgccacaagagagcacagaaccacaaacgtccacttctcagaatgtgtctttcagcgcacaacctcagaaccttaacactgatggaccaaataacactaaccccatgaactcttcacccaaccctatcaatgcaatgcagacaaatggactgccaaactggggcatggctgttggtatgggggccatcatcccgccccacctgcaaggccttcctggtgctaatggatcatcagtttctcaagtcagtgggggcagtgctgaaggaataagcaattctgtgtggggactgtccccaggtaaccctgccacaggaaatagcaattctgggttcagtcaggggaatggagacactgtgaactcagcattaagtgctaaacaaaatggatccagcagtgctgtgcaaaaggaaggaagtggaggaaatgcttgggattcaggacctcctgctggtcctggaatactcgcctggggaaggggcagtggcaacaatggcgttggtaatatccattcaggagcttggggccaccccagccgaagcacctctaacggtgtgaatggggaatggggaaagcccccaaaccagcattccaacagtgacatcaatgggaaaggatcaacagggtgggagagtcctagtgtcaccagccagaaccctaccgtacagcctggtggtgaacacatgaactcctgggccaaagcggcatcttctggaactacagcaagtgaaggaagtagtgatggttctggcaaccacaatgaaggaagcactgggagggaaggaacgggagaaggccgaaggcgagataaagggattatagaccaagggcacatccagttgccaaggaatgatcttgacccaagagttctgtctaatactggttggggacagactcctgtaaagcaaaacactgcctgggaatttgaagaatcccctaggtctgaaaggaaaaatgacaatgggacagaggcctggggttgtgcagctactcaggcttcaaactcaggggggaagaacgatgggtccatcatgaacagtacaaatacctcttcagtatctgggtgggtcaacgcgccacctgccgctgtgccagcaaacacaggttggggagacagcaacaacaaagcgccaagtggcccgggggtttggggggactcgataagctctactgctgttagtactgctgctgctgccaagagtggccatgcttggagtggggccgcaaatcaggaggacaagtcacccacctggggtgagcctccaaagcccaaatcccaacactggggagatggacaaagatcaaatccagcctggagtgcaggagggggagattgggcagattcatcgtctgtccttggacacttgggggatgggaaaaaaaatggatctggatgggatgctgacagtaataggtcagggtctggttggaatgacaccacgagatctgggaacagtggctggggcaacagcacaaatacaaaggccaatccaggtacaaactggggggagactttaaaacctggcccccaacagaactgggctagcaaaccccaagacaacaatgtgagtaactggggaggagctgcttctgtgaaacagacaggaacagggtggatcggggggccggtaccggtcaaacagaaggacagcagtgaagcaactggctgggaagaaccctctccaccgtccattcgccgcaaaatggaaattgatgatggtacctcagcttggggggacccaagcaactataacaataaaactgtaaacatgtgggatagaaacaacccggtcatccagagcagtaccacgaccaataccaccaccaccaccaccactaccacgagcaacaccacacacagggtcgagacgccgcccccgcaccaggccggtactcagctgaatcgatcaccgttgcttggtccaggtaggaaagtttcatcaggctggggagaaatgcctaatgttcactcaaagactgaaaactcttggggagaaccatcctccccttctaccctggtggataatggcacagcagcatgggggaagccacccagcagtggcagcgggtggggagatcaccctgcagagccgccggtggcatttggaagagctggcgcacctgttgctgcctcagccctgtgcaaaccagcttcaaaatctatgcaagaaggctggggcagtggtggggatgaaatgaacctcagtaccagccagtgggaggatgaagaaggggacgtgtggaataatgctgcttcccaagaaagcacctcctcctgcagctcctgggggaacgcccccaaaaaaggacttcaaaagggcatgaagacgtctggcaagcaggatgaggcctggatcatgagccggctgatcaaacaactcacagacatgggcttcccgagagagccagctgaggaggccttgaagagtaacaatatgaatcttgatcaggccatgagcgctctgctggaaaagaaggtggacgtggacaagcgtgggctgggagtgaccgaccataatggaatggccgccaagcccctcggctgccgcccgccaatctccaaagagtcttccgtggaccgccccacctttcttgacaaggatggcggcctcgtggaagagcccacgccttcaccgttcttgccttccccaagcctgaagctccccctttcacacagtgcactccccagtcaggccctgggtgggattgcctccgggctgggcatgcaaaacttgaattcttctagacagataccgagtggcaatctgggtatgtttggcaatagtggagcagcacaagccaggaccatgcagcagccgccacagccaccagtgcagcctcttaactcttcccagcccagtctccgtgctcaagtgcctcagtttctatcccctcaggttcaagcacagcttttgcagtttgcagcaaaaaacattggtctcaaccctgcactattaacctcgccaattaatcctcaacatatgacgatgttgaaccagctctatcagctgcagctggcataccaacgtttacaaatccagcagcagatgttacaggcccagcgtaatgtgtccggatccatgagacaacaggagcagcaagttgcgcgcacaatcactaatctgcagcagcagatccagcagcaccagcgccagctggcccaggccctgctcgtgaagcagccaccaccgccaccgcccccgccgcacctgtctctgcacccctctgcaggcaaatcggccatggacagcttcccctcgcacccacagactcccggcctacctgacctgcagaccaaagagcagcagtcttcacccaacacctttgctccttaccctctcgctggactgaacccaaacatgaatgtcaacagcatggacatgaccggtggcttgtcggtgaaggacccatcccagtcccagtcacgcctcccccagtggacgcaccccaactccatggataacttgcccagtgccgcttcccccctggagcagaaccctagcaagcatggtgctatccctggaggtctaagcattgggcctccaggtaagtcctccattgatgactcctatggccggtacgatttaatccagaacagtgagtcaccagccagtcctcccgtagctgttccccatagctggtcacgtgccaaatctgacagtgataaaatctcaaatggctctagcatcaactggcccccagaattccatccgggagttccatggaaaggactgcagaatattgaccctgagaatgaccctgacgtcactcctggcagtgtccccactgggcctaccatcaacaccaccatccaggatgtcaaccgctacctcctcaagagtggaggtaaactgtcagacatcaaatcgacgtggtcctctggccctacctcccacacgcaagcctctctgtctcatgaactatggaaggtgcccagaaacagtactgcacccacgaggccacctccagggttaaccaatcccaagccctcctccacctggggtgccagccccctcggctggaccagctcctactcctcgggttctgcctggagcaccgacacctcaggaagaaccagcagctggctcgttcttcgaaacctcactccccagattgatggttctacactgcggacattgtgtttgcaacatgggcctcttatcacattccacctgaatctgactcaaggcaatgctgtggtccggtacagctccaaggaggaggctgccaaggcccagaagtctctgcacatgtgcgtcctgggaaacactaccatcctggccgagttcgctggtgaagaagaagtgaatcgcttcttagcccaaggccaggcgctgccacccacttccagctggcagtccagcagcgcgtccagccagccgcggctcagcgcagcgggcagctcccatggcctggtacgcagcgacgctggccactggaacgccccgtgcctgggtggcaaggggagcagtgagctgctgtggggcggggtgccccagtactccagcagcctgtggggcccgcccagcgccgacgacagcagggtgataggcagccccacgccgctaaccaccctgctgcctggggacctgctcagcggggagtccctgtaggctctgccatcatcagcaccaggagagccgacccctcccgggacccctcccggctgggcggccccacagacccgctggaacccagcagcggccgc

SEQ ID NO: 32514 - DNA, 5318 bp, Homo sapiens
  source 1..5318: mol_type = unassigned DNA
agcgaagccaactgcagctgggataaagtgataatagataggactgacaaggaggcgtggccttccatcacaggaacagagactgaatctgcctcagaatgtactacagacactgactctgcctccaactgtggctcagagaacagtagcatggctacagggagtgcccagggcaacttcactggacataccaagaagacaaatggcaataatggcaccaatggcgcactcgtccaaagcccttctaatcagagtgcccttggagcagggggagcgaacagtaatggaagtgcggccagagtgtggggtgtagccacaggctccagctctggcctggctcactgctctgtcagtggtggggatggaaaaatggacactatgattggagatgggagaagtcagaattgctggggtgcttccaactccaatgctggcattaatcttaaccttaatcctaatgccaacccagctgcctggcctgtacttggacatgaaggaaccgtggcgacaggcaacccttccagtatttgcagtccagtcagtgccataggtcaaaatatgggcaaccagaacgggaacccaacaggcactttaggtgcttggggaaacttgctgccacaagagagcacagaaccacaaacgtccacttctcagaatgtgtctttcagcgcacaacctcagaaccttaacactgatggaccaaataacactaaccccatgaactcttcacccaaccctatcaatgcaatgcagacaaatggactgccaaactggggcatggctgttggtatgggggccatcatcccgccccacctgcaaggccttcctggtgctaatggatcatcagtttctcaagtcagtgggggcagtgctgaaggaataagcaattctgtgtggggactgtccccaggtaaccctgccacaggaaatagcaattctgggttcagtcaggggaatggagacactgtgaactcagcattaagtgctaaacaaaatggatccagcagtgctgtgcaaaaggaaggaagtggaggaaatgcttgggattcaggacctcctgctggtcctggaatactcgcctggggaaggggcagtggcaacaatggcgttggtaatatccattcaggagcttggggccaccccagccgaagcacctctaacggtgtgaatggggaatggggaaagcccccaaaccagcattccaacagtgacatcaatgggaaaggatcaacagggtgggagagtcctagtgtcaccagccagaaccctaccgtacagcctggtggtgaacacatgaactcctgggccaaagcggcatcttctggaactacagcaagtgaaggaagtagtgatggttctggcaaccacaatgaaggaagcactgggagggaaggaacgggagaaggccgaaggcgagataaagggattatagaccaagggcacatccagttgccaaggaatgatcttgacccaagagttctgtctaatactggttggggacagactcctgtaaagcaaaacactgcctgggaatttgaagaatcccctaggtctgaaaggaaaaatgacaatgggacagaggcctggggttgtgcagctactcaggcttcaaactcaggggggaagaacgatgggtccatcatgaacagtacaaatacctcttcagtatctgggtgggtcaacgcgccacctgccgctgtgccagcaaacacaggttggggagacagcaacaacaaagcgccaagtggcccgggggtttggggggactcgataagctctactgctgttagtactgctgctgctgccaagagtggccatgcttggagtggggccgcaaatcaggaggacaagtcacccacctggggtgagcctccaaagcccaaatcccaacactggggagatggacaaagatcaaatccagcctggagtgcaggagggggagattgggcagattcatcgtctgtccttggacacttgggggatgggaaaaaaaatggatctggatgggatgctgacagtaataggtcagggtctggttggaatgacaccacgagatctgggaacagtggctggggcaacagcacaaatacaaaggccaatccaggtacaaactggggggagactttaaaacctggcccccaacagaactgggctagcaaaccccaagacaacaatgtgagtaactggggaggagctgcttctgtgaaacagacaggaacagggtggatcggggggccggtaccggtcaaacagaaggacagcagtgaagcaactggctgggaagaaccctctccaccgtccattcgccgcaaaatggaaattgatgatggtacctcagcttggggggacccaagcaactataacaataaaactgtaaacatgtgggatagaaacaacccggtcatccagagcagtaccacgaccaataccaccaccaccaccaccactaccacgagcaacaccacacacagggtcgagacgccgcccccgcaccaggccggtactcagctgaatcgatcaccgttgcttggtccaggtaggaaagtttcatcaggctggggagaaatgcctaatgttcactcaaagactgaaaactcttggggagaaccatcctccccttctaccctggtggataatggcacagcagcatgggggaagccacccagcagtggcagcgggtggggagatcaccctgcagagccgccggtggcatttggaagagctggcgcacctgttgctgcctcagccctgtgcaaaccagcttcaaaatctatgcaagaaggctggggcagtggtggggatgaaatgaacctcagtaccagccagtgggaggatgaagaaggggacgtgtggaataatgctgcttcccaagaaagcacctcctcctgcagctcctgggggaacgcccccaaaaaaggacttcaaaagggcatgaagacgtctggcaagcaggatgaggcctggatcatgagccggctgatcaaacaactcacagacatgggcttcccgagagagccagctgaggaggccttgaagagtaacaatatgaatcttgatcaggccatgagcgctctgctggaaaagaaggtggacgtggacaagcgtgggctgggagtgaccgaccataatggaatggccgccaagcccctcggctgccgcccgccaatctccaaagagtcttccgtggaccgccccacctttcttgacaaggatggcggcctcgtggaagagcccacgccttcaccgttcttgccttccccaagcctgaagctccccctttcacacagtgcactccccagtcaggccctgggtgggattgcctccgggctgggcatgcaaaacttgaattcttctagacagataccgagtggcaatctgggtatgtttggcaatagtggagcagcacaagccaggaccatgcagcagccgccacagccaccagtgcagcctcttaactcttcccagcccagtctccgtgctcaagtgcctcagtttctatcccctcaggttcaagcacagcttttgcagtttgcagcaaaaaacattggtctcaaccctgcactattaacctcgccaattaatcctcaacatatgacgatgttgaaccagctctatcagctgcagctggcataccaacgtttacaaatccagcagcagatgttacaggcccagcgtaatgtgtccggatccatgagacaacaggagcagcaagttgcgcgcacaatcactaatctgcagcagcagatccagcagcaccagcgccagctggcccaggccctgctcgtgaagcagccaccaccgccaccgcccccgccgcacctgtctctgcacccctctgcaggcaaatcggccatggacagcttcccctcgcacccacagactcccggcctacctgacctgcagaccaaagagcagcagtcttcacccaacacctttgctccttaccctctcgctggactgaacccaaacatgaatgtcaacagcatggacatgaccggtggcttgtcggtgaaggacccatcccagtcccagtcacgcctcccccagtggacgcaccccaactccatggataacttgcccagtgccgcttcccccctggagcagaaccctagcaagcatggtgctatccctggaggtctaagcattgggcctccaggtaagtcctccattgatgactcctatggccggtacgatttaatccagaacagtgagtcaccagccagtcctcccgtagctgttccccatagctggtcacgtgccaaatctgacagtgataaaatctcaaatggctctagcatcaactggcccccagaattccatccgggagttccatggaaaggactgcagaatattgaccctgagaatgaccctgacgtcactcctggcagtgtccccactgggcctaccatcaacaccaccatccaggatgtcaaccgctacctcctcaagagtggaggtaaactgtcagacatcaaatcgacgtggtcctctggccctacctcccacacgcaagcctctctgtctcatgaactatggaaggtgcccagaaacagtactgcacccacgaggccacctccagggttaaccaatcccaagccctcctccacctggggtgccagccccctcggctggaccagctcctactcctcgggttctgcctggagcaccgacacctcaggaagaaccagcagctggctcgttcttcgaaacctcactccccagattgatggttctacactgcggacattgtgtttgcaacatgggcctcttatcacattccacctgaatctgactcaaggcaatgctgtggtccggtacagctccaaggaggaggctgccaaggcccagaagtctctgcacatgtgcgtcctgggaaacactaccatcctggccgagttcgctggtgaagaagaagtgaatcgcttcttagcccaaggccaggcgctgccacccacttccagctggcagtccagcagcgcgtccagccagccgcggctcagcgcagcgggcagctcccatggcctggtacgcagcgacgctggccactggaacgccccgtgcctgggtggcaaggggagcagtgagctgctgtggggcggggtgccccagtactccagcagcctgtggggcccgcccagcgccgacgacagcagggtgataggcagccccacgccgctaaccaccctgctgcctggggacctgctcagcggggagtccctgtaggctctgccatcatcagcaccaggagagccgacccctcccgggacccctcccggctgggcggccccacagacccgctggaacccagcagcggccgc

SEQ ID NO: 32515 - DNA, 5276 bp, Homo sapiens
  source 1..5276: mol_type = unassigned DNA
atggctacagggagtgcccagggcaacttcactggacataccaagaagacaaatggcaataatggcaccaatggcgcactcgtccaaagcccttctaatcagagtgcccttggagcagggggagcgaacagtaatggaagtgcggccagagtgtggggtgtagccacaggctccagctctggcctggctcactgctctgtcagtggtggggatggaaaaatggacactatgattggagatgggagaagtcagaattgctggggtgcttccaactccaatgctggcattaatcttaaccttaatcctaatgccaacccagctgcctggcctgtacttggacatgaaggaaccgtggcgacaggcaacccttccagtatttgcagtccagtcagtgccataggtcaaaatatgggcaaccagaacgggaacccaacaggcactttaggtgcttggggaaacttgctgccacaagagagcacagaaccacaaacgtccacttctcagaatgtgtctttcagcgcacaacctcagaaccttaacactgatggaccaaataacactaaccccatgaactcttcacccaaccctatcaatgcaatgcagacaaatggactgccaaactggggcatggctgttggtatgggggccatcatcccgccccacctgcaaggccttcctggtgctaatggatcatcagtttctcaagtcagtgggggcagtgctgaaggaataagcaattctgtgtggggactgtccccaggtaaccctgccacaggaaatagcaattctgggttcagtcaggggaatggagacactgtgaactcagcattaagtgctaaacaaaatggatccagcagtgctgtgcaaaaggaaggaagtggaggaaatgcttgggattcaggacctcctgctggtcctggaatactcgcctggggaaggggcagtggcaacaatggcgttggtaatatccattcaggagcttggggccaccccagccgaagcacctctaacggtgtgaatggggaatggggaaagcccccaaaccagcattccaacagtgacatcaatgggaaaggatcaacagggtgggagagtcctagtgtcaccagccagaaccctaccgtacagcctggtggtgaacacatgaactcctgggccaaagcggcatcttctggaactacagcaagtgaaggaagtagtgatggttctggcaaccacaatgaaggaagcactgggagggaaggaacgggagaaggccgaaggcgagataaagggattatagaccaagggcacatccagttgccaaggaatgatcttgacccaagagttctgtctaatactggttggggacagactcctgtaaagcaaaacactgcctgggaatttgaagaatcccctaggtctgaaaggaaaaatgacaatgggacagaggcctggggttgtgcagctactcaggcttcaaactcaggggggaagaacgatgggtccatcatgaacagtacaaatacctcttcagtatctgggtgggtcaacgcgccacctgccgctgtgccagcaaacacaggttggggagacagcaacaacaaagcgccaagtggcccgggggtttggggggactcgataagctctactgctgttagtactgctgctgctgccaagagtggccatgcttggagtggggccgcaaatcaggaggacaagtcacccacctggggtgagcctccaaagcccaaatcccaacactggggagatggacaaagatcaaatccagcctggagtgcaggagggggagattgggcagattcatcgtctgtccttggacacttgggggatgggaaaaaaaatggatctggatgggatgctgacagtaataggtcagggtctggttggaatgacaccacgagatctgggaacagtggctggggcaacagcacaaatacaaaggccaatccaggtacaaactggggggagactttaaaacctggcccccaacagaactgggctagcaaaccccaagacaacaatgtgagtaactggggaggagctgcttctgtgaaacagacaggaacagggtggatcggggggccggtaccggtcaaacagaaggacagcagtgaagcaactggctgggaagaaccctctccaccgtccattcgccgcaaaatggaaattgatgatggtacctcagcttggggggacccaagcaactataacaataaaactgtaaacatgtgggatagaaacaacccggtcatccagagcagtaccacgaccaataccaccaccaccaccaccactaccacgagcaacaccacacacagggtcgagacgccgcccccgcaccaggccggtactcagctgaatcgatcaccgttgcttggtccagtttcatcaggctggggagaaatgcctaatgttcactcaaagactgaaaactcttggggagaaccatcctccccttctaccctggtggataatggcacagcagcatgggggaagccacccagcagtggcagcgggtggggagatcaccctgcagagccgccggtggcatttggaagagctggcgcacctgttgctgcctcagccctgtgcaaaccagcttcaaaatctatgcaagaaggctggggcagtggtggggatgaaatgaacctcagtaccagccagtgggaggatgaagaaggggacgtgtggaataatgctgcttcccaagaaagcacctcctcctgcagctcctgggggaacgcccccaaaaaaggacttcaaaagggcatgaagacgtctggcaagcaggatgaggcctggatcatgagccggctgatcaaacaactcacagacatgggcttcccgagagagccagctgaggaggccttgaagagtaacaatatgaatcttgatcaggccatgagcgctctgctggaaaagaaggtggacgtggacaagcgtgggctgggagtgaccgaccataatggaatggccgccaagcccctcggctgccgcccgccaatctccaaagagtcttccgtggaccgccccacctttcttgacaaggatggcggcctcgtggaagagcccacgccttcaccgttcttgccttccccaagcctgaagctccccctttcacacagtgcactccccagtcaggccctgggtgggattgcctccgggctgggcatgcaaaacttgaattcttctagacagataccgagtggcaatctgggtatgtttggcaatagtggagcagcacaagccaggaccatgcagcagccgccacagccaccagtgcagcctcttaactcttcccagcccagtctccgtgctcaagtgcctcagtttctatcccctcaggttcaagcacagcttttgcagtttgcagcaaaaaacattggtctcaaccctgcactattaacctcgccaattaatcctcaacatatgacgatgttgaaccagctctatcagctgcagctggcataccaacgtttacaaatccagcagcagatgttacaggcccagcgtaatgtgtccggatccatgagacaacaggagcagcaagttgcgcgcacaatcactaatctgcagcagcagatccagcagcaccagcgccagctggcccaggccctgctcgtgaagcagccaccaccgccaccgcccccgccgcacctgtctctgcacccctctgcaggcaaatcggccatggacagcttcccctcgcacccacagactcccggcctacctgacctgcagaccaaagagcagcagtcttcacccaacacctttgctccttaccctctcgctggactgaacccaaacatgaatgtcaacagcatggacatgaccggtggcttgtcggtgaaggacccatcccagtcccagtcacgcctcccccagtggacgcaccccaactccatggataacttgcccagtgccgcttcccccctggagcagaaccctagcaagcatggtgctatccctggaggtctaagcattgggcctccaggtaagtcctccattgatgactcctatggccggtacgatttaatccagaacagtgagtcaccagccagtcctcccgtagctgttccccatagctggtcacgtgccaaatctgacagtgataaaatctcaaatggctctagcatcaactggcccccagaattccatccgggagttccatggaaaggactgcagaatattgaccctgagaatgaccctgacgtcactcctggcagtgtccccactgggcctaccatcaacaccaccatccaggatgtcaaccgctacctcctcaagagtggagggtcctccccgccatcatctcagaatgccacgctgccttcttcgagtgcctggccactcagtgcctccggctacagtagctctttcagcagcattgcatccgcacctagtgttgcaggtaaactgtcagacatcaaatcgacgtggtcctctggccctacctcccacacgcaagcctctctgtctcatgaactatggaaggtgcccagaaacagtactgcacccacgaggccacctccagggttaaccaatcccaagccctcctccacctggggtgccagccccctcggctggaccagctcctactcctcgggttctgcctggagcaccgacacctcaggaagaaccagcagctggctcgttcttcgaaacctcactccccagattgatggttctacactgcggacattgtgtttgcaacatgggcctcttatcacattccacctgaatctgactcaaggcaatgctgtggtccggtacagctccaaggaggaggctgccaaggcccagaagtctctgcacatgtgcgtcctgggaaacactaccatcctggccgagttcgctggtgaagaagaagtgaatcgcttcttagcccaaggccaggcgctgccacccacttccagctggcagtccagcagcgcgtccagccagccgcggctcagcgcagcgggcagctcccatggcctggtacgcagcgacgctggccactggaacgccccgtgcctgggtggcaaggggagcagtgagctgctgtggggcggggtgccccagtactccagcagcctgtggggcccgcccagcgccgacgacagcagggtgataggcagccccacgccgctaaccaccctgctgcctggggacctgctcagcggggagtccctgtaggctctgccatcatcagcaccaggagagccgacccctcccgggacccctcccggctgggcggccccacagacccgctggaacccagcagcggccgc

SEQ ID NO: 32516 - DNA, 2324 bp, Homo sapiens
  source 1..2324: mol_type = unassigned DNA
gttttatgggcggatggaaggggccggggcagcgtcggggaaaggaagggccggaggcgcggcggcgggcggccgagaggggcggcggcggcggcggcggcggggttcccgcgccgcggagcccggcccgagagccgcgtccacgttcctgcctcctgctcccgccgccctggggcgccgccatgacgcccgatctgctcaacttcaagaagggatggatgtcgatcttggacgagcctggagagcctccctccccctcgctcaccaccacctctacttcgcagtggaagaaacattggtttgtgctgacagattcaagtctcaaatattacagagactccactgctgaggaggcagatgagctggatggtgagatcgacctgcgttcctgcacggatgtcactgagtacgcggtgcagcgcaactatggcttccagatccacaccaaggatgctgtctataccttgtcggccatgacctcaggcatccggcggaactggatcgaggctctgagaaagaccgtacgtccaacttcagccccagatgtcaccaagctctcggactctaacaaggagaacgcgctgcacagctacagcacccagaagggccccctgaaggcaggggagcagcgggcgggctctgaggtcatcagccggggtggccctcggaaggcggacgggcagcgtcaggccttggactacgtggagctctcgccgctgacccaggcttccccgcagcgggcccgcaccccagcccgcactcctgaccgcctggccaagcaggaggagctggagcgggacctggcccagcgctccgaggagcggcgcaagtggtttgaggccacagacagcaggaccccagaggtgcctgctggtgaggggccgcgccggggcctgggtgcccccctgactgaggaccagcaaaaccggcttagtgaggagatcgagaagaagtggcaggagctggagaagctgcccctgcgggagaataagcgggtgcccctcactgccctgctcaaccaaagccgcggagagcgccgagggcccccaagtgacggccacgaggcactggagaaggaggttcaggctcttcgggcccagctggaggcgtggcgtctccaaggggaggctcctcagagtgcactgagatcccaggaggatggccacatccccccgggctacatctcacaggaggcatgtgagcgcagcctggcagagatggagtcctcgcaccagcaggtgatggaggagctgcagcggcaccacgagcgggagctgcagcgcctgcagcaggagaaggagtggctcctggctgaggagacggcagccacggcctcagccattgaagccatgaagaaggcctaccaggaagagctgagccgagagctgagcaaaacacggagtctccagcagggcccggatggcctccggaagcagcaccagtcagatgtggaggcactgaagcgagagctgcaggtgctatcggagcagtactcgcagaagtgcctggagattggggcactcatgcggcaggctgaggagcgcgagcacacgctgcgccgctgccagcaggagggccaggagctgctgcgccacaaccaggagctgcatggccgcctgtcagaggagatagaccagctgcgcggcttcattgcctcgcagggcatgggcaatggctgcgggcgcagcaacgagcggagttcctgcgagctagaggtgctgcttcgcgtaaaagaaaacgaactccagtacctaaagaaggaggtgcagtgcctccgggacgagctccagatgatgcagaaggacaagcgcttcacctcgggaaagtaccaggacgtctatgtggagctgagccacatcaagacacggtctgagcgggagatcgagcagctgaaggagcacctgcgtcttgccatggccgccctccaggagaaggagtcgatgcgcaacagcctggctgagtagaggtcccgcccagctgcagaccctccaggctggaggaccagccgccctccttccctcctggatggaagtaaaaagccaagctttctccccaccctctgtgggccacacgtgcacttgcacccaccacacacacacacacacacacacacacacacacagacacacagacacatacgcacacacgtgcacacatgtacacacggatacacacacacacacacacactgcatatctgagcgcgcccctcgcactgggtctcaccttgcaccttcttcaggattttatatgtgaagagatttttatatagatttttttcctttttttccaaaacactttatactttaaaaaaaaaaaaaaaaa

SEQ ID NO: 32517 - DNA, 10129 bp, Homo sapiens
  source 1..10129: mol_type = unassigned DNA
atcgctctgattcattgttaaaataaagaggccatgaccctggcactcccaccccggcagcccctgtgcgtggaaacccagccaaggtctgatgatggaggagccttggccctggctgtcccaggggaggaggtgaaattcctcagctctccaccaagattggccacaaaagcctgatcccctggaacacagcaggcctcacatagacggtcagccattggatcataggaactgccctggcctgactcacccaatatggaggaggtgcctggggatgccctgtgtgaacactttgaggccaacatacttacccagaaccgctgtcaaaactgcttccaccctgaggaggcccatggagcaagataccaggagctcaggagcccttcaggtgctgaggtgccctactgcgacctgcctcgatgtccacctgcccctgaggacccactcagcgcctcaacctccggctgccagtctgtggtggacccaggcctcaggccagggcccaagaggggcccatccccctcagcagggctcccagaagagggtcccacagctgcccccaggagcaggagccgggagcttgaggcagtaccctatctggagggcctgaccacttccttgtgtggcagctgcaacgaggaccccggctctgaccccacctccagccctgactccgccacccctgatgataccagcaactcgtcctctgtggactgggacactgttgagaggcaggaggaggaggcccccagctgggacgagctcgcagtgatgatcccgaggaggcctcgggaggggccgagagctgacagctcccaaagggctccgtctctcctcaccaggtcccctgtgggaggagatgctgcaggccagaaaaaggaggacaccggcggtgggggccggagcgcaggacagcactgggcaaggctccggggagaaagcgggttgtccctggagcggcaccggtcaacactgacccaggcttcctccatgacaccacacagtggacctcgaagcaccacgtctcaggcttctcctgcccaaagggacactgctcaggctgcctctacacgtgaaatccccagagcctcctctccccatcgaatcacccaaagggacacctccagggcctcatccacccaacaggaaatctccagggcctcatccacccaacaggaaacctccagggcctcatccacccaagaggacacccctagggcctcatccacccaagaggacacccccagggcctcatctacacagtggaacacccccagagcttcctctccctcacgaagcacccaactggataaccccagaacctcttctacccagcaggacaacccccaaacttcttttcctacttgtactccccagcgggaaaaccccaggacaccctgtgtccagcaggacgatcccagagcctcctctcccaacagaaccactcaacgagagaattccagaacatcctgtgcccagcgggacaatcccaaagcctccagaacctcctctcccaatagagccacacgagacaaccccagaacatcctgcgcccagcgggacaatcccagagcctcctctcccagtagagctacacgagacaaccccacaacatcctgtgcccagcgggacaatcccagagcctccagaacctcctctcccaatagagccacacgagacaaccccagaacatcctgtgcccagcgggacaatcccagagcctcctctcccagtagagctacacgagacaaccccacaacatcctgtgcccagcgggacaatcccagagcctccagaacctcctctcccaatagagccacacgagacaaccccagaacatcctgcgcccagcgggacaatcccagagcctcctctcccaatagagctgcacgagacaaccccacaacatcctgtgcccagcgggacaatcccagagcctccagaacctcctctcccaatagagccacacgagacaaccccagaacatcctgtgcccagcgggacaatcccagagcctcctctcccaatagagctacacgagacaaccccacaacatcctgtgcccagcgggacaatcccagagcctccagaacctcctctcccaatagagccacacgagataaccccagaacatcctgtgcccagcgggacaatcccagagcctcctctcccaacagaaccacccaacaagacagccccagaacatcctgtgcccgacgggacgatcccagagcctcctctcctaacagaaccatccaacaagagaaccccagaacatcctgtgccctacgggacaatcccagagcctcctctcccagcagaaccatccaacaagagaaccccagaacatcctgtgcccaacgggacgatcccagagcctcctctcctaacagaaccacccaacaagagaaccccagaacatcctgtgcccgacgggacaatcccagagcctcctctcgcaacagaaccatccagcgagacaaccccagaacatcctgtgcccagcgggacaatcccagagcctcctctcctaacagaaccatccaacaagagaacctcagaacatcctgtacccgacaggacaatcccaggacctcctctcccaatagagccacacgagacaaccccagaacatcctgtgcccagcgggacaatctcagagcctcctctcccatcagagccacccaacaggacaaccccagaacttgtattcaacagaacatccccagatcatcttctacccaacaagacaaccctaaaacctcttgtaccaaacgagataacctcagacccacttgtacacagcgggaccgcacacagtccttttcctttcaacgagacaaccctggaacctcctcatctcaatgctgcacccaaaaggagaatctgagaccatcatctccccaccgctccactcaatggaacaatcccaggaattcatctccccatcgtactaacaaagacatcccctgggcctcgtttcccctccggccaactcagagtgatggtccccgaacctcttccccatctcgctccaagcaaagcgaggttccctgggcatccatcgccctccggccaacccaaggtgacaggcctcagacatcctctcccagcaggccagcccagcatgacccaccccagtcctcctttggccccacccagtacaacttgccatcccgggccacctcttcctcccataacccaggccaccagagcacctcccgaacttcctcacctgtgtaccccgctgcctatggggctcccctgacctctcctgagccctcccagcctccatgtgctgtgtgcattgggcaccgggatgcccctcgagcctcttcgccccctcgctatttgcagcacgaccccttccccttcttcccagagccccgcgcccctgagagtgaaccgccccaccacgagcctccctatataccacctgctgtgtgcattggacaccgagatgccccccgggcgtcctcgcccccccgccacacccaatttgaccccttccccttcctcccagacacatcagatgccgagcatcagtgtcagtccccccaacacgagccccttcagctccctgcacctgtgtgtattgggtaccgagatgcaccccgggcctcctccccaccacgccaggccccagagccttccctcttattccaggacctccccagggccagcacagagagccttgtcccttccatggactctctgcacgagtgcccccacatccccacccctgtgtgcattgggcaccgggatgcaccctccttctcatccccaccacgccaggctcctgagccatccctcttcttccaggatccccctggaactagtatggagagcctggccccctccactgactctctgcatggctccccagtgctgatcccccaagtgtgcatcgggcaccgggatgcaccccgagcctcctccccaccccgccacccacccagtgacctagcgttcctggcaccctcaccttcaccgggcagctctgggggctcccggggctcagcgcctcccggggagaccaggcacaacttggagcgggaggagtacactgtgctggccgacctgcccccacccaggaggctggcccagagacagccagggccccaggcgcagtgcagcagcgggggccgcacccacagccctggccgtgcagaggtggagcgcctcttcgggcaagagcgcaggaagtccgaggcagcgggggccttccaggcccaggacgagggacggtcacagcagcccagccaaggccagagccaacttctccgaagacagtccagccctgcccccagcaggcaggtgaccatgctccctgccaaacaggcagaactgacccggcggagccaagcagagccccctcatccttggagtcctgagaagagacctgagggagatcggcagctccaggggtccccgctgccccccaggacatcagccaggacccctgagagggagctgcggacacagagacctctggagagtggccaagcaggcccaagacagcctctgggggtgtggcagagtcaggaggaaccgccagggtcccagggccctcatagacacctagaaaggagctggagcagccaggagggaggcctgggccctgggggctggtggggatgtggagagcccagcctgggggcagccaaagccccggagggagcatgggggggcacttccagggagtacaaggagagctgggggcagccagaggcctgggaggagaagcccactcatgagctccccagagaactaggaaagagaagcccactcacgagcccccctgagaactggggaggccccgcagagtcctcacaatcctggcactctgggacacccactgctgtgggctggggggcagagggagcgtgtccatacccgcgtggctctgagaggcgacccgagcttgactggagggatctgcttggccttctccgggcaccaggagagggggtctgggcccgtgtccccagcctggactgggagggcctcttggagctcctgcaggccaggctgccccgcaaggacccagctggacacagggatgacctggccagggctttagggccagagctgggtcccccaggcacaaacgatgtccctgagcaggagtcacacagccagccagaaggctgggccgaggccaccccagtcaatggacacagccccgcactgcagtcccagagcccggtccagctgcccagccctgcctgcacctccacccagtggccaaagatcaaagtgacaagaggaccagcgaccgcaactctggcaggcctggagcagacgggccccctggggagcaggagcactgcgaagggccccagcttgccagagctgcagttccaaccagaggagcctgaggagtcagaaccaagcagaggccaagaccccctgactgaccagaagcaggcagactcggcagacaagaggccagcagagggcaaggctgggagcccgctcaagggccgactggtgacctcatggcggatgcccggggaccggcccacgctgttcaatccgttcctgctgtctctgggggtcctcaggtggcgaaggcccgatctgctcaacttcaagaagggatggatgtcgatcttggacgagcctggagagcctccctccccctcgctcaccaccacctctacttcgcagtggaagaaacattggtttgtgctgacagattcaagtctcaaatattacagagactccactgctgaggaggcagatgagctggatggtgagatcgacctgcgttcctgcacggatgtcactgagtacgcggtgcagcgcaactatggcttccagatccacaccaaggatgctgtctataccttgtcggccatgacctcaggcatccggcggaactggatcgaggctctgagaaagaccgtacgtccaacttcagccccagatgtcaccaagctctcggactctaacaaggagaacgcgctgcacagctacagcacccagaagggccccctgaaggcaggggagcagcgggcgggctctgaggtcatcagccggggtggccctcggaaggcggacgggcagcgtcaggccttggactacgtggagctctcgccgctgacccaggcttccccgcagcgggcccgcaccccagcccgcactcctgaccgcctggccaagcaggaggagctggagcgggacctggcccagcgctccgaggagcggcgcaagtggtttgaggccacagacagcaggaccccagaggtgcctgctggtgaggggccgcgccggggcctgggtgcccccctgactgaggaccagcaaaaccggcttagtgaggagatcgagaagaagtggcaggagctggagaagctgcccctgcgggagaataagcgggtgcccctcactgccctgctcaaccaaagccgcggagagcgccgagggcccccaagtgacggccacgaggcactggagaaggaggttcaggctcttcgggcccagctggaggcgtggcgtctccaaggggaggctcctcagagtgcactgagatcccaggaggatggccacatccccccgggctacatctcacaggaggcatgtgagcgcagcctggcagagatggagtcctcgcaccagcaggtgatggaggagctgcagcggcaccacgagcgggagctgcagcgcctgcagcaggagaaggagtggctcctggctgaggagacggcagccacggcctcagccattgaagccatgaagaaggcctaccaggaagagctgagccgagagctgagcaaaacacggagtctccagcagggcccggatggcctccggaagcagcaccagtcagatgtggaggcactgaagcgagagctgcaggtgctatcggagcagtactcgcagaagtgcctggagattggggcactcatgcggcaggctgaggagcgcgagcacacgctgcgccgctgccagcaggagggccaggagctgctgcgccacaaccaggagctgcatggccgcctgtcagaggagatagaccagctgcgcggcttcattgcctcgcagggcatgggcaatggctgcgggcgcagcaacgagcggagttcctgcgagctagaggtgctgcttcgcgtaaaagaaaacgaactccagtacctaaagaaggaggtgcagtgcctccgggacgagctccagatgatgcagaaggacaagcgcttcacctcgggaaagtaccaggacgtctatgtggagctgagccacatcaagacacggtctgagcgggagatcgagcagctgaaggagcacctgcgtcttgccatggccgccctccaggagaaggagtcgatgcgcaacagcctggctgagtagaggtcccgcccagctgcagaccctccaggctggaggaccagccgccctccttccctcctggatggaagtaaaaagccaagctttctccccaccctctgtgggccacacgtgcacttgcacccaccacacacacacacacacacacacacacacacacagacacacagacacatacgcacacacgtgcacacatgtacacacggatacacacacacacacacacactgcatatctgagcgcgcccctcgcactgggtctcaccttgcaccttcttcaggattttatatgtgaagagatttttatatagatttttttcctttttttccaaaacactttatactttaaaaaaaaaaaaaaaaagcaattcctggtggctgtgtgcctccaaccctggtccccctctgtctccagccaccctctgcttgggcttctgagctggtggccctggcccagaggtctggcggaggcccaggcagcagccatggcggggtgtctctacaggggagaggcgggagcctgccaccctcttcctgccctacctcctactaacacttcctgccccatttggacccgtaccatggggctcaggacagagggagctagcagctggcctccatggccccacagcctccttcgaggctgtgctgggtgcagaaccgccagagccacccaaaaggtgtttctcttctgctccctgaacctcttaacttaataaaacgttccagcagctctggtgtcctagatggctggcagaacaggaatggagattggggtttcttgaagtggcttccccactcacaccctacccacaccccacccttcctaaagcagcggcctctaggcttctgagggtggggctgaaaatccaaggtctcccttagtacagactgtgacgcccccagtgtggcttgcaggctagtggcagcggaagcatgtgggaaatagcaagtccagtcccaccccaacctactgaaccagcgtctgcattttaacagggtgccccagtgattcacgtgaccttcaaagtctgaggagccctggagtagggcccagggcccaggcctgagagagaggcctggggctaagactagccctgaccatgaccttgggcaagtcacacccctcactgagcctcagtttgcttctccatcaaatgggtgtttttctttcagtcccagtcctctcctgaggcttttcccagaggtcatgcccagccctgggcaggggtgagggcagggttgtggctgccaggcacaggtccagcgggctgggagtcctcaccatggctggctgtgctgattatggttgcatggggctgggaagaggtcccatttctgagccacagaaacaggccacatccagtaggggtcctggaaggctgtgagaacccagaggagaccctgacccagcctgcaggtagaagactgcctttggaggcagctttgaaagatgactcttccagatggaagaatcaggaagggccttcccacgtggaggcaccagcaggagcaaacgtccctggtgtgttcaggcaaagagccacaggagagtgacctcgtggagtgggaagagattgtttcccattcccttgccagggattggttgaggaatggacaaggcttgcagttcacgcaagccagtgaaatgcgaggggaagtcttgggagtggggtggaggaggtcatctgggaagggtgtccttggtcttaaaaagaggcacaagaggccgggcgcggtggctcttgcctattatcctagcactttgggaggccaaggcagggggatcacttgaggtcaggagttcgagaccagcctggccaacatggtgaaaccccgtctctactaaaaatacaaaaaattagccagacgtggtgccaagcacctgtaatcccagctactcaggaggctgaggcaggagaatcacttgaacccaggaggcagaagttgcagtgagccaagatcgcgccactgcactccagcctgtgtgacaagggcgaaactccatctcaaaaaaaaagggggagggtggcgcaaggagaggacacctctctcctggccctgtcgccatcttccctcatcaatagctaaaaatggcaaagaagaaagagccaggaccccgtgccatcaaatcctccggccttgtgctgccctgtctcggcactgcttgccttaggagatcaggagtgttcctagccactgggagatgggatgcctgccactggcagctctgccgtccatcctcaccatcccaccgtccccccaagacagctctccatcccatcctctgcctcccttctagcctcaacctaactcagggctcccccgtctcacacctgggttgcaggaacatcctcttcaccaacccccctcccatccctcctcagggctgcctagggcagctacaaaaaccaggccagcctctgaaaggtgctccacatctcattaaaaaccgtgaaatcgcactgccccactatcagaatagctcagaggagaaggtctgccagtaccaagtgctggtggggatacggagaagagcagctcccaggcgctgctggtgcaaatgtgctttgttgcacccacggcaggaaactgaccagcttctcatcaagttaaatacgcatctaccctatggcctagcatttccactcttgcttacacatccaggagaaatgagtccttacatgcacaaaaggatgagtaccgtaatactcacatcagcaaataaacaatacagctgtgtgtcagtagtagaatgaataaattgtggtcgattcata

SEQ ID NO: 32518 - DNA, 2125 bp, Homo sapiens
  source 1..2125: mol_type = unassigned DNA
aaaaagttttatgggcggatggaaggggccggggcagcgtcggggaaaggaagggccggaggcgcggcggcgggcggccgagaggggcggcggcggcggcggcggcggggttcccgcgccgcggagcccggcccgagagccgcgtccacgttcctgcctcctgctcccgccgccctggggcgccgccatgacgcccgatctgctcaacttcaagaagggatggatgtcgatcttggacgagcctggagagcctccctccccctcgctcaccaccacctctacttcgcagtggaagaaacattggtttgtgctgacagattcaagtctcaaatattacagagactccactgctgaggaggcagatgagctggatggtgagatcgacctgcgttcctgcacggatgtcactgagtacgcggtgcagcgcaactatggcttccagatccacaccaaggatgctgtctataccttgtcggccatgacctcaggcatccggcggaactggatcgaggctctgagaaagaccgtacgtccaacttcagccccagatgtcaccaagctctcggactctaacaaggagaacgcgctgcacagctacagcacccagaagggccccctgaaggcaggggagcagcgggcgggctctgaggtcatcagccggggtggccctcggaaggcggacgggcagcgtcaggccttggactacgtggagctctcgccgctgacccaggcttccccgcagcgggcccgcaccccagcccgcactcctgaccgcctggccaagcaggaggagctggagcgggacctggcccagcgctccgaggagcggcgcaagtggtttgaggccacagacagcaggaccccagaggtgcctgctggtgaggggccgcgccggggcctgggtgcccccctgactgaggaccagcaaaaccggcttagtgaggagatcgagaagaagtggcaggagctggagaagctgcccctgcgggagaataagcgggtgcccctcactgccctgctcaaccaaagccgcggagagcgccgagggcccccaagtgacggccacgaggcactggagaaggaggttcaggctcttcgggcccagctggaggcgtggcgtctccaaggggaggctcctcagagtgcactgagatcccaggaggatggccacatccccccgggctacatctcacagctggtgggcgtgatcactgtgcccgttttacagacaaggccactgagctctgagaggttatgtgacttgcccaaggtcaccccgcctgcaggtctcaaaggtgggatttgagcgagggtccggctgactgcagagcctgtgtgtgagtccccgtgtgacactctgcacttggacccttgccccggggaagtggggggctagtggccccgagagtcactccctgaacacagggaaatcctgccgaggcccactgggccaaggccccacacaaggaggtctgcaggacaggggagcctccagtagccctcagagaatgcaccgtccgcctaggacagcggttctcaacggggtccattttgtcccccttggggacatttggctgtgtctgggaatacttctggttgtcacaactaggacaaactaactctctagaaaaaacgtgtgtgtgtacacatatataagtttattataaattttaccaataaaaacaatgcttagtacacaatttacaaataaaaatatataattttattgtgaattccgtacagcaaatggatttttctcagaatgctttcagtgattttttccatactcttgtatccacaactgattaacaaagggggttgttctaacgtgtgctggttgacatttttgtttatggtaatgagtaagatgagaagacatttgtcgaaactttactggtccatgttgtcagctacttctttgctagatcggatagtagttttctattgagaatatttgagaatattctattaagaatatttttgcaattttttgttctatttacaatgtaatggttatagatgtgagatacttctaagtttaatctgcattattagcattttcttatcacttgcttaagtctagacaatcaacaaaacaataaatcaagccctgatgtgtaatgtt

SEQ ID NO: 32519 - DNA, 5322 bp, Homo sapiens
  source 1..5322: mol_type = unassigned DNA
atcgctctgattcattgttaaaataaagaggccatgaccctggcactcccaccccggcagcccctgtgcgtggaaacccagccaaggtctgatgatggaggagccttggccctggctgtcccaggggaggaggtgaaattcctcagctctccaccaagattggccacaaaagcctgatcccctggaacacagcaggcctcacatagacggtcagccattggatcataggaactgccctggcctgactcacccaatatggaggaggtgcctggggatgccctgtgtgaacactttgaggccaacatacttacccagaaccgctgtcaaaactgcttccaccctgaggaggcccatggagcaagataccaggagctcaggagcccttcaggtgctgaggtgccctactgcgacctgcctcgatgtccacctgcccctgaggacccactcagcgcctcaacctccggctgccagtctgtggtggacccaggcctcaggccagggcccaagaggggcccatccccctcagcagggctcccagaagagggtcccacagctgcccccaggagcaggagccgggagcttgaggcagtaccctatctggagggcctgaccacttccttgtgtggcagctgcaacgaggaccccggctctgaccccacctccagccctgactccgccacccctgatgataccagcaactcgtcctctgtggactgggacactgttgagaggcaggaggaggaggcccccagctgggacgagctcgcagtgatgatcccgaggaggcctcgggaggggccgagagctgacagctcccaaagggctccgtctctcctcaccaggtcccctgtgggaggagatgctgcaggccagaaaaaggaggacaccggcggtgggggccggagcgcaggacagcactgggcaaggctccggggagaaagcgggttgtccctggagcggcaccggtcaacactgacccaggcttcctccatgacaccacacagtggacctcgaagcaccacgtctcaggcttctcctgcccaaagggacactgctcaggctgcctctacacgtgaaatccccagagcctcctctccccatcgaatcacccaaagggacacctccagggcctcatccacccaacaggaaatctccagggcctcatccacccaacaggaaacctccagggcctcatccacccaagaggacacccctagggcctcatccacccaagaggacacccccagggcctcatctacacagtggaacacccccagagcttcctctccctcacgaagcacccaactggataaccccagaacctcttctacccagcaggacaacccccaaacttcttttcctacttgtactccccagcgggaaaaccccaggacaccctgtgtccagcaggacgatcccagagcctcctctcccaacagaaccactcaacgagagaattccagaacatcctgtgcccagcgggacaatcccaaagcctccagaacctcctctcccaatagagccacacgagacaaccccagaacatcctgcgcccagcgggacaatcccagagcctcctctcccagtagagctacacgagacaaccccacaacatcctgtgcccagcgggacaatcccagagcctccagaacctcctctcccaatagagccacacgagacaaccccagaacatcctgtgcccagcgggacaatcccagagcctcctctcccagtagagctacacgagacaaccccacaacatcctgtgcccagcgggacaatcccagagcctccagaacctcctctcccaatagagccacacgagacaaccccagaacatcctgcgcccagcgggacaatcccagagcctcctctcccaatagagctgcacgagacaaccccacaacatcctgtgcccagcgggacaatcccagagcctccagaacctcctctcccaatagagccacacgagacaaccccagaacatcctgtgcccagcgggacaatcccagagcctcctctcccaatagagctacacgagacaaccccacaacatcctgtgcccagcgggacaatcccagagcctccagaacctcctctcccaatagagccacacgagataaccccagaacatcctgtgcccagcgggacaatcccagagcctcctctcccaacagaaccacccaacaagacagccccagaacatcctgtgcccgacgggacgatcccagagcctcctctcctaacagaaccatccaacaagagaaccccagaacatcctgtgccctacgggacaatcccagagcctcctctcccagcagaaccatccaacaagagaaccccagaacatcctgtgcccaacgggacgatcccagagcctcctctcctaacagaaccacccaacaagagaaccccagaacatcctgtgcccgacgggacaatcccagagcctcctctcgcaacagaaccatccagcgagacaaccccagaacatcctgtgcccagcgggacaatcccagagcctcctctcctaacagaaccatccaacaagagaacctcagaacatcctgtacccgacaggacaatcccaggacctcctctcccaatagagccacacgagacaaccccagaacatcctgtgcccagcgggacaatctcagagcctcctctcccatcagagccacccaacaggacaaccccagaacttgtattcaacagaacatccccagatcatcttctacccaacaagacaaccctaaaacctcttgtaccaaacgagataacctcagacccacttgtacacagcgggaccgcacacagtccttttcctttcaacgagacaaccctggaacctcctcatctcaatgctgcacccaaaaggagaatctgagaccatcatctccccaccgctccactcaatggaacaatcccaggaattcatctccccatcgtactaacaaagacatcccctgggcctcgtttcccctccggccaactcagagtgatggtccccgaacctcttccccatctcgctccaagcaaagcgaggttccctgggcatccatcgccctccggccaacccaaggtgacaggcctcagacatcctctcccagcaggccagcccagcatgacccaccccagtcctcctttggccccacccagtacaacttgccatcccgggccacctcttcctcccataacccaggccaccagagcacctcccgaacttcctcacctgtgtaccccgctgcctatggggctcccctgacctctcctgagccctcccagcctccatgtgctgtgtgcattgggcaccgggatgcccctcgagcctcttcgccccctcgctatttgcagcacgaccccttccccttcttcccagagccccgcgcccctgagagtgaaccgccccaccacgagcctccctatataccacctgctgtgtgcattggacaccgagatgccccccgggcgtcctcgcccccccgccacacccaatttgaccccttccccttcctcccagacacatcagatgccgagcatcagtgtcagtccccccaacacgagccccttcagctccctgcacctgtgtgtattgggtaccgagatgcaccccgggcctcctccccaccacgccaggccccagagccttccctcttattccaggacctccccagggccagcacagagagccttgtcccttccatggactctctgcacgagtgcccccacatccccacccctgtgtgcattgggcaccgggatgcaccctccttctcatccccaccacgccaggctcctgagccatccctcttcttccaggatccccctggaactagtatggagagcctggccccctccactgactctctgcatggctccccagtgctgatcccccaagtgtgcatcgggcaccgggatgcaccccgagcctcctccccaccccgccacccacccagtgacctagcgttcctggcaccctcaccttcaccgggcagctctgggggctcccggggctcagcgcctcccggggagaccaggcacaacttggagcgggaggagtacactgtgctggccgacctgcccccacccaggaggctggcccagagacagccagggccccaggcgcagtgcagcagcgggggccgcacccacagccctggccgtgcagaggtggagcgcctcttcgggcaagagcgcaggaccatgctccctgccaaacaggcagaactgacccggcggagccaagcagagccccctcatccttggagtcctgagaagagacctgagggagatcggcagctccaggggtccccgctgccccccaggacatcagccaggacccctgagagggagctgcggacacagagacctctggagagtggccaagcaggcccaagacagcctctgggggtgtggcagagtcaggaggaaccgccagggtcccagggccctcatagacacctagaaaggagctggagcagccaggagggaggcctgggccctgggggctggtggggatgtggagagcccagcctgggggcagccaaagccccggagggagcatgggggggcacttccagggagtacaaggagagctgggggcagccagaggcctgggaggagaagcccactcatgagctccccagagaactaggaaagagaagcccactcacgagcccccctgagaactggggaggccccgcagagtcctcacaatcctggcactctgggacacccactgctgtgggctggggggcagagggagcgtgtccatacccgcgtggctctgagaggcgacccgagcttgactggagggatctgcttggccttctccgggcaccaggagagggggtctgggcccgtgtccccagcctggactgggagggcctcttggagctcctgcaggccaggctgccccgcaaggacccagctggacacagggatgacctggccagggctttagggccagagctgggtcccccaggcacaaacgatgtccctgagcaggagtcacacagccagccagaaggctgggccgaggccaccccagtcaatggacacagccccgcactgcagtcccagagcccggtccagctgcccagccctgcctgcacctccacccagtggccaaagatcaaagtgacaagaggaccagcgaccgcaactctggcaggcctggagcagacgggccccctggggagcaggagcactgcgaagggccccagcttgccagagctgcagttccaaccagaggagcctgaggagtcagaaccaagcagaggccaagaccccctgactgaccagaagcaggcagactcg

SEQ ID NO: 32520 - DNA, 919 bp, Homo sapiens
  source 1..919: mol_type = unassigned DNA
gctggtctggactgccctctgagctctcagggggtctctatgcaggcagagtcctcccagcccctctctcccattcttgggcgaggggtcggctggagagaggcccctgggacatctggcccgatctgctcaacttcaagaagggatggatgtcgatcttggacgagcctggagagcctccctccccctcgctcaccaccacctctacttcgcagtggaagaaacattggtttgtgctgacagattcaagtctcaaatattacagagactccactgctgaggaggcagatgagctggatggtgagatcgacctgcgttcctgcacggatgtcactgagtacgcggtgcagcgcaactatggcttccagatccacaccaaggatgctgtctataccttgtcggccatgacctcaggcatccggcggaactggatcgaggctctgagaaagaccgtacgtccaacttcagccccagatgtcaccaagctctcggactctaacaaggagaacgcgctgcacagctacagcacccagaagggccccctgaaggcaggggagcagcgggcgggctctgaggtcatcagccggggtggccctcggaaggcggacgggcagcgtcaggccttggactacgtggagctctcgccgctgacccaggcttccccgcagcgggcccgcaccccagcccgcactcctgaccgcctggccaagcaggaggagctggagcgggacctggcccagcgctccgaggagcggcgcaagtggtttgaggccacagacagcaggaccccagaggtgcctgctggtgaggggccgcgccggggcctgggtgcccccctgactgaggaccagcaaaaccggcttagtgaggagatcgagaagaagtggcaggagctggagaagctgcccctgcgggagaa

SEQ ID NO: 32521 - DNA, 586 bp, Homo sapiens
  source 1..586: mol_type = unassigned DNA
ttcgcgcagtgctgctggtctggactgccctctgagctctcagggggtctctatgcaggcagagtcctcccagcccctctctcccattcttgggcgaggggtcggctggagagaggcccctgggacatctgggtgtgtgtgccagccacccagcccaacttcttggctctctgagtgccactatcaggaaaggggccagggctgcctcagtggctgggaggcctgcttggacttgggggttacctagggccttagccctcttggctggcttcccaggagctcggtcccacaggacttggggacaggcccgatctgctcaacttcaagaagggatggatgtcgatcttggacgagcctggagagcctccctccccctcgctcaccaccacctctacttcgcagtggaagaaacattggtttgtgctgacagattcaagtctcaaatattacagagactccactgctgaggaggcagatgagctggatggtgagatcgacctgcgttcctgcacggatgtcactgagtacgcggtgcagcgcaactatggcttccagatccacaccaaggatgctgtctataccttgt

SEQ ID NO: 32522 - DNA, 1763 bp, Homo sapiens
  source 1..1763: mol_type = unassigned DNA
ggaggttgtctatcccacagttggagaggggccctctctgccccagtgggcgatctgggctacggccaagttgccaccagctagttccgcttgaaaaccacttctggccccgtgggggactcaagtcgccaagcgagggttcccctgagcgccggagctcacaggtctcgccttgtcccgaaagccccgcaatcgaggcggaggcgaccgagcccccgactctcctagaacgttgccacaagaagggggaacgtcggaacagtgcatcatcgggcggcggccggggcggcggcaggagggcgggcggggggcagggctccgggggactgggcgggccatggcggaggacggcgaggaggcggagttccacttcgcggcgctctatataagtgggcagtggccgcgactgcgcgcagacactgaccttcagcgcctcggctccagcgccatggcgccctccaggaagttcttcgttgggggaaactggaagatgaacgggcggaagcagagtctgggggagctcatcggcactctgaacgcggccaaggtgccggccgacaccgaggtggtttgtgctccccctactgcctatatcgacttcgcccggcagaagctagatcccaagattgctgtggctgcgcagaactgctacaaagtgactaatggggcttttactggggagatcagccctggcatgatcaaagactgcggagccacgtgggtggtcctggggcactcagagagaaggcatgtctttggggagtcagatgagctgattgggcagaaagtggcccatgctctggcagagggactcggagtaatcgcctgcattggggagaagctagatgaaagggaagctggcatcactgagaaggttgttttcgagcagacaaaggtcatcgcagataacgtgaaggactggagcaaggtcgtcctggcctatgagcctgtgtgggccattggtactggcaagactgcaacaccccaacaggcccaggaagtacacgagaagctccgaggatggctgaagtccaacgtctctgatgcggtggctcagagcacccgtatcatttatggaggctctgtgactggggcaacctgcaaggagctggccagccagcctgatgtggatggcttccttgtgggtggtgcttccctcaagcccgaattcgtggacatcatcaatgccaaacaatgagccccatccatcttccctacccttcctgccaagccagggactaagcagcccagaagcccagtaactgccctttccctgcatatgcttctgatggtgtcatctgctccttcctgtggcctcatccaaactgtatcttcctttactgtttatatcttcaccctgtaatggttgggaccaggccaatcccttctccacttactataatggttggaactaaacgtcaccaaggtggcttctccttggctgagagatggaaggcgtggtgggatttgctcctgggttccctaggccctagtgagggcagaagagaaaccatcctctcccttcttacaccgtgaggccaagatcccctcagaaggcaggagtgctgccctctcccatggtgcccgtgcctctgtgctgtgtatgtgaaccacccatgtgagggaataaacctggcactaggtcttgtggtttgtctgccttcactggacttgcccagataatcttcctttttgaggcagctatataaatgatcatttgtgcaagaaaaaaaaaaaaacaagaacaggtttctataacaaca

SEQ ID NO: 32523 - DNA, 1344 bp, Homo sapiens
  source 1..1344: mol_type = unassigned DNA
gcgcagacactgaccttcagcgcctcggctccagcgccatggcgccctccaggaagttcttcgttgggggaaactggaagatgaacgggcggaagcagagtctgggggagctcatcggcactctgaacgcggccaaggtgccggccgacaccgaggtggtttgtgctccccctactgcctatatcgacttcgcccggcagaagctagatcccaagattgctgtggctgcgcagaactgctacaaagtgactaatggggcttttactggggagatcagccctggcatgatcaaagactgcggagccacgtgggtggtcctggggcactcagagagaaggcatgtctttggggagtcagatgagctgattgggcagaaagtggcccatgctctggcagagggactcggagtaatcgcctgcattggggagaagctagatgaaagggaagctggcatcactgagaaggttgttttcgagcagacaaaggtcatcgcagataacgtgaaggactggagcaaggtcgtcctggcctatgagcctgtgtgggccattggtactggcaagactgcaacaccccaacaggcccaggaagtacacgagaagctccgaggatggctgaagtccaacgtctctgatgcggtggctcagagcacccgtatcatttatggaggctctgtgactggggcaacctgcaaggagctggccagccagcctgatgtggatggcttccttgtgggtggtgcttccctcaagcccgaattcgtggacatcatcaatgccaaacaatgagccccatccatcttccctacccttcctgccaagccagggactaagcagcccagaagcccagtaactgccctttccctgcatatgcttctgatggtgtcatctgctccttcctgtggcctcatccaaactgtatcttcctttactgtttatatcttcaccctgtaatggttgggaccaggccaatcccttctccacttactataatggttggaactaaacgtcaccaaggtggcttctccttggctgagagatggaaggcgtggtgggatttgctcctgggttccctaggccctagtgagggcagaagagaaaccatcctctcccttcttacaccgtgaggccaagatcccctcagaaggcaggagtgctgccctctcccatggtgcccgtgcctctgtgctgtgtatgtgaaccacccatgtgagggaataaacctggcactaggtcttgtggtttgtctgccttcactggacttgcccagataatcttcctttttgaggcagctatataaatgatcatttgtgcaagaaaaaaaaaaaaacaagaacaggtttct

SEQ ID NO: 32524 - DNA, 1476 bp, Homo sapiens
  source 1..1476: mol_type = unassigned DNA
ctcgccggcgtccgcgtccccgcgccgagctgctcgggctccctgagccccagatctgaccccttcccttcggcaacctgaacgactcccgccttccacggaagggaccgagcccgtgccaaacaggctgagcgatttgggagtgaggagccatcctaccgctttccccaacctggaaacagcaaagcgcaaggcctctgagtcagttaggtctctgccacccacgggcaaaggatgctctcctccatcctccttcctccctccaccgaaatcggagagccgcgggcctgatccaaagaggcatccccttctcgttcattccccagaggcctcaatacaaaccccaggagttggcccctctccttttgctacaaatccttgccttgcaaaggggagaggtggtttgtgctccccctactgcctatatcgacttcgcccggcagaagctagatcccaagattgctgtggctgcgcagaactgctacaaagtgactaatggggcttttactggggagatcagccctggcatgatcaaagactgcggagccacgtgggtggtcctggggcactcagagagaaggcatgtctttggggagtcagatgagctgattgggcagaaagtggcccatgctctggcagagggactcggagtaatcgcctgcattggggagaagctagatgaaagggaagctggcatcactgagaaggttgttttcgagcagacaaaggtcatcgcagataacgtgaaggactggagcaaggtcgtcctggcctatgagcctgtgtgggccattggtactggcaagactgcaacaccccaacaggcccaggaagtacacgagaagctccgaggatggctgaagtccaacgtctctgatgcggtggctcagagcacccgtatcatttatggaggctctgtgactggggcaacctgcaaggagctggccagccagcctgatgtggatggcttccttgtgggtggtgcttccctcaagcccgaattcgtggacatcatcaatgccaaacaatgagccccatccatcttccctacccttcctgccaagccagggactaagcagcccagaagcccagtaactgccctttccctgcatatgcttctgatggtgtcatctgctccttcctgtggcctcatccaaactgtatcttcctttactgtttatatcttcaccctgtaatggttgggaccaggccaatcccttctccacttactataatggttggaactaaacgtcaccaaggtggcttctccttggctgagagatggaaggcgtggtgggatttgctcctgggttccctaggccctagtgagggcagaagagaaaccatcctctcccttcttacaccgtgaggccaagatcccctcagaaggcaggagtgctgccctctcccatggtgcccgtgcctctgtgctgtgtatgtgaaccacccatgtgagggaataaacctggcactagg

SEQ ID NO: 32525 - DNA, 1238 bp, Homo sapiens
  source 1..1238: mol_type = unassigned DNA
atggatgtgatggagctgcttgaagaagatctcacatgccctatttgttgtagtctgtttgatgatccacgggttttgccttgctcccacaacttctgcaaaaaatgcttagaaggtatcttagaagggagtgtgcggaattccttgtggagaccagctccattcaagtgtcctacatgccgtaaggaaacttcagctactggaattaatagcctgcaggttaattactccctgaagggtattgtggaaaagtataacaagatcaagatctctcccaaaatgccagtatgcaaaggacacttggggcagcctctcaacattttctgcctgactgatatgcagctgatttgtgggatctgtgctactcgtggggagcacaccaaacatgtcttctgttctattgaagatgcctatgctcaggaaagggatgcctttgagtccctcttccagagctttgagacctggcgtcggggagatgctctttctcgcttggataccttggaaactagtaagaggaaatccctacagttactgactaaagattcagataaagtgaaggaattttttgagaagttacaacacacactggatcaaaagaagaatgaaattctgtctgactttgagaccatgaaacttgctgttatgcaagcatatgacccagagatcaacaaactcaacaccatcttgcaggagcaacggatggcctttaacattgctgaggctttcaaagatgtgtcagaacccattgtatttctgcaacagatgcaggagtttagagagaaaatcaaagtaatcaaggaaactcctttacctccctctaatttgcctgcaagccctttaatgaagaactttgataccagtcagtgggaagacataaaactagtcgatgtggataaactttctttgcctcaagacactggcacattcattagcaagattccctggagcttttataagttatttttgctaatccttctgcttggccttgtcattgtctttggtcctaccatgttcctagaatggtcattatttgatgacctggcaacttggaaaggctgtctttcaaacttcagttcctatctgactaaaacagccgatttcatagaacaatcagttttttactgggaacaggtgacagatgggtttttcattttcaatgaaagattcaagaattttactttggtggtactgaacaatgtggcagaatttgtgtgcaaatataaactattataaaatct

SEQ ID NO: 32526 - DNA, 1637 bp, Homo sapiens
  source 1..1637: mol_type = unassigned DNA
gccgcgagtccattttggggctgtgcttggcgcgtaccgtgcggtccctgtagttggaggacgggcggtcgcgcggcctttcccactagccggaggtcggagataagtacccgccgcccggctcctctcgggaaagcggggtggtcctcgaaccttcagcgagggtggggagttgcccagtagcctctagttcgttagtcaaaacgtgaaaaaaaagacctgctttgccctgggaaatagtaaccctgccaaatacatcagcttgtaggagacagagaataacagcacctggccgggtgcagtggctcaggcctgtaatcgcagcactttgggaggctgaggtgggcggatcacctgaggtcaggagctcgagaccagcctggccaaaatggatgtgatggagctgcttgaagaagatctcacatgccctatttgttgtagtctgtttgatgatccacgggttttgccttgctcccacaacttctgcaaaaaatgcttagaaggtatcttagaagggagtgtgcggaattccttgtggagaccagctccattcaagtgtcctacatgccgtaaggaaacttcagctactggaattaatagcctgcaggttaattactccctgaagggtattgtggaaaagtataacaagatcaagatctctcccaaaatgccagtatgcaaaggacacttggggcagcctctcaacattttctgcctgactgatatgcagctgatttgtgggatctgtgctactcgtggggagcacaccaaacatgtcttctgttctattgaagatgcctatgctcaggaaagggatgcctttgagtccctcttccagagctttgagacctggcgtcggggagatgctctttctcgcttggataccttggaaactagtaagaggaaatccctacagttactgactaaagattcagataaagtgaaggaattttttgagaagttacaacacacactggatcaaaagaagaatgaaattctgtctgactttgagaccatgaaacttgctgttatgcaagcatatgacccagagatcaacaaactcaacaccatcttgcaggagcaacggatggcctttaacattgctgaggctttcaaagatgtgtcagaacccattgtatttctgcaacagatgcaggagtttagagagaaaatcaaagtaatcaaggaaactcctttacctccctctaatttgcctgcaagccctttaatgaagaactttgataccagtcagtgggaagacataaaactagtcgatgtggataaactttctttgcctcaagacactggcacattcattagcaagattccctggagcttttataagttatttttgctaatccttctgcttggccttgtcattgtctttggtcctaccatgttcctagaatggtcattatttgatgacctggcaacttggaaaggctgtctttcaaacttcagttcctatctgactaaaacagccgatttcatagaacaatcagttttttactgggaacaggtgacagatgggtttttcattttcaatgaaagattcaagaattttactttggtggtactgaacaatgtggcagaatttgtgtgcaaatataaactattataaaatctgtttcaagtat

SEQ ID NO: 32527 - DNA, 7249 bp, Homo sapiens
  source 1..7249: mol_type = unassigned DNA
ccggagccgcgagtccattttggggctgtgcttggcgcgtaccgtgcggtccctgtagttggaggacgggcggtcgcgcggcctttcccactagccggaggtcggagataagtacccgccgcccggctcctctcgggaaagcggggtggtcctcgaaccttcagcgagggtggggagttgcccaggtcagcagggatctgcgtgggttgggggggctggcgaaggccgtctgagctccagtccggcagcgcggcagaaaccagcggggcactgtcatgggcctggggaggagcggcctgcggagggcgccggggcagtgtgtctgtggtccagaaaacctgctccgtccggagccttcctggccccgctaccagcgtctccacatcccctagaaaagaaaagacgggtgtgggccttaggttacagcgcgccgccagcgtttggttgcatggcgccgggggagggcgccctaaccgagaagctgcttaatacaaagagctccaggctcctggcggttcaccaggtctaaacagccgggctttatttgtgggggcgattgaaaaaattgagggtcaagattggggtgctgtgcaaataaatgcgttaatactgttctttttcttctttctttgcagtagcctctagttcgttagtcaaaacgtgaaaaaaaagacctgctttgccctgggaaatagtaaccctgccaaatacatcagcttgtaggagacagaggatgtgatggagctgcttgaagaagatctcacatgccctatttgttgtagtctgtttgatgatccacgggttttgccttgctcccacaacttctgcaaaaaatgcttagaaggtatcttagaagggagtgtgcggaattccttgtggagaccagctccattcaagtgtcctacatgccgtaaggaaacttcagctactggaattaatagcctgcaggttaattactccctgaagggtattgtggaaaagtataacaagatcaagatctctcccaaaatgccagtatgcaaaggacacttggggcagcctctcaacattttctgcctgactgatatgcagctgatttgtgggatctgtgctactcgtggggagcacaccaaacatgtcttctgttctattgaagatgcctatgctcaggaaagggatgcctttgagtccctcttccagagctttgagacctggcgtcggggagatgctctttctcgcttggataccttggaaactagtaagaggaaatccctacagttactgactaaagattcagataaagtgaaggaattttttgagaagttacaacacacactggatcaaaagaagaatgaaattctgtctgactttgagaccatgaaacttgctgttatgcaagcatatgacccagagatcaacaaactcaacaccatcttgcaggagcaacggatggcctttaacattgctgaggctttcaaagatgtgtcagaacccattgtatttctgcaacagatgcaggagtttagagagaaaatcaaagtaatcaaggaaactcctttacctccctctaatttgcctgcaagccctttaatgaagaactttgataccagtcagtgggaagacataaaactagtcgatgtggataaactttctttgcctcaagacactggcacattcattagcaagattccctggagcttttataagttatttttgctaatccttctgcttggccttgtcattgtctttggtcctaccatgttcctagaatggtcattatttgatgacctggcaacttggaaaggctgtctttcaaacttcagttcctatctgactaaaacagccgatttcatagaacaatcagttttttactgggaacaggtgacagatgggtttttcattttcaatgaaagattcaagaattttactttggtggtactgaacaatgtggcagaatttgtgtgcaaatataaactattataaaatctgtttcaagtatgcagttttcttttgttagaaattgttagagaatagagagtggtaattcagatttggtcaacgattctagtcacatattttcctccaaaagtattccttccaaaaataatctatacatgttcaaattaggtagcataaagataaaagtgaaatttagtagtataggcctgaacctttttttgtttaaaagagtgcttttgaaataagcatccaccccaaatgttggttgtatttatgctgtgataaaaataggtgagagatcatatgatctaatattgtattgatggaagtataggtagtatagtagtgattgttcttcaagcatgcagtaaagatcacttttttttttttttttttttttgagatggagtcttgctctgtcgcccaggctggagtgcagtgatgcaatcttggctcactgcagcctctacctcccaggttcaagtgattatcctgccttagcctcctgagtagctgggattacaggcgcgtgccaccacgcccagctaattttttgtatttttagttgagacagggtttcactgtcccttaagaccatcctgttagccaagatggtcttgatctcctgacctcgtgatccgcctgcctcggcctcccaaagtgctgggattacaggtgtgagccaccgtgcccagccaaagactgctcttaaagcacctttttgacagtgaacatggtctaaaaaagggaagatattgtagaagatttcacacacacacgcgtgtgtgggagacaactaaaggtattgaaggtactaattaattagatttccaaaattttctacagagagttaattatcaccaaaatgtgaatggtacatacaaaacctggcattttcttgtgataagtttacatttttaggagagtggagctttcaatctgcccttttctcctttgtttttgtagttttcaccaaagatgatcaactagaaatgttaagtggctatgcaagcaaaagcatagataggttaaaaaaaaggatcagctggctgggcagggtggctcatgtctataatctcagcattctaggacagtgatgtgggaggattatttgaggctaggagttccagttcgaaaccagcttcgtaaacatagcaagacccagtctctaccaaaaaaaaaaaaaaaaaaaaaaaaaaaaaaaatatatatatatatatacacacacacacacacatatgtacacatacatatatatacatatatatgtatatatagaacacatggcaagagcaggaaatgggaagactaccttttttctggcagctatgtgttgttttgttcgaaagatggcaagtgtacaaccaaaccaatccacttgcttacagaaagaatgtttagtgtagttaagactaatttgacaacagataaaacagtctgtcagctattacaaagtaatcagctgaacactaatgctgttctgtctgctcacaagagataaagataccctctcatggaataaacaccttgcttagaattcatataacaaagaagtaaccttataactgctctctagtctgccttatttgtgtcatagagtaagatattccttgaaagcccattaagtggaatagactttctgaaaataagagttctttacctcagtcctcctctaatttggttgagaggaggtaatgaaaatggggacaggataaaaggtggcaactaaatttaaagcacagaagaaatgatttccttctagctatgagaatagtcaaattgagcttgccaggctgtctcattcctaacatgtaattcatgatttagccactaaatttctaaggagatcataagaaattaagaaaaacgtttaagtctagcctctgcgtggtagacaggtatggggagggagaatgcttttcccctcccagtaataaaaaaaaaaaaaaaaaaaatatatatatatatatatatatatatatatatatatatatatatatatatatatatagttttactaggttttcatggataagtttttaaatgtaagacaggaaagggatctatttgatgtctatcttcagatatattggcagttttccttaagctatttagttcctcatctgttgctttttcattttgtatactgcaagttcccaggcaactcgaatttgcaaacacagccatggatacactatttaccttacagtagtttcctgggaatctaagtctggtttttgttattcttccctcccctccactgcataatcatgtataactagcaacatttatggttataggttgatttcctaagtgtggctgatggtagcctctagtttgaagtgagggaagaatgagtagtcaggaactggtcactttgaatgtgggagggaagatattcacgacaaggttttctacgataaagcagtttcctgcttctcgtttggcacgcatgttagatggcagagaccaagaattcaagatggttggtggccagatttttgtagacagagatggtgatttgtttagtttcatcttagattttttgagaactcaccagcttttattacccactgaattttcagactatcttaggcttcagagagaggctcttttctatgaacttcgttctctagttgatctcttaaacccatacctgctacagccaagacctgctcttgtggaggtacatttcctaagccggaacactcaagcttttttcagggtgtttggctcttgcagcaaaacaattgagatgctaacagggaggattacagtgtttacagaacaaccttcagcgccgacctggaatggtaactttttccctcctcagatgaccttacttccactgcctccacaaagaccttcttaccatgacctggttttccagtgtggttctgacagcactactgataaccaaactggagtcaggtattttgtactttgcagtatttctcttgtataccagtttgtgatgttttctctaaaaacttgaagttcctcaggcctgtaacttctggaaaagatgattattcaaaataatgttttggggtaaccagtggagttgggtagaatgaccaaataattattttccaaactgggatactttttagagtgaaaggggctattattaggtgggacaaaaggaataaatgaagactgcccagaaaaaactgagactatggacattcaaatcatgggagaaaataattttgtagattatgttccattgctaatgaatttgacttagaaaagaattgccttatttttaagagattgtttcagtggttcacataaaggctcgctcactggtttctcttgagttccttacacactatataagttgttctttcagttttatgattcaactactgtttttccttcagctgactttatttttaaacacccttaaagacagatatatctcatggcaaatttggtatcctgttacagccttggctcttaaacaactcaaaatattgggataggctgtcagtatgttaaggatagttgctcctgagtcaattcttcacttactccctctgttgttcttggctggatcctaacgctgatttccactctgctgtcacaaacatttttccccccgtaaaatgtcttaatgctgtcctaccattattttaccaactgtgaaagctggctttaatttttaggaggaaaagaaaagcctgcatgtgttctttattggtatcatttaaaatatacttttttttttttttttggtaaaggtaggcgtattttaagatattttcttaacttgagcagtagccaacaggaaggataccagtgtctctctctcttagcgacacactccttggtcttgcttaccaactggaggacactaggtagaataaccgagtatgacaattcttaattgtttacattttataacttcctgtccttcaaaagagtttgaaatgtcattttgggaaaagagagccagtcaagctagtaggctgattgtgaagaaaatctaataccttatctttatctcaaacctctgtacaactttattttcattgatgggatactttaacaaaaatgaaattttttttggtttttaaaatatgagtgattatgacctctttggggatcatgcttcaaaaagtcagaaacctagagacaaaactgtcattgatttttaagaagaaacacactaggtcaaaagaagatgtcctggaaatatgaagtactctttaaaaaccatgcatttggagaaagtaattgtttccttgaaaaacatgattaaaaactaaaactgggatgttcctgtgtgtacacagtgccaaatggttttccctttttatgttgtgttttagaaacagcacgaaagttttttccattttaaagtgagaaaacattatatttagacttccataattccaaaatcagaagctatttttaaaattagcattttcttgcatcaccaaatggtattcaattgtttgaagctcaaaatttttaccattccataaatgtttgtgaatttttagacagtgccaatttaaaagtagagatagccaatctgaatacggtgaaattatggggatctctggtgattgggatgaaaactctggccttaaaaggtccacttttagtatataattgcctaattagcaatcatttttattttttgctcactccctggtctgaatctatctgtctattcagatattttttggtaggtttggaaaatggagaagtgagcctaattggtgcctaattgtctggtgtatcattcactttattcagtttgttctatcaatatgatttacccctcaaggttaacctagcaggttgctcagttattatctctcaaggtcacagtactagaaatacttggcttgcatctttcagatgccattcatgttatcaagctcaaattatagttggtcacaggattctaaagtctttatttgacttctcctttttgaactggctcaaatggaaaagtgtagttgcttttaaatgttaaaaataagtttaaactttatatttcccattggtttcccctattttgtcctttctttgtgtgcttgaaatattttatttttcagtttgtcctcatagggaatcaagtattttagctaggtgatgtcttgcaagtacgttccactttgttacaatctactatctgtatatactatttgtatcttaattcttttatgagatgttctgtaacatttttctcactttgacaaatgtttttagactgtacagtcaagatctggcgcttgggggtaagtggaatgatttgctaatattgagaatctgttgtatcaaacataataaa

SEQ ID NO: 32528 - DNA, 1251 bp, Homo sapiens
  source 1..1251: mol_type = unassigned DNA
cttaattgcacggcagcttaactgggagactttcttcccgggcggccccacccgggaccgcgccgcttcagtcgagcccaccgtctgggcaaacggcgtccacttcccggagccgctgcccagcctctgcgggggggctttgggcgggcgcaggactctggaagggagaaaagcccgcagcccggccctccccgtcccaggcggcccgcgcgggtggacggcgggagcaggcggcggttggagacgccggaaggaacgcggtctcaccacccggctccctccgccaaggcgaggcgcggccggggaggcgggacacaggcgaagcgggacggggaggcggggccggagtagcctctagttcgttagtcaaaacgtgaaaaaaaagacctgctttgccctgggaaatagtaaccctgccaaatacatcagcttgtaggagacagaggatgtgatggagctgcttgaagaagatctcacatgccctatttgttgtagtctgtttgatgatccacgggttttgccttgctcccacaacttctgcaaaaaatgcttagaaggtatcttagaagggagtgtgcggaattccttgtggagaccagctccattcaagtgtcctacatgccgtaaggaaacttcagctactggaattaatagcctgcaggttaattactccctgaagggtattgtggaaaagtataacaagatcaagatctctcccaaaatgccagtatgcaaaggacacttggggcagcctctcaacattttctgcctgactgatatgcagctgatttgtgggatctgtgctactcgtggggagcacaccaaacatgtcttctgttctattgaagatgcctatgctcaggaaagggatgcctttgagtccctcttccagagctttgagacctggcgtcggggagatgctctttctcgcttggataccttggaaactagtaagaggaaatccctacagttactgactaaagattcagataaagtgaaggaattttttgagaagttacaacacacactggatcaaaagaagaatgaaattctgtctgactttgagaccatgaaacttgctgttatgcaagcatatgacccagagatcaacaaactcaacaccatcttgcaggagcaacggatggcctttaacattgctgaggctttcaaagatgtgtcagaacccattgtatttctgcaacagatgcaggagtttagagagaaaatcaaagtaatcaaggaaactccttt

SEQ ID NO: 32529 - DNA, 2607 bp, Homo sapiens
  source 1..2607: mol_type = unassigned DNA
ggggcggagctagccggagccgcgagtccattttggggctgtgcttggcgcgtaccgtgcggtccctgtagttggaggacgggcggtcgcgcggcctttcccactagccggagtagcctctagttcgttagtcaaaacgtgaaaaaaaagacctgctttgccctgggaaatagtaaccctgccaaatacatcagcttgtaggagacagaggatgtgatggagctgcttgaagaagatctcacatgccctatttgttgtagtctgtttgatgatccacgggttttgccttgctcccacaacttctgcaaaaaatgcttagaaggtatcttagaagggagtgtgcggaattccttgtggagaccagctccattcaagtgtcctacatgccgtaaggaaacttcagctactggaattaatagcctgcaggttaattactccctgaagggtattgtggaaaagtataacaagatcaagatctctcccaaaatgccagtatgcaaaggacacttggggcagcctctcaacattttctgcctgactgatatgcagctgatttgtgggatctgtgctactcgtggggagcacaccaaacatgtcttctgttctattgaagatgcctatgctcaggaaagggatgcctttgagtccctcttccagagctttgagacctggcgtcggggagatgctctttctcgcttggataccttggaaactagtaagaggaaatccctacagttactgactaaagattcagataaagtgaaggaattttttgagaagttacaacacacactggatcaaaagaagaatgaaattctgtctgactttgagaccatgaaacttgctgttatgcaagcatatgacccagagatcaacaaactcaacaccatcttgcaggagcaacggatggcctttaacattgctgaggctttcaaagatgtgtcagaacccattgtatttctgcaacagatgcaggagtttagagagaaaatcaaagtaatcaaggaaactcctttacctccctctaatttgcctgcaagccctttaatgaagaactttgataccagtcagtgggaagacataaaactagtcgatgtggataaactttctttgcctcaagacactggcacattcattagcaagattccctggagcttttataagttatttttgctaatccttctgcttggccttgtcattgtctttggtcctaccatgttcctagaatggtcattatttgatgacctggcaacttggaaaggctgtctttcaaacttcagttcctatctgactaaaacagccgatttcatagaacaatcagttttttactgggaacaggtgacagatgggtttttcattttcaatgaaagattcaagaattttactttggtggtactgaacaatgtggcagaatttgtgtgcaaatataaactattataaaatctgtttcaagtatgcagttttcttttgttagaaattgttagagaatagagagtggtaattcagatttggtcaacgattctagtcacatattttcctccaaaagtattccttccaaaaataatctatacatgttcaaattaggtagcataaagataaaagtgaaatttagtagtataggcctgaacctttttttgtttaaaagagtgcttttgaaataagcatccaccccaaatgttggttgtatttatgctgtgataaaaataggtgagagatcatatgatctaatattgtattgatggaagtataggtagtatagtagtgattgttcttcaagcatgcagtaaagatcacttttttttttttttttttttttgagatggagtcttgctctgtcgcccaggctggagtgcagtgatgcaatcttggctcactgcagcctctacctcccaggttcaagtgattatcctgccttagcctcctgagtagctgggattacaggcgcgtgccaccacgcccagctaattttttgtatttttagttgagacagggtttcactgtcccttaagaccatcctgttagccaagatggtcttgatctcctgacctcgtgatccgcctgcctcggcctcccaaagtgctgggattacaggtgtgagccaccgtgcccagccaaagactgctcttaaagcacctttttgacagtgaacatggtctaaaaaagggaagatattgtagaagatttcacacacacacgcgtgtgtgggagacaactaaaggtattgaaggtactaattaattagatttccaaaattttctacagagagttaattatcaccaaaatgtgaatggtacatacaaaacctggcattttcttgtgataagtttacatttttaggagagtggagctttcaatctgcccttttctcctttgtttttgtagttttcaccaaagatgatcaactagaaatgttaagtggctatgcaagcaaaagcatagataggttaaaaaaaaggatcagctggctgggcagggtggctcatgtctataatctcagcattctaggacagtgatgtgggaggattatttgaggctaggagttccagttcgaaaccagcttcgtaaacatagcaagacccagtctctaccaaaaaaaaaaaaaaaaaa

SEQ ID NO: 32530 - DNA, 692 bp, Homo sapiens
  source 1..692: mol_type = unassigned DNA
acttctcccaagatcgtaaattctggaggagccattccttcatcatccatgtttgcatccttcacaccgttcactggttaagtgcttatagcctctagttcgttagtcaaaacgtgaaaaaaaagacctgctttgccctgggaaatagtaaccctgccaaatacatcagcttgtaggagacagagaataacagcacctggccgggtgcagtggctcaggcctgtaatcgcagcactttgggaggctgaggtgggcggatcacctgaggtcaggagctcgagaccagcctggccaaaatggatgtgatggagctgcttgaagaagatctcacatgccctatttgttgtagtctgtttgatgatccacgggttttgccttgctcccacaacttctgcaaaaaatgcttagaaggtatcttagaagggagtgtgcggaattccttgtggagaccagctccattcaagtgtcctacatgccgtaaggaaacttcagctactggaattaatagcctgcaggttaattactccctgaagggtattgtggaaaagtataacaagatcaagatctctcccaaaatgccagtatgcaaaggacacttggggcagcctctcaacattttctgcctgactgatatgcagctgatttgtgggatctgtgctactcgtggggagcacaccaaacatgtcttctgt

SEQ ID NO: 32531 - DNA, 1489 bp, Homo sapiens
  source 1..1489: mol_type = unassigned DNA
gtgcttggcgcgtaccgtgcggtccctgtagttggaggacgggcggtcgcgcggcctttcccactagccggaggtcggagataagtacccgccgcccggctcctctcgggaaagcggggtggtcctcgaaccttcagcgagggtggggagttgcccagtagcctctagttcgttagtcaaaacgtgaaaaaaaagacctgctttgccctgggaaatagtaaccctgccaaatacatcagcttgtaggagacagaggatgtgatggagctgcttgaagaagatctcacatgccctatttgttgtagtctgtttgatgatccacgggttttgccttgctcccacaacttctgcaaaaaatgcttagaaggtatcttagaagggagtgtgcggaattccttgtggagaccagctccattcaagtgtcctacatgccgtaaggaaacttcagctactggaattaatagcctgcaggttaattactccctgaagggtattgtggaaaagtataacaagatcaagatctctcccaaaatgccagtatgcaaaggacacttggggcagcctctcaacattttctgcctgactgatatgcagctgatttgtgggatctgtgctactcgtggggagcacaccaaacatgtcttctgttctattgaagatgcctatgctcaggaaagggatgcctttgagtccctcttccagagctttgagacctggcgtcggggagatgctctttctcgcttggataccttggaaactagtaagaggaaatccctacagttactgactaaagattcagataaagtgaaggaattttttgagaagttacaacacacactggatcaaaagaagaatgaaattctgtctgactttgagaccatgaaacttgctgttatgcaagcatatgacccagagatcaacaaactcaacaccatcttgcaggagcaacggatggcctttaacattgctgaggctttcaaagatgtgtcagaacccattgtatttctgcaacagatgcaggagtttagagagaaaatcaaagtaatcaaggaaactcctttacctccctctaatttgcctgcaagccctttaatgaagaactttgataccagtcagtgggaagacataaaactagtcgatgtggataaactttctttgcctcaagacactggcacattcattagcaagattccctggagcttttataagttatttttgctaatccttctgcttggccttgtcattgtctttggtcctaccatgttcctagaatggtcattatttgatgacctggcaacttggaaaggctgtctttcaaacttcagttcctatctgactaaaacagccgatttcatagaacaatcagttttttactgggaacaggtgacagatgggtttttcattttcaatgaaagattcaagaattttactttggtggtactgaacaatgtggcagaatttgtgtgcaaatataaactattataaaatc

SEQ ID NO: 32532 - DNA, 2387 bp, Homo sapiens
  source 1..2387: mol_type = unassigned DNA
ataacggccgaggagggggcgtgcctggccgtggccagtggcgggttacaacctggaaaccaaaggtgccccagagggcgtctaagcggtcgaccgaaagttcagagcgggagcctgagacccaaggaagggcaaaggcgagccaaagccatcagttgagcttcagaaaagtcccacttgaaaggctggaaaagcaagtcacaggcaagacttgtcctagataaagtaaagtgtgaggaaggggtgcaaatcaagattagaggcatacctgatgtggacctccgaggatcagagatgtcctagtcccagctcatccaccaacttgccatatgactttgggcaagttacctcaccttcagatgcctccattggaaaagaatacaaggaaactcagccaagaaattcattgataaaaacacgcagcttaccctccaggtgtacagggaacaagctgactcttgcagagagcaacttgacatcatgaatgatctctccaacagggtctggagtatcagccaggagcccgatcctgtccagaggcttcaggcatacacggccaccgagcaggagatgcagcagcagatgagcctcggggagctgtgccatcccgtgcccctctcctttgagcccgtcaagagcttctttaagggcctcgtggaagccgtggagagtacattacagacgccattggacattcgccttaaggaaagcataaactgccagctctcagacccttccagcaccaagccaggtaccttgttgaaaaccagcccctcaccagagcgatcgctattgctgaaatcctgctgggcagcctggggcccgtgcccgtgctgcggttcgacgcgctctggcaagtgctggctcgtgactgcttcgccaccggccgccactactgggaggttgacgtgcaggaggcgggcgccggctggtgggtgggcgcggcctacgcctcccttcggcgccgcggggcctcggccgccgcccgcctgggctgcaaccgccagtcctggtgcctcaagcgctacgaccttgagtactgggccttccacgacggccagcgcagccgcctgcggccccgcgacgacctcgaccggctcggcgtcttcctggactacgaggccggcgtcctcgccttctacgacgtgacgggcggcatgagccacctgcataccttccgcgccacgttccaggagccgctctacccggccctgcggctctgggagggggccatcagcatcccccggctgccctaggggccaggaccggcgtgacagcctccagataaggaaaattattagtgtctccagatccaactttgaaaaatggaacattcagttcatgcaggaattcaactgccatctacaaaaatcaaagagggagctccttttcaccattgtccaaaaacactgttgttatgacaggcaaggaataacatacaagtagaaaaacccctcatcttaggcagtagagggacgctcagcaacttgaaagcaggcaaagatttgttctcagtcatttcattcaaatgcaaacattcatttgcatccacccatccattagcccaacaaacgtttggtgctggtctttgctggctacaggaatctggaaaagggctgggcgtggtggctcatgcctgcactttgggaggccgaggcgggcagatcacctgaggtcaggagtttgagactagcctgaccaacatggtgaaaccccgtctctactaaaaatataaaaattagccgggtgtggtggcgggcacctgtgatcccagctactcagaaggctgaggcaggagaatcacttgaacctgggaggcggaggttgcagtgagctgagatcatgccactgcactccagcctgggccacagagcgagactccatctcaaaaaaaaaaaagaatctggaaaagaacctttcccctggccagaccctacctgccccaggggcccaaggccaaatgaacaaacatgaaacggtcatgacctaatcctgacccagaaaaccaggcagtgaaaacatgaatagcctcaaaggctttcccttctactcggccaaacgagcaggaaaaggggctatttcaattcttggcgaaagggggaaaatggagcatttttttgcccagcctctacataaggatccatggctggcagggcccattcaacccgagccctttcaggcctcaaagcacgctgcctacttaaaagtgaacctcagtcacttttttcagatataacgtcactgcttgaggttacctatttagtgctcttcaacatccttctctagtattcatcaacaagactcaggaaattggtaaatgtcagcaaatgcttgctgaaggaatcagtggatcacaagttataagagtaaaatctcagtttgctgtc

SEQ ID NO: 32533 - DNA, 4454 bp, Homo sapiens
  source 1..4454: mol_type = unassigned DNA
gtggagatgaatggcgggcgcggcgaccgggagccggacccctgggaggtcggagcttgtcgagggatgcggctggcgctgcccggagcatggcgaccgcgtggctgagctcttctgtcgccgctgccgccgctgcgtgtgcgcgctttgcccggtgctgggcgcgcaccgtggccaccctgtgggcctggcgctggaggcagcggtgcacgtgcagaaactcagccaagaatgtttaaagcagctggcaatcaagaagcagcagcacattgacaacataacccagatagaagatgccaccgagaagctcaaggctaatgcagagtcaagtaaaacctggctgaaggggaaattcactgaactcagattactacttgacgaagaggaagcgctggccaagaaattcattgataaaaacacgcagcttaccctccaggtgtacagggaacaagctgactcttgcagagagcaacttgacatcatgaatgatctctccaacagggtctggagtatcagccaggagcccgatcctgtccagaggcttcaggcatacacggccaccgagcaggagatgcagcagcagatgagcctcggggagctgtgccatcccgtgcccctctcctttgagcccgtcaagagcttctttaagggcctcgtggaagccgtggagagtacattacagacgccattggacattcgccttaaggaaagcataaactgccagctctcagacccttccagcaccaagccaggtaccttgttgaaaaccagcccctcaccagagcgatcgctattgctgaaatacgcgcgcacgcccacgctggatcctgacacgatgcacgcgcgcctgcgcctgtccgccgatcgcctgacggtgcgctgcggcctgctgggcagcctggggcccgtgcccgtgctgcggttcgacgcgctctggcaagtgctggctcgtgactgcttcgccaccggccgccactactgggaggttgacgtgcaggaggcgggcgccggctggtgggtgggcgcggcctacgcctcccttcggcgccgcggggcctcggccgccgcccgcctgggctgcaaccgccagtcctggtgcctcaagcgctacgaccttgagtactgggccttccacgacggccagcgcagccgcctgcggccccgcgacgacctcgaccggctcggcgtcttcctggactacgaggccggcgtcctcgccttctacgacgtgacgggcggcatgagccacctgcataccttccgcgccacgttccaggagccgctctacccggccctgcggctctgggagggggccatcagcatcccccggctgccctaggggccaggaccggcgtgacagcctccaggtacgccgcagctgcccagtctcgcctaatctacctagatcagcgtggctggtccccttactgcctgcttcttagggccctctccctgccccagctttccccgaccaatcacgcctacagtgctttgaaggtttcctctcctaggctagtttcaaacaggccctaaacaagtctgctgctgccctctcatcagacctccgcaccctcaccccaccatcacttacactactttaatccagttccttcaaagtgatacccccacaggtaagccctcagcatcctgaatacatcatccgcagcctgggaaccttctccctcgtacagcacaggaacctgacacatagtaggcacacagtaaacgtttgtgaatgaatgggagtcatccagtcctgactcttctgtctcttgaggtcccttgaatcttccgcttcctccccaccgatttcagcgtgtccacatcacagctccctccagaagctgcaagagcttcttagcagttcctggtctgaaccctctcccagtcctcatcttccaccctaaaactagagtgatcttcctaaaacttcacttaacccctcagctatgaaaaggcttccaggagtttccatgaaataacaaaaaaaaatacaagcgcctcaccttagcattcaaggcttgtctagtctgcccaaaattacttatcctcacctagctcctaccactcttcttagagactctccagtcagaaatgtgtcgcatagttccacctccacacctctctgctgccagcacattcatgcagaaaagtcttttcacctgtctcagtcttccgcaggcttacctgcgccaggaagtctaaccaaggaacaagaatctcactatcagagccacaaatctgggacctgtctttccaactaaattggaggctttggaagggcagctttgtcctatactctctccaccctgaaaagttcccagaaagccccttccctcccaagcagtgaattaataaccagcaggtgcctatcactgagtaacagaagagctgagttaggcgggcctcacaggtcacccagccagatctcatctggggagtctgaggtcctgaaagaaagcagagctgcgtaaagttaccccggggtgatataggggggccagacgtgtgccccgttcacccacccccaggcaagcatctgacctgtcccctggcccagcccttaggcccagctttcaacctgcttactcatttctcaggggattttgggaaggaatcagcaggtgacagttgctaagcaaccaaagggggtggtgtttcccaactgtcttgggacaaaaagggtaagagcacccttagatccagatgttgccaaggaaacccagagtgcccagctgtctggaatgaagtgacagaggtagaaaacagtaggccctcacaggaggccaccttcgctagcagggagtgggaggcttctttccagggatttgtgtctccgttctgaaggttctgcgtcctgttttgtcaattccctagacggttttgaagttatattctgttaaagcatcttcataggtgcttggtgggaggccaaggtcgccgaatcctcgtggtttaaatagactttcagtgcattagtttgaaccatataaaactgacaattttcaatagtttttgagttaaaaatggcacttttgatatgagacaatgtagcagaataccaggcagacagaaccttgcaaacaccttaacttctaaccaaagactttaaaactctggctggacagagttttaagcactatgctgcaggaatcctgagaaaaaggggaaattaattctattaggaatggcccaaactgaattgtgacaggcagagggtgttcctgacagagggaagatgaatacacttgaccccaacatttctgcccatccctgatgaccaagacctcttcccagacccacagctgcaggggccaagtaataacagctcttaatagtttataatgcactgttttaatgctttacgactaaactcatctgatcctttcatcagccctagagggtagaaagttttcccaattctacacatggcaaaatggagacccagagtcacttgcccaaggtcgcacagctagtggtggagctggagtctgggcccaggctgtgagttccaggtctgtgctcatggccaccaggccctactgctcagggtgaatgcagctggtctctggccagtgcctggtgctctggcccctctcgtggagctactgcccatgatgctttcctagtgcctggttactctgcgagacttgagtctacctttggactgccttccttgggggtctgagatgaggccttatggcccagaggggaacttgattcaaaaatttgggattcatgtagcagagacagagctagactgtaaaggtcacaaactagctgtgtcaaggcccgtgatagccagaaagcggcagtttcagtccatatcaattgtgtgaccagggctagtcactttttacttctcagtgccatctataaaatggggataatagcactacctaccaagtgctgtgaggctcaaatgagccaaaggttataaacttgccttaaaactatagtcctatacaaaaattagctgggcgtggtggtgcatgcctgtaatcccagctactagggaggctgaggcaagagagttgcttgaacccaggaggcggagattgcagtgagctgagattgcaccactgcactccagcctggggacagagcaagactcttgtctcaaaaaaaacaaaaaaaacatatatactgctgtatcatgccaggatttatcagcattcccaagggagcttgcacggtactgaccgagtgctgagactactggtattcccagctgccatgtggcagcagcaggagctactagaatattctcagcacaggaatgaggcttccttggtttccatgtctgtaagggttactgatcacttaccttcttctctttcagacttgaatctgtagacatttctttattgatatggcaaattgcttgcagatatttttaaatgacagcaattttctaatatttggtttaataaaatgtgaataatgtccctttt

SEQ ID NO: 32534 - DNA, 1479 bp, Homo sapiens
  source 1..1479: mol_type = unassigned DNA
gtggagatgaatggcgggcgcggcgaccgggagccggacccctgggaggtcggagcttgtcgagggatgcggctggcgctgcccggagcatggcgaccgcgtggctgagctcttctgtcgccgctgccgccgctgcgtgtgcgcgctttgcccggtgctgggcgcgcaccgtggccaccctgtgggcctggcgctggaggcagcggtgcacgtgcagaaactcagccaagaatgtttaaagcagctggcaatcaagaagcagcagcacattgacaacataacccagatagaagatgccaccgagaagctcaaggctaatgcagagtcaagtaaaacctggctgaaggggaaattcactgaactcagattactacttgacgaagaggaagcgctggccaagaaattcattgataaaaacacgcagcttaccctccaggtgtacagggaacaagctgactcttgcagagagcaacttgacatcatgaatgatctctccaacagggtctggagtatcagccaggagcccgatcctgtccagaggcttcaggcatacacggccaccgagcaggagatgcagcagcagatgagcctcggggagctgtgccatcccgtgcccctctcctttgagcccgtcaagagcttctttaagggcctcgtggaagccgtggagagtacattacagacgccattggacattcgccttaaggaaagcataaactgccagctctcagacccttccagcaccaagccaggtaccttgttgaaaaccagcccctcaccagagcgatcgctattgctgaaatacgcgcgcacgcccacgctggatcctgacacgatgcacgcgcgcctgcgcctgtccgccgatcgcctgacggtgcgctgcggcctgctgggcagcctggggcccgtgcccgtgctgcggttcgacgcgctctggcaagtgctggctcgtgactgcttcgccaccggccgccactactgggaggttgacgtgcaggaggcgggcgccggctggtgggtgggcgcggcctacgcctcccttcggcgccgcggggcctcggccgccgcccgcctgggctgcaaccgccagtcctggtgcctcaagcgctacgaccttgagtactgggccttccacgacggccagcgcagccgcctgcggccccgcgacgacctcgaccggctcggcgtcttcctggactacgaggccggcgtcctcgccttctacgacgtgacgggcggcatgagccacctgcataccttccgcgccacgttccaggagccgctctacccggccctgcggctctgggagggggccatcagcatcccccggctgccctaggggccaggaccggcgtgacagcctccagacttgaatctgtagacatttctttattgatatggcaaattgcttgcagatatttttaaatgacagcaattttctaatatttggtttaataaaatgtgaataatgtccctttt

SEQ ID NO: 32535 - DNA, 1478 bp, Homo sapiens
  source 1..1478: mol_type = unassigned DNA
gtggagatgaatggcgggcgcggcgaccgggagccggacccctgggaggtcggagcttgtcgagggatgcggctggcgctgcccggagcatggcgaccgcgtggctgagctcttctgtcgccgctgccgccgctgcgtgtgcgcgctttgcccggtgctgggcgcgcaccgtggccaccctgtgggcctggcgctggaggcagcggtgcacgtgcagaaactcagccaagaatgtttaaagcagctggcaatcaagaagcagcagcacattgacaacataacccagatagaagatgccaccgagaagctcaaggctaatgcagagtcaagtaaaacctggctgaaggggaaattcactgaactcagattactacttgacgaagaggaagcgctggccaagaaattcattgataaaaacacgcagcttaccctccaggtgtacagggaacaagctgactcttgcagagagcaacttgacatcatgaatgatctctccaacagggtctggagtatcagccaggagcccgatcctgtccagaggcttcaggcatacacggccaccgagcaggagatgcagcagcagatgagcctcggggagctgtgccatcccgtgcccctctcctttgagcccgtcaagagcttctttaagggcctcgtggaagccgtggagagtacattacagacgccattggacattcgccttaaggaaagcataaactgccagctctcagacccttccagcaccaagccaggtaccttgttgaaaaccagcccctcaccagagcgatcgctattgctgaaatacgcgcgcacgcccacgctggatcctgacacgatgcacgcgcgcctgcgcctgtccgccgatcgcctgacggtgcgctgcggcctgctgggcagcctggggcccgtgcccgtgctgcggttcgacgcgctctggcaagtgctggctcgtgactgcttcgccaccggccgccactactgggaggttgacgtgcaggaggcgggcgccggctggtgggtgggcgcggcctacgcctcccttcggcgccgcggggcctcggccgccgcccgcctgggctgcaaccgccagtcctggtgcctcaagcgctacgaccttgagtactgggccttccacgacggccagcgcagcgcctgcggccccgcgacgacctcgaccggctcggcgtcttcctggactacgaggccggcgtcctcgccttctacgacgtgacgggcggcatgagccacctgcataccttccgcgccacgttccaggagccgctctacccggccctgcggctctgggagggggccatcagcatcccccggctgccctaggggccaggaccggcgtgacagcctccagacttgaatctgtagacatttctttattgatatggcaaattgcttgcagatatttttaaatgacagcaattttctaatatttggtttaataaaatgtgaataatgtccctttt

SEQ ID NO: 32536 - DNA, 780 bp, Homo sapiens
  source 1..780: mol_type = unassigned DNA
cggaggaggtggagatgaatggcgggcgcggcgaccgggagccggacccctgggaggtcggagcttgtcgagggatgcggctggcgctgcccggagcatggcgaccgcgtggctgagctcttctgtcgccgctgccgccgctgcgtgtgcgcgctttgcccggtgctgggcgcgcaccgtggccaccctgtgggcctggcgctggaggcagcggtgcacgtgcagaaactcagccaagaatgtttaaagcagctggcaatcaagaagcagcagcacattgacaacataacccagatagaagatgccaccgagaagctcaaggctaatgcagagtcaagtaaaacctggctgaaggggaaattcactgaactcagattactacttgacgaagaggaagcgctggccaagaaattcattgataaaaacacgcagcttaccctccaggtgtacagggaacaagctgactcttgcagagagcaacttgacatcatgaatgatctctccaacagggtctggagtatcagccaggagcccgatcctgtccagaggcttcaggcatacacggccaccgagcaggagatgcagcagcagatgagcctcggggagctgtgccatcccgtgcccctctcctttgagcccgtcaagagcttctttaagggcctcgtggaagccgtggagagtacattacagacgccattggacattcgcctttccccgaccaatcacgcctacagtgctttgaaggtttcctctcctaggctagtttcaaacaggccctaa

SEQ ID NO: 32537 - DNA, 1792 bp, Homo sapiens
  source 1..1792: mol_type = unassigned DNA
gagccggaggaggtggagatgaatggcgggcgcggcgaccgggagccggacccctgggaggtcggagcttgtcgagggatgcggctggcgctgcccggagcatggcgaccgcgtggctgagctcttctgtcgccgctgccgccgctgcgtgtgcgcgctttgcccggtgctgggcgcgcaccgtggccaccctgtgggcctggcgctggaggcagcggtgcacgtgcagaaactcagccaagaatgtttaaagcagctggcaatcaagaagcagcagcacattgacaacataacccagatagaagatgccaccgagaagctcaaggctaatgcagagtcaagtaaaacctggctgaaggggaaattcactgaactcagattactacttgacgaagaggaagcgctggccaagaaattcattgataaaaacacgcagcttaccctccaggtgtacagggaacaagctgactcttgcagagagcaacttgacatcatgaatgatctctccaacagggtctggagtatcagccaggagcccgatcctgtccagaggcttcaggcatacacggccaccgagcaggagatgcagcagcagatgagcctcggggagctgtgccatcccgtgcccctctcctttgagcccgtcaagagcttctttaagggcctcgtggaagccgtggagagtacattacagacgccattggacattcgccttaaggaaagcataaactgccagctctcagacccttccagcaccaagccaggtaccttgttgaaaaccagcccctcaccagagcgatcgctattgctgaaatacgcgcgcacgcccacgctggatcctgacacgatgcacgcgcgcctgcgcctgtccgccgatcgcctgacggtgcgctgcggcctgctgggcagcctggggcccgtgcccgtgctgcggttcgacgcgctctggcaagtgctggctcgtgactgcttcgccaccggccgccactactgggaggttgacgtgcaggaggcgggcgccggctggtgggtgggcgcggcctacgcctcccttcggcgccgcggggcctcggccgccgcccgcctgggctgcaaccgccagtcctggtgcctcaagcgctacgaccttgagtactgggccttccacgacggccagcgcagccgcctgcggccccgcgacgacctcgaccggctcggcgtcttcctggactacgaggccggcgtcctcgccttctacgacgtgacgggcggcatgagccacctgcataccttccgcgccacgttccaggagccgctctacccggccctgcggctctgggagggggccatcagcatcccccggctgccctaggggccaggaccggcgtgacagcctccagaatgtcatggaagcagaatcgtacagtatgttcccttctgcatatgctgctttctcactcagcatcatttccttgagatgcatccaggctgctgcacgcatcaatagttcattcctggctgggcgcggtggctcacgcctgtaatcccagcgctttgggaggccgatgtgggtggatcacaaggtcaggagtttgagactagcctggccaagatggtgaaaccccatctctgcaaaaaatacaaaaattagccgggcaccatggcatgtgcctgtaatccctgctactcaggaggctgaggaaggagaatcacttgaacccgggcagcggaggttgcagtgagccgagatcacaccactgcactccagcctgggcaatagagtgagactccgtttcaaaaaaaaaaagaaaaa

SEQ ID NO: 32538 - DNA, 1336 bp, Homo sapiens
  source 1..1336: mol_type = unassigned DNA
agatctctacaggcccctgtgatgagtgctgggagtgatgggggcggaaggcacttctgcggaggcataaactgccagctctcagacccttccagcaccaagccaggtaccttgttgaaaaccagcccctcaccagagcgatcgctattgctgaaatacgcgcgcacgcccacgctggatcctgacacgatgcacgcgcgcctgcgcctgtccgccgatcgcctgacggtgcgctgcggcctgctgggcagcctggggcccgtgcccgtgctgcggttcgacgcgctctggcaagtgctggctcgtgactgcttcgccaccggccgccactactgggaggttgacgtgcaggaggcgggcgccggctggtgggtgggcgcggcctacgcctcccttcggcgccgcggggcctcggccgccgcccgcctgggctgcaaccgccagtcctggtgcctcaagcgctacgaccttgagtactgggccttccacgacggccagcgcagccgcctgcggccccgcgacgacctcgaccggctcggcgtcttcctggactacgaggccggcgtcctcgccttctacgacgtgacgggcggcatgagccacctgcataccttccgcgccacgttccaggagccgctctacccggccctgcggctctgggagggggccatcagcatcccccggctgccctaggggccaggaccggcgtgacagcctccaggtacgccgcagctgcccagtctcgcctaatctacctagatcagcgtggctggtccccttactgcctgcttcttagggccctctccctgccccagctttccccgaccaatcacgcctacagtgctttgaaggtttcctctcctaggctagtttcaaacaggccctaaacaagtctgctgctgccctctcatcagacctccgcaccctcaccccaccatcacttacactactttaatccagttccttcaaagtgatacccccacaggtaagccctcagcatcctgaatacatcatccgcagcctgggaaccttctccctcgtacagcacaggaacctgacacatagtaggcacacagtaaacgtttgtgaatgaatgggagtcatccagtcctgactcttctgtctcttgaggtcccttgaatcttccgcttcctccccaccgatttcagcgtgtccacatcacagctccctccagaagctgcaagagcttcttagcagttcctggtctgaaccctctcccagtcctcatcttccaccctaaaactagagtgatcttcctaaaacttcacttaacccctcagctatgaaaaggcttccaggagtttccatgaaataa

SEQ ID NO: 32539 - DNA, 6735 bp, Homo sapiens
  source 1..6735: mol_type = unassigned DNA
cccagttgtctgcgggctgcggggagctaagtccccagattggaggaggctggctctggtcttcgatgcacaggagtggccgttatggaacgcagcagcagcgtgcagggtcaaagacagccggccccccatgtcagtggtctaggatggccagtgaaggcaccaacatcccaagtcctgtggtgcgccagattgacaagcagtttctgatttgcagtatatgcctggaacggtacaagaatcccaaggttctcccctgtctgcacactttctgcgagaggtgcctgcagaactacattcctgcccacagtttaaccctctcctgcccagtgtgccgccagacctccatcctgcccgagaaaggggtggccgcgctccagaacaatttcttcatcacaaacctgatggacgtgctgcagcgaactccaggcagcaacgctgaggagtcttccatcctggagacagtcactgctgtggctgcgggaaagcctctctcttgcccaaaccacgatgggaatgtgatggaattttactgccagtcctgtgagactgccatgtgtcgggagtgcacggagggggagcacgcagagcaccccacagttccactcaaggatgtggtggaacagcacaaggcctcgctccaggtccagctggatgctgtcaacaaaaggctcccagaaatagattctgctcttcagttcatctctgaaatcattcatcagttaaccaaccaaaaggccagcatcgtggatgacattcattccacctttgatgagctccagaagactttaaatgtgcgcaagagtgtgctgcttatggaattggaggtcaactatggcctcaaacacaaagtcctccagtcgcagctggatactctgctccaggggcaggagagcattaagagctgcagcaacttcacagcgcaggccctcaaccatggcacggagaccgaggtcctactggtgaagaagcagatgagcgagaagctgaacgagctggccgaccaggacttccccttgcacccgcgggagaacgaccagctggatttcatcgtggaaaccgaggggctgaagaagtccatccacaacctcgggacgatcttaaccaccaacgccgttgcctcagagacagtggccacgggcgaggggctgcggcagaccatcatcgggcagcccatgtccgtcaccatcaccaccaaggacaaagacggtgagctgtgcaaaaccggcaacgcctacctcaccgccgaactgagcacccccgacgggagcgtggcagacggggagatcctggacaacaagaacggcacctatgagtttttgtacactgtccagaaggaaggggactttaccctgtctctgagactctatgaccagcacatccgaggcagcccgtttaagctgaaagtgatccgatccgctgatgtgtctcccaccacagaaggcgtgaagaggcgcgttaagtccccggggagcggccacgtcaagcagaaagctgtgaaaagacccgcaagcatgtacagcactggaaaacgaaaagagaatcccatcgaagacgatttgatctttcgagtgggtaccaaaggaagaaataaaggagagtttacaaatcttcagggggtagctgcatctacaaatggaaagatattaattgcagacagtaacaaccaatgtgtgcagatattttccaatgatggccagttcaaaagtcgttttggcatacggggacgctctccggggcagctgcagcggcccacaggagtggctgtacatcccagtggggacataatcattgccgattatgataataaatgggtcagcattttctcctccgatgggaaatttaagacaaaaattggatcaggaaagctgatgggacccaaaggagtttctgtggaccgcaatgggcacattattgttgtggacaacaaggcgtgctgcgtgtttatcttccagccaaacgggaaaatagtcaccaggtttggtagccgaggaaatggggacaggcagtttgcaggtccccattttgcagctgtaaatagcaataatgagattattattacagatttccataatcattctgtcaaggtgtttaatcaggaaggagaattcatgttgaagtttggctcaaatggagaaggaaatgggcagtttaatgctccaacaggtgtagcagtggattcaaatggaaacatcattgtggccgactggggaaacagcaggatccaggtttttgatgggagtggatcatttttgtcctacattaacacatctgctgacccactctatggcccccaaggcctggccctaacttcagatggtcatgttgtggttgcagactctggaaatcactgtttcaaagtctatcgatacttacagtaatggtgggcaggtggatacccgcttccatggtcttgcactataaactggaatggatttctcaatgcgggaccagattatgactagagtttttatgccagaaggaatcattggtgaactttccaaggttatttctgaatgtaacaatttccttaaaaatgacttatccaatttctgtatttcacctttagggttaaaaaaaactcttctactgaatctataaaaactgcagttttacatctgtgaactatggcttaagggacaggatttatgtagctaaactaattttgcaaatcaaacagacacttaaaaaactagcatatgtaaaggtattcgttaatcctgtgaatggtagcttttgcacagaacttccaaaagcaaaacaaaaacaaaatctattgtagttatatacttcatttaacctaggtcacaagacccagggaatcttctaacctcacttttacagtaggtattactcttgtgacatttttttggttatcaacaactaaatataaattactttggaaaaagtaaggctgtcttgcaaaatgatcccagctctgattagcagccctctggagttcagaacttaagtatcagtgcaaatttctcaacctttctgggttagacaaagatccttttttgtgtgttcttttcaccacccctttggctcaccttgtatcagcaaacaaagtacttcttcagggaaacctgaaatttctaatgccttgaaaagcatattacaaaagtaatgctaccttttgggaaacaaactgccccgttaactccagatcattgcactggaatgtaatcaagaaagttagtcatgttttatgtaccatgttttcacacgtgtctcttctcttcgacttcctgaaagcgaaagctttacctcctgcaaatgtcagcacatgtagtaggacaccagtatcctaggacagagagccataagtagccctttggaggactgatggtgtcaaccaaaggcatgtgattgattaatgattcccccttagaaagcaagtgttaccaaagttgtgttatcttgaaagcattacaggtaagggcatgttatggttatttatcattgtttaatgaatagtagaggtgtcaagggactatgtatacatgattagggtaagatagaatgtattatatatatatatatatacacacacacatatatatagctgaatctttggtgtattgaaataggcagcactctgaaagacagaagcttcgtccagccactcttcagcacattcctttactaagcagtttaaagccgtcctagtggagcaagccctaaagcagatttaatttttgccattttccaagaatgacggtggtggcttttagtcagaaaatggccttctgtgctttcaaaaaaaaaaacaaaaaaaaaaccacacacacacataaaaaacccaacaggtcaaaataaaagttgaacttgagttacatttaatttaaatataaatgcattttgagaaatgttaagaacaatttagtcaatcgttcatctgtcattggtactgtaaaataagctgtggtctatttccactgtttaattttctactcagttctaccaaataggatgtcatgtttgacatttttgatagtgactttggggtcttcttcactgaaagcaccttagaactgtactataagaaaacatttcccctatgtataattatatgaatgtgatgtttattgcttattaatttataattcagtcattctctatataggacttcttaaaatttagaagggaaatctagctacttcaaattgtctgttaaatttattatgcccaaatcaacctctgaaaaaaggtttttccaggaagatttacatttaggtttaatatttttttagttaggtagagttttaaaaaatacttgagcctgtccgtgataaagctataaaattcaataactttttagaatgttaaatgaagacactgtttcctaacatcagtgagatacatctttgaatttaaacattcatatttactgagtacctactaggtaccaagtactcttttaggcactggaaatacagtgatggacaaaacaggtaaaaaatcgctgccccctcagagctgacattctggggtgggaatttcattttgccacgtactaacgttctgcacaaaagacaggctagactcttgtctagattgtttaaaagaaacttttcaaattggttacattaattttagtttattttcacaagtaaaaatggctttttatttagattctttctgtcccaggctgttgatcttaaaactagttgatttaaagagtttttttgcacaacatttcaattatatttgtgaacttagaaattaacttacaatctaaccagccatcatatcatatcctatcaggctagatatctcaatagtagactgaatacaaagctaattttttttacatgtcaatattggcacaaactggaatgaaagaatagtttgattcagacctgctccactatgtgttgctaaaacacatgctatgagcactccaggaaacactatattttttccaaaaaatatgtgattatatatgttaaagtatagataacatttcacacttggatacatatgtgcatttactgtatttcttggtaagcatatttttgggggaaagtgctgctgatatgatacaagtagacaaaatttaaatgaaattttgtcacattctatggaaaatggtttctggtaaactgagaaggatattaaaataagtggcttttttctgggctaccattattgtttgatttctctttgtcaagtgtatagaacctgtcatacattcatgataagtagcactgaaaaattactcattcaaatttcccctgggcacgtaaggcaaaatattgccggttgggatttcaaggtcagtgacgacgcatttcctcccagtacagaccccccagccccccttgctggacatggggaggcagagagtcacttgaccatccagaaatacatgactacaagtcctttatgactgtttgccattttttttaatggtacttagtattttgatcaaactttagtctccagaactaaacaagtccctaagtttccttattttaatttactgtgactagatttgaagcaaataaatactccagatccatgcagctagaacacacttgcttccactactaaatatacagggtatgtcctaacatggagttaactggaatagcagtacactagcaagtatctgtgaatccttagcactgacgggttaacagaaatgctttggtaatacctacttagttaattggaggaagtagtaaataaacattaggtaatctgcagattacttcaaatgggaaaaatctttttgtagactctatagtaccctctctattcactagcttctgaaaagggaggagtatttttagtttgacaatttaataatttaaaaacaagacatctccaggtaggaaaaaatgaaagctatttcatgcaaacattatctaatttagcttaaaagtgaaagtggtaatactgttggtttctgtaaatgttgcagggttttaaactttataattactttaatatttttgataactagaaatctagtattgccataaaggaaactaagtgcccatcaaagatttgtttggtataaataaagaattatttgttttgttttcaatgacagtaagctacaaatcatgatgcttaaaaactttctaaagatgaattgtgtggcagtgattggtctgtttgtggagaatgtatgaaagctattaatattctagaatagattaataaattggctatgttgttccaatgaatgtacagcacttccattaacttttgaaagcaacacagccttaaactcaatgcttttgctttatgacatgggaatgttctgtcatcaatggagtgtattcttgtaatagaattctttatatcgttctcaattctatagactttcaagcctatgtatgaatatgaaggggttttttttttttgctttgttttctttttagattttgtacattccatctttataggtctgtttcatatgttttatgtatagaacactaagtcttgcactctctgacattgatactgatatattctcgtcatttgttcttttatgaatcaaaatgttgactgcctatttaaagaaaagaatgaacgctgtgcatcaaagtgtttgtatgttcgtagctacatacgtaccacagtattttggatgctttagtctacaatgaaactttcaattaattctgtcttgaaacataggagaaacaggattcatgtgtatctctttaccatgcacaaaatctcaaatcattataataaagcttgttttctccattt

SEQ ID NO: 32540 - DNA, 3832 bp, Homo sapiens
  source 1..3832: mol_type = unassigned DNA
agcattttgagtgagcttgcagaaaatgaggggctttcagctggtcgcctgcttgtcacctctcgctgcctgaaaggcagctctcagagccctttcctgtccttctaattacagcggcgggggcagtgcgcgcttcgggacgcaattggaaaccagcgtgcagggtcaaagacagccggccccccatgtcagtggtctaggatggccagtgaaggcaccaacatcccaagtcctgtggtgcgccagattgacaagcagtttctgatttgcagtatatgcctggaacggtacaagaatcccaaggttctcccctgtctgcacactttctgcgagaggtgcctgcagaactacattcctgcccacagtttaaccctctcctgcccagtgtgccgccagacctccatcctgcccgagaaaggggtggccgcgctccagaacaatttcttcatcacaaacctgatggacgtgctgcagcgaactccaggcagcaacgctgaggagtcttccatcctggagacagtcactgctgtggctgcgggaaagcctctctcttgcccaaaccacgatgggaatgtgatggaattttactgccagtcctgtgagactgccatgtgtcgggagtgcacggagggggagcacgcagagcaccccacagttccactcaaggatgtggtggaacagcacaaggcctcgctccaggtccagctggatgctgtcaacaaaaggctcccagaaatagattctgctcttcagttcatctctgaaatcattcatcagttaaccaaccaaaaggccagcatcgtggatgacattcattccacctttgatgagctccagaagactttaaatgtgcgcaagagtgtgctgcttatggaattggaggtcaactatggcctcaaacacaaagtcctccagtcgcagctggatactctgctccaggggcaggagagcattaagagctgcagcaacttcacagcgcaggccctcaaccatggcacggagaccgaggtcctactggtgaagaagcagatgagcgagaagctgaacgagctggccgaccaggacttccccttgcacccgcgggagaacgaccagctggatttcatcgtggaaaccgaggggctgaagaagtccatccacaacctcgggacgatcttaaccaccaacgccgttgcctcagagacagtggccacgggcgaggggctgcggcagaccatcatcgggcagcccatgtccgtcaccatcaccaccaaggacaaagacggtgagctgtgcaaaaccggcaacgcctacctcaccgccgaactgagcacccccgacgggagcgtggcagacggggagatcctggacaacaagaacggcacctatgagtttttgtacactgtccagaaggaaggggactttaccctgtctctgagactctatgaccagcacatccgaggcagcccgtttaagctgaaagtgatccgatccgctgatgtgtctcccaccacagaaggcgtgaagaggcgcgttaagtccccggggagcggccacgtcaagcagaaagctgtgaaaagacccgcaagcatgtacagcactggaaaacgaaaagagaatcccatcgaagacgatttgatctttcgagtgggtaccaaaggaagaaataaaggagagtttacaaatcttcagggggtagctgcatctacaaatggaaagatattaattgcagacagtaacaaccaatgtgtgcagatattttccaatgatggccagttcaaaagtcgttttggcatacggggacgctctccggggcagctgcagcggcccacaggagtggctgtacatcccagtggggacataatcattgccgattatgataataaatgggtcagcattttctcctccgatgggaaatttaagacaaaaattggatcaggaaagctgatgggacccaaaggagtttctgtggaccgcaatgggcacattattgttgtggacaacaaggcgtgctgcgtgtttatcttccagccaaacgggaaaatagtcaccaggtttggtagccgaggaaatggggacaggcagtttgcaggtccccattttgcagctgtaaatagcaataatgagattattattacagatttccataatcattctgtcaaggtgtttaatcaggaaggagaattcatgttgaagtttggctcaaatggagaaggaaatgggcagtttaatgctccaacaggtgtagcagtggattcaaatggaaacatcattgtggccgactggggaaacagcaggatccaggtttttgatgggagtggatcatttttgtcctacattaacacatctgctgacccactctatggcccccaaggcctggccctaacttcagatggtcatgttgtggttgcagactctggaaatcactgtttcaaagtctatcgatacttacagtaatggtgggcaggtggatacccgcttccatggtcttgcactataaactggaatggatttctcaatgcgggaccagattatgactagagtttttatgccagaaggaatcattggtgaactttccaaggttatttctgaatgtaacaatttccttaaaaatgacttatccaatttctgtatttcacctttagggttaaaaaaaactcttctactgaatctataaaaactgcagttttacatctgtgaactatggcttaagggacaggatttatgtagctaaactaattttgcaaatcaaacagacacttaaaaaactagcatatgtaaaggtattcgttaatcctgtgaatggtagcttttgcacagaacttccaaaagcaaaacaaaaacaaaatctattgtagttatatacttcatttaacctaggtcacaagacccagggaatcttctaacctcacttttacagtaggtattactcttgtgacatttttttggttatcaacaactaaatataaattactttggaaaaagtaaggctgtcttgcaaaatgatcccagctctgattagcagccctctggagttcagaacttaagtatcagtgcaaatttctcaacctttctgggttagacaaagatccttttttgtgtgttcttttcaccacccctttggctcaccttgtatcagcaaacaaagtacttcttcagggaaacctgaaatttctaatgccttgaaaagcatattacaaaagtaatgctaccttttgggaaacaaactgccccgttaactccagatcattgcactggaatgtaatcaagaaagttagtcatgttttatgtaccatgttttcacacgtgtctcttctcttcgacttcctgaaagcgaaagctttacctcctgcaaatgtcagcacatgtagtaggacaccagtatcctaggacagagagccataagtagccctttggaggactgatggtgtcaaccaaaggcatgtgattgattaatgattcccccttagaaagcaagtgttaccaaagttgtgttatcttgaaagcattacaggtaagggcatgttatggttatttatcattgtttaatgaatagtagaggtgtcaagggactatgtatacatgattagggtaagatagaatgtattatatatatatatatatacacacacacatatatatagctgaatctttggtgtattgaaataggcagcactctgaaagacagaagcttcgtccagccactcttcagcacattcctttactaagcagtttaaagccgtcctagtggagcaagccctaaagcagatttaatttttgccattttccaagaatgacggtggtggcttttagtcagaaaatggccttctgtgctttcaaaaaaaaaaacaaa

SEQ ID NO: 32541 - DNA, 1924 bp, Homo sapiens
  source 1..1924: mol_type = unassigned DNA
gcttctgagcggaaactgaaagtgaaatagggagctggctaccagcgttgagtcccctgtaaagccaaaccccctaaaggtctccacactgctgtttaacggcacacttgacaatggcttcagcagcacgcttgacaatgatgtgggaggaggtcacatgccctatctgcctggaccccttcgtggagcctgtgagcatcgagtgtggccacagcttctgccaggaatgcatctctcaggttgggaaaggtgggggcagcgtctgtcctgtgtgccggcagcgctttctgctcaagaatctccggcccaatcgacagctagccaacatggtgaacaaccttaaagaaatcagccaggaggccagagagggcacacagggggaacggtgtgcagtgcatggagagagacttcacctgttctgtgagaaagatgggaaggccctttgctgggtatgtgcccagtctcggaaacaccgtgaccacgccatggtccctcttgaggaggctgcacaggagtaccaggagaagctccaggtggcattaggggaactgagaagaaagcaggagttggctgagaagttggaagtggaaattgcaataaagagagcagactggaagaaaacagtggaaacacagaaatctaggattcacgcagagtttgtgcagcaaaaaaacttcctggttgaagaagaacagaggcagctgcaggagctggagaaggatgagagggagcagctgagaatcctgggggagaaagaggccaagctggcccagcagagccaggccctacaggagctcatctcagagctagatcgaaggtgccacagctcagcactggaactgctgcaggaggtgataattgtcctggaaaggagtgagtcctggaacctgaaggacctggatattacctctccagaactcaggagtgtgtgccatgtgccagggctgaagaagatgctgaggacatgtgcagtccacatcactctggatccagacacagccaatccgtggctgatactttcagaagatcggagacaagtgaggcttggagacacccagcagagcatacctggaaatgaagagagatttgatagttatcctatggtcctgggtgcccagcactttcactctggaaaacattactgggaggtagatgtgacaggaaaggaggcctgggacctgggtgtctgcagagactctgtgcgcaggaaggggcactttttgcttagttccaagagtggcttctggacaatttggttgtggaacaaacaaaaatatgaggctggcacctacccccagactcccctccaccttcaggtgcctccatgccaagttgggattttcctggactatgaggctggcatggtctccttctacaacatcactgaccatggctccctcatctactccttctctgaatgtgcctttacaggacctctgcggcccttcttcagtcctggtttcaatgatggaggaaaaaacacagcccctctaaccctctgtccactgaatattggatcacaaggatccactgactattgatggctttctctggacactgccactctccccattggcaccgcttctcagccacaaaccctgcctcttttccccatgaactctgaaccacctttgtctctgcagaggcatccggatcccagcaagcgagctttagcagggaagtcacttcaccatcaacattcctgccccagatggctttgtgattccctccagtgaagcagcctccttatatttggcccaaactcatcttgatcaaccaaaaacatgtttctgccttctttatgggacttaagttttttttttctcctctccatctctaggatgtcgtctttggtgagatctctattatatcttgtatggtttgcaaaagggcttcctaaaaataaaaaataaaatttaaaaaa

SEQ ID NO: 32542 - DNA, 1898 bp, Homo sapiens
  source 1..1898: mol_type = unassigned DNA
gcttctgagcggaaactgaaagtgaaatagggagctggctaccagcgttgagtcccctgtaaagccaaaccccctaaaggtctccacactgctgtttaacggcacacttgacaatggcttcagcagcacgcttgacaatgatgtgggaggaggtcacatgccctatctgcctggaccccttcgtggagcctgtgagcatcgagtgtggccacagcttctgccaggaatgcatctctcaggttgggaaaggtgggggcagcgtctgtcctgtgtgccggcagcgctttctgctcaagaatctccggcccaatcgacagctagccaacatggtgaacaaccttaaagaaatcagccaggaggccagagagggcacacagggggaacggtgtgcagtgcatggagagagacttcacctgttctgtgagaaagatgggaaggccctttgctgggtatgtgcccagtctcggaaacaccgtgaccacgccatggtccctcttgaggaggctgcacaggagtaccaggagaagctccaggtggcattaggggaactgagaagaaagcaggagttggctgagaagttggaagtggaaattgcaataaagagagcagactggaagaaaacagtggaaacacagaaatctaggattcacgcagagtttgtgcagcaaaaaaacttcctggttgaagaagaacagaggcagctgcaggagctggagaaggatgagagggagcagctgagaatcctgggggagaaagaggccaagctggcccagcagagccaggccctacaggagctcatctcagagctagatcgaaggtgccacagctcagcactggaactgctgcaggaggttatagtgttaggccccaggagtgagtcctggaacctgaaggacctggatattacctctccagaactcaggagtgtgtgccatgtgccagggctgaagaagatgctgaggacatgtgcagtccacatcactctggatccagacacagccaatccgtggctgatactttcagaagatcggagacaagtgaggcttggagacacccagcagagcatacctggaaatgaagagagatttgatagttatcctatggtcctgggtgcccagcactttcactctggaaaacattactgggaggtagatgtgacaggaaaggaggcctgggacctgggtgtctgcagagactctgtgcgcaggaaggggcactttttgcttagttccaagagtggcttctggacaatttggttgtggaacaaacaaaaatatgaggctggcacctacccccagactcccctccaccttcaggtgcctccatgccaagttgggattttcctggactatgaggctggcatggtctccttctacaacatcactgaccatggctccctcatctactccttctctgaatgtgcctttacaggacctctgcggcccttcttcagtcctggtttcaatgatggaggaaaaaacacagcccctctaaccctctgtccactgaatattggatcacaaggatccactgactattgatggctttctctggacactgccactctccccattggcaccgcttctcagccacaaaccctgcctcttttccccatgaactctgaaccacctttgtctctgcagaggcatccggatcccagcaagcgagctttagcagggaagtcacttcaccatcaacattcctgccccagatggctttgtgattccctccagtgaagcagcctccttatatttggcccaaactcatcttgatcaaccaaaaacatgtttctgccttctttatgggacttaagttttttttttctcctctccatctctaggatgtcgtctttggtgagatctctattatatcttgtatggtttgcaaaagggcttcct

SEQ ID NO: 32543 - DNA, 2989 bp, Homo sapiens
  source 1..2989: mol_type = unassigned DNA
cagggtttattgttatgtaagttcttgttcagcttcctttgttttctttcacttctgagaatttaactttcgtttctcactcagctcctgtggggaaactcatttgtggagaccagccctctggcttggtgagtgaatctggtttacaccggctcctgccctgccttcactcttctcccctgattcaagactcctctgctttggactgaagcactgcaggagtttgtgaccaagaacttcaagagtcaagacagaaggaagccaagggagcagtgcaatggatttctcagtaaaggtagacatagagaaggaggtgacctgccccatctgcctggagctcctgacagaacctctgagcctagattgtggccacagcttctgccaagcctgcatcactgcaaagatcaaggagtcagtgatcatctcaagaggggaaagcagctgtcctgtgtgtcagaccagattccagcctgggaacctccgacctaatcggcatctggccaacatagttgagagagtcaaagaggtcaagatgagcccacaggaggggcagaagagagatgtctgtgagcaccatggaaaaaaactccagatcttctgtaaggaggatggaaaagtcatttgctgggtttgtgaactgtctcaggaacaccaaggtcaccaaacattccgcataaacgaggtggtcaaggaatgtcaggaaaagctgcaggtagccctgcagaggctgataaaggaggatcaagaggctgagaagctggaagatgacatcagacaagagagaaccgcctggaagaattatatccagatcgagagacagaagattctgaaagggttcaatgaaatgagagtcatcttggacaatgaggagcagagagagctgcaaaagctggaggaaggtgaggtgaatgtgctggataacctggcagcagctacagaccagctggtccagcagaggcaggatgccagcacgctcatctcagatctccagcggaggttgaggggatcgtcagtagagatgctgcaggatgtgattgacgtcatgaaaaggagtgaaagctggacattgaagaagccaaaatctgtttccaagaaactaaagagtgtattccgagtaccagatctgagtgggatgctgcaagttcttaaagagctgacagatgtccagtactactgggtggacgtgatgctgaatccaggcagtgccacttcgaatgttgctatttctgtggatcagagacaagtgaaaactgtacgcacctgcacatttaagaattcaaatccatgtgatttttctgcttttggtgtcttcggctgccaatatttctcttcggggaaatattactgggaagtagatgtgtctggaaagattgcctggatcctgggcgtacacagtaaaataagtagtctgaataaaaggaagagctctgggtttgcttttgatccaagtgtaaattattcaaaagtttactccagatatagacctcaatatggctactgggttataggattacagaatacatgtgaatataatgcttttgaggactcctcctcttctgatcccaaggttttgactctctttatggctgtgcctccctgtcgtattggggttttcctagactatgaggcaggcattgtctcatttttcaatgtcacaaaccacggagcactcatctacaagttctctggatgtcgcttttctcgacctgcttatccgtatttcaatccttggaactgcctagtccccatgactgtgtgcccaccgagctcctgagtgttctcattcctttacccacttctgcatagtagcccttgtgctgagactcagattctgcacctgagttcatctctactgagaccatctcttcctttctttccccttcttttacttagaatgtctttgtattcatttgctagggcttccatagcaaagcatcatagattgctgatttaaactgtaattgtattgccgtactgtgggctggaaatcccaaatctagattccagcagagttggttctttctgaggtctgcaaggaagggctctgttccatgcctctctccttggcttgtagaaggcatcttgtccctatgactcttcacattgtctttatgtacatctctgtgcccaagttttccctttttattaagacaccagtcatactggctcagggcccaccgctaatgccttaatgaaatcattttaacattatattctctacaaagaccttatttccaaataagataatatttggaggtattgggaataaaaactccaacatataaatttgaggaaggcacgatttcactcataacaatcttaccctttcttgcaagagatgcttgtacattattttcctaataccttggtttcactagtagtaaacattattattttttttatatttgcaaaggaaacatatctaatccttcctatagaaagaacagtattgctgtaattccttttcttttcttcctcatttcctctgccccttaaaagattgaagaaagagaaacttgtcaactcatatccacgttatctagcaaagtacataagaatctatcactaagtaatgtatccttcagaatgtgttggtttaccagtgacaccccatattcatcacaaaattaaagcaagaagtccatagtaatttatttgctaatagtggatttttaatgctcagagtttctgaggtcaaattttatcttttcacttacaagctctatgatcttaaataatttacttaatgtattttggtgtattttcctcaaattaatattggtgttcaagactatatctaattcctctgatcactttgagaaacaaacttttattaaatgtaaggcacttttctatgaattttaaatataaaaataaatattgttctgattattactgaaaagatgtcagccatttcaatgtcttgggaaacaattttttgtttttgttctgttttctttttgcttcaataaaacaatagctggctcta

SEQ ID NO: 32544 - DNA, 897 bp, Homo sapiens
  source 1..897: mol_type = unassigned DNA
gacgggcagactgctgctcatctctgcagctccactttggtctcttgtctctgaaggtccagtcacagggaacttgttcttctgagtacccacagcttactcttcctttgtagcaggaccagccacagaaaaaactcctcagacaccgagcactgcaggagtttgtgaccaagaacttcaagagtcaagacagaaggaagccaagggagcagtgcaatggatttctcagtaaaggtagacatagagaaggaggtgacctgccccatctgcctggagctcctgacagaacctctgagcctagattgtggccacagcttctgccaagcctgcatcactgcaaagatcaaggagtcagtgatcatctcaagaggggaaagcagctgtcctgtgtgtcagaccagattccagcctgggaacctccgacctaatcggcatctggccaacatagttgagagagtcaaagaggtcaagatgagcccacaggaggggcagaagagagatgtctgtgagcaccatggaaaaaaactccagatcttctgtaaggaggatggaaaagtcatttgctgggtttgtgaactgtctcaggaacaccaaggtcaccaaacattccgcataaacgaggtggtcaaggaatgtcaggaaaagctgcaggtagccctgcagaggctgataaaggaggatcaagaggctgagaagctggaagatgacatcagacaagagagaaccgcctggaagaattatatccagatcgagagacagaagattctgaaagggttcaatgaaatgagagtcatcttggacaatgaggagcagagagagctgcaaaagctggaggaaggtgaggtgaatgtgctggataacctggcagcagctacagaccagctggtccagcagagg

SEQ ID NO: 32545 - DNA, 812 bp, Homo sapiens
  source 1..812: mol_type = unassigned DNA
attgttatctcctgtggggaaactcatttgtggagaccagccctctggcttggtgagtgaatctggtttacaccggctcctgccctgccttcactcttctcccctgattcaagactcctctgctttggactgaagcactgcaggagtttgtgaccaagaacttcaagagtcaagacagaaggaagccaagggagcagtgcaatggatttctcagtaaaggtagacatagagaaggaggtgacctgccccatctgcctggagctcctgacagaacctctgagcctagattgtggccacagcttctgccaagcctgcatcactgcaaagatcaaggagtcagtgatcatctcaagaggggaaagcagctgtcctgtgtgtcagaccagattccagcctgggaacctccgacctaatcggcatctggccaacatagttgagagagtcaaagaggtcaagatgagcccacaggaggggcagaagagagatgtctgtgagcaccatggaaaaaaactccagatcttctgtaaggaggatggaaaagtcatttgctgggtttgtgaactgtctcaggaacaccaaggtcaccaaacattccgcataaacgaggtggtcaaggaatgtcaggaaaagctgcaggtagccctgcagaggctgataaaggaggatcaagaggctgagaagctggaagatgacatcagacaagagagaaccgcctggaagaattatatccagatcgagagacagaagattctgaaagggttcaatgaaatgagagtcatcttggacaatgaggagcagagagagctgcaaaa

SEQ ID NO: 32546 - DNA, 2477 bp, Homo sapiens
  source 1..2477: mol_type = unassigned DNA
atggatttctcagtaaaggtagacatagagaaggaggtgacctgccccatctgcctggagctcctgacagaacctctgagcctagattgtggccacagcttctgccaagcctgcatcactgcaaagatcaaggagtcagtgatcatctcaagaggggaaagcagctgtcctgtgtgtcagaccagattccagcctgggaacctccgacctaatcggcatctggccaacatagttgagagagtcaaagaggtcaagatgagcccacaggaggggcagaagagagatgtctgtgagcaccatggaaaaaaactccagatcttctgtaaggaggatggaaaagtcatcttggacaatgaggagcagagagagctgcaaaagctggaggaaggtgaggtgaatgtgctggataacctggcagcagctacagaccagctggtccagcagaggcaggatgccagcacgctcatctcagatctccagcggaggttgaggggatcgtcagtagagatgctgcaggatgtgattgacgtcatgaaaaggagtgaaagctggacattgaagaagccaaaatctgtttccaagaaactaaagagtgtattccgagtaccagatctgagtgggatgctgcaagttcttaaagagctgacagatgtccagtactactgggtggacgtgatgctgaatccaggcagtgccacttcgaatgttgctatttctgtggatcagagacaagtgaaaactgtacgcacctgcacatttaagaattcaaatccatgtgatttttctgcttttggtgtcttcggctgccaatatttctcttcggggaaatattactgggaagtagatgtgtctggaaagattgcctggatcctgggcgtacacagtaaaataagtagtctgaataaaaggaagagctctgggtttgcttttgatccaagtgtaaattattcaaaagtttactccagatatagacctcaatatggctactgggttataggattacagaatacatgtgaatataatgcttttgaggactcctcctcttctgatcccaaggttttgactctctttatggctgtgcctccctgtcgtattggggttttcctagactatgaggcaggcattgtctcatttttcaatgtcacaaaccacggagcactcatctacaagttctctggatgtcgcttttctcgacctgcttatccgtatttcaatccttggaactgcctagtccccatgactgtgtgcccaccgagctcctgagtgttctcattcctttacccacttctgcatagtagcccttgtgctgagactcagattctgcacctgagttcatctctactgagaccatctcttcctttctttccccttcttttacttagaatgtctttgtattcatttgctagggcttccatagcaaagcatcatagattgctgatttaaactgtaattgtattgccgtactgtgggctggaaatcccaaatctagattccagcagagttggttctttctgaggtctgcaaggaagggctctgttccatgcctctctccttggcttgtagaaggcatcttgtccctatgactcttcacattgtctttatgtacatctctgtgcccaagttttccctttttattaagacaccagtcatactggctcagggcccaccgctaatgccttaatgaaatcattttaacattatattctctacaaagaccttatttccaaataagataatatttggaggtattgggaataaaaactccaacatataaatttgaggaaggcacgatttcactcataacaatcttaccctttcttgcaagagatgcttgtacattattttcctaataccttggtttcactagtagtaaacattattattttttttatatttgcaaaggaaacatatctaatccttcctatagaaagaacagtattgctgtaattccttttcttttcttcctcatttcctctgccccttaaaagattgaagaaagagaaacttgtcaactcatatccacgttatctagcaaagtacataagaatctatcactaagtaatgtatccttcagaatgtgttggtttaccagtgacaccccatattcatcacaaaattaaagcaagaagtccatagtaatttatttgctaatagtggatttttaatgctcagagtttctgaggtcaaattttatcttttcacttacaagctctatgatcttaaataatttacttaatgtattttggtgtattttcctcaaattaatattggtgttcaagactatatctaattcctctgatcactttgagaaacaaacttttattaaatgtaaggcacttttctatgaattttaaatataaaaataaatattgttctgattattactgaaaagatgtcagccatttcaatgtcttgggaaacaattttttgtttttgttctgttttctttttgcttcaataaaacaatagctggctct

SEQ ID NO: 32547 - DNA, 1688 bp, Homo sapiens
  source 1..1688: mol_type = unassigned DNA
aatctggtttacaccggctcctgccctgccttcactcttctcccctgattcaagactcctctgctttggactgaagcactgcaggagtttgtgaccaagaacttcaagagtcaagacagaaggaagccaagggagcagtgcaatggatttctcagtaaaggtagacatagagaaggaggtgacctgccccatctgcctggagctcctgacagaacctctgagcctagattgtggccacagcttctgccaagcctgcatcactgcaaagatcaaggagtcagtgatcatctcaagaggggaaagcaggggcagaagagagatgtctgtgagcaccatggaaaaaaactccagatcttctgtaaggaggatggaaaagtcatttgctgggtttgtgaactgtctcaggaacaccaaggtcaccaaacattccgcataaacgaggtggtcaaggaatgtcaggaaaagctgcaggtagccctgcagaggctgataaaggaggatcaagaggctgagaagctggaagatgacatcagacaagagagaaccgcctggaagaattatatccagatcgagagacagaagattctgaaagggttcaatgaaatgagagtcatcttggacaatgaggagcagagagagctgcaaaagctggaggaaggtgaggtgaatgtgctggataacctggcagcagctacagaccagctggtccagcagaggcaggatgccagcacgctcatctcagatctccagcggaggttgaggggatcgtcagtagagatgctgcaggatgtgattgacgtcatgaaaaggagtgaaagctggacattgaagaagccaaaatctgtttccaagaaactaaagagtgtattccgagtaccagatctgagtgggatgctgcaagttcttaaagagctgacagatgtccagtactactgggtggacgtgatgctgaatccaggcagtgccacttcgaatgttgctatttctgtggatcagagacaagtgaaaactgtacgcacctgcacatttaagaattcaaatccatgtgatttttctgcttttggtgtcttcggctgccaatatttctcttcggggaaatattactgggaagtagatgtgtctggaaagattgcctggatcctgggcgtacacagtaaaataagtagtctgaataaaaggaagagctctgggtttgcttttgatccaagtgtaaattattcaaaagtttactccagatatagacctcaatatggctactgggttataggattacagaatacatgtgaatataatgcttttgaggactcctcctcttctgatcccaaggttttgactctctttatggctgtgcctccctgtcgtattggggttttcctagactatgaggcaggcattgtctcatttttcaatgtcacaaaccacggagcactcatctacaagttctctggatgtcgcttttctcgacctgcttatccgtatttcaatccttggaactgcctagtccccatgactgtgtgcccaccgagctcctgagtgttctcattcctttacccacttctgcatagtagcccttgtgctgagactcagattctgcacctgagttcatctctactgagaccatctcttcctttctttccccttcttttacttagaatgtctttgtattcatttgctagggcttccatagc

SEQ ID NO: 32548 - DNA, 5744 bp, Homo sapiens
  source 1..5744: mol_type = unassigned DNA
gtttcctcggcggcctcggagcgcgggtgcagcagttgtgtcccgacccctgggagcgccatggcagagctgtgccccctggccgaggagctgtcgtgctccatctgcctggagcccttcaaggagccggtcaccactccgtgcggccacaacttctgcgggtcgtgcctgaatgagacgtgggcagtccagggctcgccatacctgtgcccgcagtgccgcgccgtctaccaggcgcgaccgcagctgcacaagaacacggtgctgtgcaacgtggtggagcagttcctgcaggccgacctggcccgggagccacccgccgacgtctggacgccgcccgcccgcgcctctgcacccagcccgaatgcccaggtggcctgcgaccactgcctgaaggaggccgccgtgaagacgtgcttggtgtgcatggcctccttctgtcaggagcacctgcagccgcacttcgacagccccgccttccaggaccacccgctgcagccgcccgttcgcgacctgttgcgccgcaaatgttcccagcacaatcggctgcgggaatttttctgccccgagcacagcgagtgcatctgccacatctgcctggtggagcataagacctgctctcccgcgtccctgagccaggccagcgccgacctggaggccaccctgaggcacaaactaactgtcatgtacagtcagatcaacggggcgtcgagagcactggatgatgtgagaaacaggcagcaggatgtgcggatgactgcaaacagaaaggtggagcagctacaacaagaatacacggaaatgaaggctctcttggacgcctcagagaccacctcgacaaggaagataaaggaagaggagaagagggtcaacagcaagtttgacaccatttatcagattctcctcaagaagaagagtgagatccagaccttgaaggaggagattgaacagagcctgaccaagagggatgagttcgagtttctggagaaagcatcaaaactgcgaggaatctcaacaaagccagtctacatccccgaggtggaactgaaccacaagctgataaaaggcatccaccagagcaccatagacctcaaaaacgagctgaagcagtgcatcgggcggctccaggagcccacccccagttcaggtgaccctggagagcatgacccagcgtccacacacaaatccacacgccctgtgaagaaggtctccaaagaggaaaagaaatccaagaaacctccccctgtccctgccttacccagcaagcttcccacgtttggagccccggaacagttagtggatttaaaacaagctggcttggaggctgcagccaaagccaccagctcacatccgaactcaacatctctcaaggccaaggtgctggagaccttcctggccaagtccagacctgagctcctggagtattacattaaagtcatcctggactacaacaccgcccacaacaaagtggctctgtcagagtgctatacagtagcttctgtggctgagatgcctcagaactaccggccgcatccccagaggttcacatactgctctcaggtgctgggcctgcactgctacaagaaggggatccactactgggaggtggagctgcagaagaacaacttctgtggggtaggcatctgctacggaagcatgaaccggcagggcccagaaagcaggctcggccgcaacagcgcctcctggtgcgtggagtggttcaacaccaagatctctgcctggcacaataacgtggagaaaaccctgccctccaccaaggccacgcgggtgggcgtgcttctcaactgtgaccacggctttgtcatcttcttcgctgttgccgacaaggtccacctgatgtataagttcagggtggactttactgaggctttgtacccggctttctgggtattttctgctggtgccacactctccatctgctcccccaagtaggcaggctgtaggcacttgggctgactgcctgcagaagtcccaagaccctagtgaaaatacagcaggcagaactctccttggataattccccaagaggtcccaaggattgggagcatgggaggggagctggcgggagggtgggaggtgggatttagccaggaaaggggtgagagtgattgtgttgtgggcgaggaggcgtttccaccccctggtgcctatcagggcagggtgacctactccccattgttctggaaatctccaggctgctgggcagctgggcagagctctgggaagtgaagtcatgagtgcccgattcctcttagagaaaatccatagctactgtaggttctgtcttgggccacttggatctgaaggctgcccctttgctctctggggtagccttcagatcttggtgttttgaattcttactatagatgtttttaaagttccaaagtcattgagtttcaatgttacataaactccattacccgcatgttggggcttgatctcctggttattatctgtgcttgaggaaacacccacagcagtctctacccagaacagtttcctaaagaggcataccctcttcctccactggaaaatagtgcgttcccttcctaccctgcacacccatcgcccccacattgatggttttcaaacagcaaacttttcagctaaagcttcaaaccatgattggaatcagcctgtgttggatttgtgattcagggtcatggtgaccctgatccagtttgggtggaaatccttcctaagtatcataagaagcatcttggcagagatgctttggtggcagccatgagctttgctggaggccttgcttcccatagccttggctgtggggcaaggaactctgccaggcgagggggatgctgccctggatcaacagaagcctggtgggtttgctcgtgttagagtgtcctgccttcttactgacaactcttctcggtgatagcctctcttccctggattgtgacatatggaatgacagtgcaggtaccaccgaggctagcacagtcaagcctccagctaagctggatccctgaagcctgctatcatgcagacaggctatgcggctgcctcggaccatgctaggccacttgctggggtgtcaacctaccaccaaaggggtcttttagcaaacctcatggggaacaggaacattcctgttcatccctggccacaggctgcagacccagcactggcccttgcgtgagtcagagcctggggctggccctagccccttctactgacttcctcatttaagccaattatataagctcacattgatcagggagggagggaaagagctaaagagggtcacacaagtggctattttccctgcagtgtttctgtgtggtgaaaataacccagtccactaaggggcgggagtgaatggatggctggattttccccaagctccttatagcctaatgttgtcaggatgtgagtatgaggaatttagcctcttatagtgaaatgagtccaactctgggctttgcttagaggagagctcctgtcaggcttcctataatatgaaaagaagtcaccattggggaactagagaccccagaccttttcatatggatatttgagaatgtaatgcatctcaggcctcgtgctggaactctagggcactctaggcaggctcagaacacttgatattcctgacagctacacacctgacatgcaggtacatacctgatcggtgtcatctcctaacaaggattttcagttcctcgggagagcaataatctttgtaggaaagacatccctgcaataggtgatatgtggtccttagaagttttattcctttactacttggaagaaaagttctttggtgattcttctctgcttttgaagatgatcaaaagcatcttcattgattttctgaaacgaaagccttgtctgaaaccaattaatacttgggaaacagctgggcttggaggagtagaatgccagagataaatccatggctcctgctctggctctcttctgcagaaatgagggcaacagtgaggccacttccctggcaaatgtgcagctcaggatagggaagcataagaccctctgtttaaaagagagtcaagtaggtaaccaaagccaagctctgtgcaaggtgctttggagttgtaaattgaggagtgcatccttgctgtcttgaaccattctgtttgcaatggtgagaccttacataacctagccttgcagggccgccacacaaccctggagtcctagagttggaggaacctttgtatccatctgacttctcattttgcagaatatgatgagaaagtagaggatcgctctgttcaccactcttgctattccattagtggggagatgcctgctagcatgtgtgaggggaacactctgatacactgggaagtatcggaaattcccagaaacacaaacataaaataactctcctagacccaggtactggggactgtctcagtccgtgtggcatgataaataaaaggttaggatcaagtctttgtatttttcaagatgtggtagctgattattcctgttttaagtactctgaaattgatctgtgatcaataatactaatatgttatcttttaccgtattctgcctctcactattgattttaattagttaggagtatttgagctgttatttcttgagcttaatatttttttagagttaactctttaaggagataatcatggctgtagacaaggccagggctggctgacgtgccttagaaggtttgaatgcaataaagcggtgtttggcgttctcctgcattgtagtgcgggtacaaaatgctatttgttcgtcatactgttgtcagcagatgagccgcccactacagacggctactgcccagggacctgcccaggccccacccaagggctcccaagggttgagatttctgcagacctatagccagcacacttagtcctgccctatatagagttcctcttcgggaagcttttgataaggaattctcagaccgataggatgtctgtctgggctttgctgcgggacagtctaactgtgggggctaggggaaagcaggagagtatcgatcaaagagtaagccacacacggataatcagttactagggatggaggtgtgagggttcattatattattcattttactgttgtatatgtttgaaaatgtctataataaaaagctttaaaaaaaaaaaagaaacaaaaatagttcaggccagcaatgggccctccatgttcagtggattttatccttgtttcaattggggtaggagttccaggaggtgtggattggaggttgtctaaagaattgaactggcctttgtccctgcttcctgggagggagactttcagtccttgacatttccagggtaataggagtgtctttgttatttgtgaggccatgggatcacacctgagcttatgctaaaaggtgggatgactcagagctggggctggtcaccagacagactgaccatgtgattagaggtttgaggctttgagtcagcctgacctatggggcgggggactggaggctgagtttaatcatctggccagtgctttaatcagtacatcatgaaaccctaataaaaactctggacactaaagctcagcatagcttcctgggtggtgaagctgtggctatgccggcagggcagtgtgccctaattccacgaagagggggcatgggagcactgtgctcaagacccttccagacctttccctgtgtcttccttggcttgtggagctgatttgtatcctttataataaaactaatcataagtata

SEQ ID NO: 32549 - DNA, 2294 bp, Homo sapiens
  source 1..2294: mol_type = unassigned DNA
cgcgggtgcagcagttgtgtcccgacccctgggagcgccatggcagagctgtgccccctggccgaggagctgtcgtgctccatctgcctggagcccttcaaggagccggtcaccactccgtgcggccacaacttctgcgggtcgtgcctgaatgagacgtgggcagtccagggctcgccatacctgtgcccgcagtgccgcgccgtctaccaggcgcgaccgcagctgcacaagaacacggtgctgtgcaacgtggtggagcagttcctgcaggccgacctggcccgggagccacccgccgacgtctggacgccgcccgcccgcgcctctgcacccagcccgaatgcccaggtggcctgcgaccactgcctgaaggaggccgccgtgaagacgtgcttggtgtgcatggcctccttctgtcaggagcacctgcagccgcacttcgacagccccgccttccaggaccacccgctgcagccgcccgttcgcgacctgttgcgccgcaaatgttcccagcacaatcggctgcgggaatttttctgccccgagcacagcgagtgcatctgccacatctgcctggtggagcataagacctgctctcccgcgtccctgagccaggccagcgccgacctggaggccaccctgaggcacaaactaactgtcatgtacagtcagatcaacggggcgtcgagagcactggatgatgtgagaaacaggcagcaggatgtgcggatgactgcaaacagaaaggtggagcagctacaacaagaatacacggaaatgaaggctctcttggacgcctcagagaccacctcgacaaggaagataaaggaagaggagaagagggtcaacagcaagtttgacaccatttatcagattctcctcaagaagaagagtgagatccagaccttgaaggaggagattgaacagagcctgaccaagagggatgagttcgagtttctggagaaagcatcaaaactgcgaggaatctcaacaaagccagtctacatccccgaggtggaactgaaccacaagctgataaaaggcatccaccagagcaccatagacctcaaaaacgagctgaagcagtgcatcgggcggctccaggagcccacccccagttcaggtgaccctggagagcatgacccagcgtccacacacaaatccacacgccctgtgaagaaggtctccaaagaggaaaagaaatccaagaaacctccccctgtccctgccttacccagcaagcttcccacgtttggagccccggaacagttagtggatttaaaacaagctggcttggaggctgcagccaaagccaccagctcacatccgaactcaacatctctcaaggccaaggtgctggagaccttcctggccaagtccagacctgagctcctggagtattacattaaagtcatcctggactacaacaccgcccacaacaaagtggctctgtcagagtgctatacagtagcttctgtggctgagatgcctcagaactaccggccgcatccccagaggttcacatactgctctcaggtgctgggcctgcactgctacaagaaggggatccactactgggaggtggagctgcagaagaacaacttctgtggggtaggcatctgctacggaagcatgaaccggcagggcccagaaagcaggctcggccgcaacagcgcctcctggtgcgtggagtggttcaacaccaagatctctgcctggcacaataacgtggagaaaaccctgccctccaccaaggccacgcgggtgggcgtgcttctcaactgtgaccacggctttgtcatcttcttcgctgttgccgacaaggtccacctgatgtataagttcagggtggactttactgaggctttgtacccggctttctgggtattttctgctggtgccacactctccatctgctcccccaagtaggcaggctgtaggcacttgggctgactgcctgcagaagtcccaagaccctagtgaaaatacagcaggcagaactctccttggataattccccaagaggtcccaaggattgggagcatgggaggggagctggcgggagggtgggaggtgggatttagccaggaaaggggtgagagtgattgtgttgtgggcgaggaggcgtttccaccccctggtgcctatcagggcagggtgacctactccccattgttctggaaatctccaggctgctgggcagctgggcagagctctgggaagtgaagtcatgagtgcccgattcctcttagagaaaatccatagccttcagatcttggtgttttgaattc

SEQ ID NO: 32550 - DNA, 2686 bp, Homo sapiens
  source 1..2686: mol_type = unassigned DNA
tttacgctgccgccggcatccgctcggacgcggccacgttgtcttgcgcgctttgcccgcctggccctgggactctgaccctcggctaccctttcctgccccactagcgtggccgcgagcctcggtgagccggccgtattcccgctctcgcttagggggcacaggcgcaggcatcggcccggccactccaagccttcggtgcgcgggcgcgtctgggatacgggcccgggaggcgccgccctccgtccgcccggtgcctctcaggaacagcgaaccggagagagcgccggagagttgggctcagtgcagagctcggcgccggggcccatgcccgtgcgcccccgcaggccggcgccatggcctccgggagtgtggccgagtgcctgcagcaggagaccacctgccccgtgtgcctgcagtacttcgcagagcccatgatgctcgactgcggccataacatctgttgcgcgtgcctcgcccgctgctggggcacggcagagactaacgtgtcgtgcccgcagtgccgggagaccttcccgcagaggcacatgcggcccaaccggcacctggccaacgtgacccaactggtaaagcagctgcgcaccgagcggccgtcggggcccggcggcgagatgggcgtgtgcgagaagcaccgcgagcccctgaagctgtactgcgaggaggaccagatgcccatctgcgtggtgtgcgaccgctcccgcgagcaccgcggccacagcgtgctgccgctcgaggaggcggtggagggcttcaaggagcaaatccagaaccagctcgaccatttaaaaagagtgaaagatttaaagaagagacgtcgggcccagggggaacaggcacgagctgaactcttgagcctaacccagatggagagggagaagattgtttgggagtttgagcagctgtatcactccttaaaggagcatgagtatcgcctcctggcccgccttgaggagctagacttggccatctacaatagcatcaatggtgccatcacccagttctcttgcaacatctcccacctcagcagcctgatcgctcagctagaagagaagcagcagcagcccaccagggagctcctgcaggacattggggacacattgagcagggctgaaagaatcaggattcctgaaccttggatcacacctccagatttgcaagagaaaatccacatttttgcccaaaaatgtctattcttgacggagagtctaaagcagttcacagaaaaaatgcagtcagatatggagaaaatccaagaattaagagaggctcagttatactcagtggacgtgactctggacccagacacggcctaccccagcctgatcctctctgataatctgcggcaagtgcggtacagttacctccaacaggacctgcctgacaaccccgagaggtctccttctacaacgtgacagagaggtgtcacaccttcactttctctcatgctaccttttgtgggcctgtccggccctacttcagtctgagttactcgggagggaaaagtgcagctcctctgatcatctgccccatgagtgggatagatgggttttctggccatgttgggaatcatggtcattccatggagacctccccttgaggaggtgaattcaggccaaaagggctgttggctgtaatcctacgccaggcacaaggcatcttgttgccttgccacgtcctgtcacagctgggtatccttaccatgttccacgcccttgcagtgggagacaggatgtccatgttctctaccatccttttccttcccatgcagattgtgaaatgtaatgagatgtatcaagatatcctagaaataaaaaccagatgtccacctccagtgtttcatactttctggttttacacatcgctggagggataaagagtatggataatctttggatttggagagccgttcaagatacttccagcttcttggctcagcctggcttcctctggttcagccccacataatgattatggctatttgctgtcatttctgggctagggctcctttctaacaacctagactggaataaggccctgtcagcatggctccctttatcccagttttccgtctgggaacagtacctctgcccctgattcccaatgtgccatagttttattaactccattaaagaagcctgtatgtgttttggttagttacagttattttacaataatggtgggtaatggccccacctctgttatgagataatgttctaatcaatgtctctgcctttgtatcttttctgagggctttgtctgttctcttcattctaatgaaaggtgtattctagtgctgggtgcatatcatccaggataatattctgcccaactccatcctctgttactagatcccttaccagtcacatttgtggactggtggccagtcgtataccatccctggaaggattctgggacaatattccagggattcattgacttcttggctccttttctccatttcctttgggggaagggggaattgaccatgcttaagtgcatcctatcaaggggcagctccgtccccatggccattggatcatgagacactctgaagtcagaaggctggggcagatcacttcaagcaagcccccatgatggttctcagtcctgcttctctgtgggtacgtgcccctctgtttaaaaataaactgaatatggatgttta

SEQ ID NO: 32551 - DNA, 2967 bp, Homo sapiens
  source 1..2967: mol_type = unassigned DNA
gtttacgctgccgccggcatccgctcggacgcggccacgttgtcttgcgcgctttgcccgcctggccctgggactctgaccctcggctaccctttcctgccccactagcgtggccgcgagcctcggtgagccggccgtattcccgctctcgcttagggggcacaggcgcaggcatcggcccggccactccaagccttcggtgcgcgggcgcgtctgggatacgggcccgggaggcgccgccctccgtccgcccggtgcctctcaggaacagcgaaccggagagagcgccggagagttgggctcagtgcagagctcggcgccggggcccatgcccgtgcgcccccgcaggccggcgccatggcctccgggagtgtggccgagtgcctgcagcaggagaccacctgccccgtgtgcctgcagtacttcgcagagcccatgatgctcgactgcggccataacatctgttgcgcgtgcctcgcccgctgctggggcacggcagagactaacgtgtcgtgcccgcagtgccgggagaccttcccgcagaggcacatgcggcccaaccggcacctggccaacgtgacccaactggtaaagcagctgcgcaccgagcggccgtcggggcccggcggcgagatgggcgtgtgcgagaagcaccgcgagcccctgaagctgtactgcgaggaggaccagatgcccatctgcgtggtgtgcgaccgctcccgcgagcaccgcggccacagcgtgctgccgctcgaggaggcggtggagggcttcaaggagcaaatccagaaccagctcgaccatttaaaaagagtgaaagatttaaagaagagacgtcgggcccagggggaacaggcacgagctgaactcttgagcctaacccagatggagagggagaagattgtttgggagtttgagcagctgtatcactccttaaaggagcatgagtatcgcctcctggcccgccttgaggagctagacttggccatctacaatagcatcaatggtgccatcacccagttctcttgcaacatctcccacctcagcagcctgatcgctcagctagaagagaagcagcagcagcccaccagggagctcctgcaggacattggggacacattgagcagggctgaaagaatcaggattcctgaaccttggatcacacctccagatttgcaagagaaaatccacatttttgcccaaaaatgtctattcttgacggagagtctaaagcagttcacagaaaaaatgcagtcagatatggagaaaatccaagaattaagagaggctcagttatactcagtggacgtgactctggacccagacacggcctaccccagcctgatcctctctgataatctgcggcaagtgcggtacagttacctccaacaggacctgcctgacaaccccgagaggttcaatctgtttccctgtgtcttgggctctccatgcttcatcgccgggagacattattgggaggtagaggtgggagataaagccaagtggaccataggtgtctgtgaagactcagtgtgcagaaaaggtggagtaacctcagccccccagaatggattctgggcagtgtctttgtggtatgggaaagaatattgggctcttacctccccaatgactgccctacccctgcggaccccgctccagcgggtggggattttcttggactatgatgctggtgaggtctccttctacaacgtgacagagaggtgtcacaccttcactttctctcatgctaccttttgtgggcctgtccggccctacttcagtctgagttactcgggagggaaaagtgcagctcctctgatcatctgccccatgagtgggatagatgggttttctggccatgttgggaatcatggtcattccatggagacctccccttgaggaggtgaattcaggccaaaagggctgttggctgtaatcctacgccaggcacaaggcatcttgttgccttgccacgtcctgtcacagctgggtatccttaccatgttccacgcccttgcagtgggagacaggatgtccatgttctctaccatccttttccttcccatgcagattgtgaaatgtaatgagatgtatcaagatatcctagaaataaaaaccagatgtccacctccagtgtttcatactttctggttttacacatcgctggagggataaagagtatggataatctttggatttggagagccgttcaagatacttccagcttcttggctcagcctggcttcctctggttcagccccacataatgattatggctatttgctgtcatttctgggctagggctcctttctaacaacctagactggaataaggccctgtcagcatggctccctttatcccagttttccgtctgggaacagtacctctgcccctgattcccaatgtgccatagttttattaactccattaaagaagcctgtatgtgttttggttagttacagttattttacaataatggtgggtaatggccccacctctgttatgagataatgttctaatcaatgtctctgcctttgtatcttttctgagggctttgtctgttctcttcattctaatgaaaggtgtattctagtgctgggtgcatatcatccaggataatattctgcccaactccatcctctgttactagatcccttaccagtcacatttgtggactggtggccagtcgtataccatccctggaaggattctgggacaatattccagggattcattgacttcttggctccttttctccatttcctttgggggaagggggaattgaccatgcttaagtgcatcctatcaaggggcagctccgtccccatggccattggatcatgagacactctgaagtcagaaggctggggcagatcacttcaagcaagcccccatgatggttctcagtcctgcttctctgtgggtacgtgcccctctgtttaaaaataaactgaatatggatgttta

SEQ ID NO: 32552 - DNA, 2967 bp, Homo sapiens; identical to SEQ ID NO: 32551
  source 1..2967: mol_type = unassigned DNA

SEQ ID NO: 32553 - DNA, 2686 bp, Homo sapiens; identical to SEQ ID NO: 32550
  source 1..2686: mol_type = unassigned DNA

SEQ ID NO: 32554 - DNA, 1813 bp, Homo sapiens
  source 1..1813: mol_type = unassigned DNA
tctaaagcagttcacagaaaaaatgcagtcagatatggagaaaatccaagaatcagctgactcactggaaggtggaattcttgatcttggctcagttttatcccatattctaccagtctcagaattaagagaggctcagttatactcagtggacgtgactctggacccagacacggcctaccccagcctgatcctctctgataatctgcggcaagtgcggtacagttacctccaacaggacctgcctgacaaccccgagaggttcaatctgtttccctgtgtcttgggctctccatgcttcatcgccgggagacattattgggaggtagaggtgggagataaagccaagtggaccataggtgtctgtgaagactcagtgtgcagaaaaggtggagtaacctcagccccccagaatggattctgggcagtgtctttgtggtatgggaaagaatattgggctcttacctccccaatgactgccctacccctgcggaccccgctccagcgggtggggattttcttggactatgatgctggtgaggtctccttctacaacgtgacagagaggtgtcacaccttcactttctctcatgctaccttttgtgggcctgtccggccctacttcagtctgagttactcgggagggaaaagtgcagctcctctgatcatctgccccatgagtgggatagatgggttttctggccatgttgggaatcatggtcattccatggagacctccccttgaggaggtgaattcaggccaaaagggctgttggctgtaatcctacgccaggcacaaggcatcttgttgccttgccacgtcctgtcacagctgggtatccttaccatgttccacgcccttgcagtgggagacaggatgtccatgttctctaccatccttttccttcccatgcagattgtgaaatgtaatgagatgtatcaagatatcctagaaataaaaaccagatgtccacctccagtgtttcatactttctggttttacacatcgctggagggataaagagtatggataatctttggatttggagagccgttcaagatacttccagcttcttggctcagcctggcttcctctggttcagccccacataatgattatggctatttgctgtcatttctgggctagggctcctttctaacaacctagactggaataaggccctgtcagcatggctccctttatcccagttttccgtctgggaacagtacctctgcccctgattcccaatgtgccatagttttattaactccattaaagaagcctgtatgtgttttggttagttacagttattttacaataatggtgggtaatggccccacctctgttatgagataatgttctaatcaatgtctctgcctttgtatcttttctgagggctttgtctgttctcttcattctaatgaaaggtgtattctagtgctgggtgcatatcatccaggataatattctgcccaactccatcctctgttactagatcccttaccagtcacatttgtggactggtggccagtcgtataccatccctggaaggattctgggacaatattccagggattcattgacttcttggctccttttctccatttcctttgggggaagggggaattgaccatgcttaagtgcatcctatcaaggggcagctccgtccccatggccattggatcatgagacactctgaagtcagaaggctggggcagatcacttcaagcaagcccccatgatggttctcagtcctgcttctctgtgggtacgtgcccctctgtttaaaaataaactgaatatggatgttta

SEQ ID NO: 32555 - DNA, 2686 bp, Homo sapiens; identical to SEQ ID NO: 32550
  source 1..2686: mol_type = unassigned DNA

SEQ ID NO: 32556 - DNA, 1813 bp, Homo sapiens; identical to SEQ ID NO: 32554
  source 1..1813: mol_type = unassigned DNA

SEQ ID NO: 32557 - DNA, 2686 bp, Homo sapiens
  source 1..2686: mol_type = unassigned DNA
tttacgctgccgccggcatccgctcggacgcggccacgttgtcttgcgcgctttgcccgcctggccctgggactctgaccctcggctaccctttcctgccccactagcgtggccgcgagcctcggtgagccggccgtattcccgctctcgcttagggggcacaggcgcaggcatcggcccggccactccaagccttcggtgcgcgggcgcgtctgggatacgggcccgggaggcgccgccctccgtccgcccggtgcctctcaggaacagcgaaccggagagagcgccggagagttgggctcagtgcagagctcggcgccggggcccatgcccgtgcgcccccgcaggccggcgccatggcctccgggagtgtggccgagtgcctgcagcaggagaccacctgccccgtgtgcctgcagtacttcgcagagcccatgatgctcgactgcggccataacatctgttgcgcgtgcctcgcccgctgctggggcacggcagagactaacgtgtcgtgcccgcagtgccgggagaccttcccgcagaggcacatgcggcccaaccggcacctggccaacgtgacccaactggtgaagcagctgcgcaccgagcggccgtcggggcccggcggcgagatgggcgtgtgcgagaagcaccgcgagcccctgaagctgtactgcgaggaggaccagatgcccatctgcgtggtgtgcgaccgctcccgcgagcaccgcggccacagcgtgctgccgctcgaggaggcggtggagggcttcaaggagcaaatccagaaccagctcgaccatttaaaaagagtgaaagatttaaagaagagacgtcgggcccagggggaacaggcacgagctgaactcttgagcctaacccagatggagagggagaagattgtttgggagtttgagcagctgtatcactccttaaaggagcatgagtatcgcctcctggcccgccttgaggagctagacttggccatctacaatagcatcaatggtgccatcacccagttctcttgcaacatctcccacctcagcagcctgatcgctcagctagaagagaagcagcagcagcccaccagggagctcctgcaggacattggggacacattgagcagggctgaaagaatcaggattcctgaaccttggatcacacctccagatttgcaagagaaaatccacatttttgcccaaaaatgtctattcttgacggagagtctaaagcagttcacagaaaaaatgcagtcagatatggagaaaatccaagaattaagagaggctcagttatactcagtggacgtgactctggacccagacacggcctaccccagcctgatcctctctgataatctgcggcaagtgcggtacagttacctccaacaggacctgcctgacaaccccgagaggtctccttctacaacgtgacagagaggtgtcacaccttcactttctctcatgctaccttttgtgggcctgtccggccctacttcagtctgagttactcgggagggaaaagtgcagctcctctgatcatctgccccatgagtgggatagatgggttttctggccatgttgggaatcatggtcattccatggagacctccccttgaggaggtgaattcaggccaaaagggctgttggctgtaatcctacgccaggcacaaggcatcttgttgccttgccacgtcctgtcacagctgggtatccttaccatgttccacgcccttgcagtgggagacaggatgtccatgttctctaccatccttttccttcccatgcagattgtgaaatgtaatgagatgtatcaagatatcctagaaataaaaaccagatgtccacctccagtgtttcatactttctggttttacacatcgctggagggataaagagtatggataatctttggatttggagagccgttcaagatacttccagcttcttggctcagcctggcttcctctggttcagccccacataatgattatggctatttgctgtcatttctgggctagggctcctttctaacaacctagactggaataaggccctgtcagcatggctccctttatcccagttttccgtctgggaacagtacctctgcccctgattcccaatgtgccatagttttattaactccattaaagaagcctgtatgtgttttggttagttacagttattttacaataatggtgggtaatggccccacctctgttatgagataatgttctaatcaatgtctctgcctttgtatcttttctgagggctttgtctgttctcttcattctaatgaaaggtgtattctagtgctgggtgcatatcatccaggataatattctgcccaactccatcctctgttactagatcccttaccagtcacatttgtggactggtggccagtcgtataccatccctggaaggattctgggacaatattccagggattcattgacttcttggctccttttctccatttcctttgggggaagggggaattgaccatgcttaagtgcatcctatcaaggggcagctccgtccccatggccattggatcatgagacactctgaagtcagaaggctggggcagatcacttcaagcaagcccccatgatggttctcagtcctgcttctctgtgggtacgtgcccctctgtttaaaaataaactgaatatggatgttta

SEQ ID NO: 32558 - DNA, 1813 bp, Homo sapiens; identical to SEQ ID NO: 32554
  source 1..1813: mol_type = unassigned DNA

SEQ ID NO: 32559 - DNA, 1103 bp, Homo sapiens
  source 1..1103: mol_type = unassigned DNA
tttacgctgccgccggcatccgctcggacgcggccacgttgtcttgcgcgctttgcccgcctggccctgggactctgaccctcggctaccctttcctgccccactagcgtggccgcgagcctcggtgagccggccgtattcccgctctcgcttagggggcacaggcgcaggcatcggcccggccactccaagccttcggtgcgcgggcgcgtctgggatacgggcccgggaggcgccgccctccgtccgcccggtgcctctcaggaacagcgaaccggagagagcgccggagagttgggctcagtgcggagctcggcgccggggcccatgcccgtgcgcccccgcaggccggcgccatggcctccgggagtgtggccgagtgcctgcagcaggagaccacctgccccgtgtgcctgcagtacttcgcagagcccatgatgctcgactgcggccataacatctgttgcgcgtgcctcgcccgctgctggggcacggcagagactaacgtgtcgtgcccgcagtgccgggagaccttcccgcagaggcacatgcggcccaaccggcacctggccaacgtgacccaactggtaaagcagctgcgcaccgagcggccgtcggggcccggcggcgagatgggcgtgtgcgagaagcaccgcgagcccctgaagctgtactgcgaggaggaccagatgcccatctgcgtggtgtgcgaccgctcccgcgagcaccgcggccacagcgtgctgccgctcgaggaggcggtggagggcttcaaggagcaaatccagaaccagctcgaccatttaaaaagagtgaaagatttaaagaagagacgtcgggcccagggggaacaggcacgagctgaactcttgagcctaacccagatggagagggagaagattgtttgggagtttgagcagctgtatcactccttaaaggagcatgagtatcgcctcctggcccgccttgaggagctagacttggccatctacaatagcatcaatggtgccatcacccagttctcttgcaacatctcccacctcagcagcctgatcgctcagctagaagagaagcagcagcagcccaccagggagctcctgcag

SEQ ID NO: 32560 - DNA, 2901 bp, Homo sapiens
  source 1..2901: mol_type = unassigned DNA
cctgggactctgaccctcggctaccctttcctgccccactagcgtggccgcgagcctcggtgagccggccgtattcccgctctcgcttagggggcacaggcgcaggcatcggcccggccactccaagccttcggtgcgcgggcgcgtctgggatacgggcccgggaggcgccgccctccgtccgcccggtgcctctcaggaacagcgaaccggagagagcgccggagagttgggctcagtgcggagctcggcgccggggcccatgcccgtgcgcccccgcaggccggcgccatggcctccgggagtgtggccgagtgcctgcagcaggagaccacctgccccgtgtgcctgcagtacttcgcagagcccatgatgctcgactgcggccataacatctgttgcgcgtgcctcgcccgctgctggggcacggcagagactaacgtgtcgtgcccgcagtgccgggagaccttcccgcagaggcacatgcggcccaaccggcacctggccaacgtgacccaactggtaaagcagctgcgcaccgagcggccgtcggggcccggcggcgagatgggcgtgtgcgagaagcaccgcgagcccctgaagctgtactgcgaggaggaccagatgcccatctgcgtggtgtgcgaccgctcccgcgagcaccgcggccacagcgtgctgccgctcgaggaggcggtggagggcttcaaggagcaaatccagaaccagctcgaccatttaaaaagagtgaaagatttaaagaagagacgtcgggcccagggggaacaggcacgagctgaactcttgagcctaacccagatggagagggagaagattgtttgggagtttgagcagctgtatcactccttaaaggagcatgagtatcgcctcctggcccgccttgaggagctagacttggccatctacaatagcatcaatggtgccatcacccagttctcttgcaacatctcccacctcagcagcctgatcgctcagctagaagagaagcagcagcagcccaccagggagctcctgcaggacattggggacacattgagcagggctgaaagaatcaggattcctgaaccttggatcacacctccagatttgcaagagaaaatccacatttttgcccaaaaatgtctattcttgacggagagtctaaagcagttcacagaaaaaatgcagtcagatatggagaaaatccaagaattaagagaggctcagttatactcagtggacgtgactctggacccagacacggcctaccccagcctgatcctctctgataatctgcggcaagtgcggtacagttacctccaacaggacctgcctgacaaccccgagaggttcaatctgtttccctgtgtcttgggctctccatgcttcatcgccgggagacattattgggaggtagaggtgggagataaagccaagtggaccataggtgtctgtgaagactcagtgtgcagaaaaggtggagtaacctcagccccccagaatggattctgggcagtgtctttgtggtatgggaaagaatattgggctcttacctccccaatgactgccctacccctgcggaccccgctccagcgggtggggattttcttggactatgatgctggtgaggtctccttctacaacgtgacagagaggtgtcacaccttcactttctctcatgctaccttttgtgggcctgtccggccctacttcagtctgagttactcgggagggaaaagtgcagctcctctgatcatctgccccatgagtgggatagatgggttttctggccatgttgggaatcatggtcattccatggagacctccccttgaggaggtgaattcaggccaaaagggctgttggctgtaatcctacgccaggcacaaggcatcttgttgccttgccacgtcctgtcacagctgggtatccttaccatgttccacgcccttgcagtgggagacaggatgtccatgttctctaccatccttttccttcccatgcagattgtgaaatgtaatgagatgtatcaagatatcctagaaataaaaaccagatgtccacctccagtgtttcatactttctggttttacacatcgctggagggataaagagtatggataatctttggatttggagagccgttcaagatacttccagcttcttggctcagcctggcttcctctggttcagccccacataatgattatggctatttgctgtcatttctgggctagggctcctttctaacaacctagactggaataaggccctgtcagcatggctccctttatcccagttttccgtctgggaacagtacctctgcccctgattcccaatgtgccatagttttattaactccattaaagaagcctgtatgtgttttggttagttacagttattttacaataatggtgggtaatggccccacctctgttatgagataatgttctaatcaatgtctctgcctttgtatcttttctgagggctttgtctgttctcttcattctaatgaaaggtgtattctagtgctgggtgcatatcatccaggataatattctgcccaactccatcctctgttactagatcccttaccagtcacatttgtggactggtggccagtcgtataccatccctggaaggattctgggacaatattccagggattcattgacttcttggctccttttctccatttcctttgggggaagggggaattgaccatgcttaagtgcatcctatcaaggggcagctccgtccccatggccattggatcatgagacactctgaagtcagaaggctggggcagatcacttcaagcaagcccccatgatggttctcagtcctgcttctctgtgggtacgtgcccctctgtttaaaaataaactgaatatggatgttta

SEQ ID NO: 32561 - DNA, 2967 bp, Homo sapiens
  source 1..2967: mol_type = unassigned DNA
gtttacgctgccgccggcatccgctcggacgcggccacgttgtcttgcgcgctttgcccgcctggccctgggactctgaccctcggctaccctttcctgccccactagcgtggccgcgagcctcggtgagccggccgtattcccgctctcgcttagggggcacaggcgcaggcatcggcccggccactccaagccttcggtgcgcgggcgcgtctgggatacgggcccgggaggcgccgccctccgtccgcccggtgcctctcaggaacagcgaaccggagagagcgccggagagttgggctcagtgcagagctcggcgccggggcccatgcccgtgcgcccccgcaggccggcgccatggcctccgggagtgtggccgagtgcctgcagcaggagaccacctgccccgtgtgcctgcagtacttcgcagagcccatgatgctcgactgcggccataacatctgttgcgcgtgcctcgcccgctgctggggcacggcagagactaacgtgtcgtgcccgcagtgccgggagaccttcccgcagaggcacatgcggcccaaccggcacctggccaacgtgacccaactggtgaagcagctgcgcaccgagcggccgtcggggcccggcggcgagatgggcgtgtgcgagaagcaccgcgagcccctgaagctgtactgcgaggaggaccagatgcccatctgcgtggtgtgcgaccgctcccgcgagcaccgcggccacagcgtgctgccgctcgaggaggcggtggagggcttcaaggagcaaatccagaaccagctcgaccatttaaaaagagtgaaagatttaaagaagagacgtcgggcccagggggaacaggcacgagctgaactcttgagcctaacccagatggagagggagaagattgtttgggagtttgagcagctgtatcactccttaaaggagcatgagtatcgcctcctggcccgccttgaggagctagacttggccatctacaatagcatcaatggtgccatcacccagttctcttgcaacatctcccacctcagcagcctgatcgctcagctagaagagaagcagcagcagcccaccagggagctcctgcaggacattggggacacattgagcagggctgaaagaatcaggattcctgaaccttggatcacacctccagatttgcaagagaaaatccacatttttgcccaaaaatgtctattcttgacggagagtctaaagcagttcacagaaaaaatgcagtcagatatggagaaaatccaagaattaagagaggctcagttatactcagtggacgtgactctggacccagacacggcctaccccagcctgatcctctctgataatctgcggcaagtgcggtacagttacctccaacaggacctgcctgacaaccccgagaggttcaatctgtttccctgtgtcttgggctctccatgcttcatcgccgggagacattattgggaggtagaggtgggagataaagccaagtggaccataggtgtctgtgaagactcagtgtgcagaaaaggtggagtaacctcagccccccagaatggattctgggcagtgtctttgtggtatgggaaagaatattgggctcttacctccccaatgactgccctacccctgcggaccccgctccagcgggtggggattttcttggactatgatgctggtgaggtctccttctacaacgtgacagagaggtgtcacaccttcactttctctcatgctaccttttgtgggcctgtccggccctacttcagtctgagttactcgggagggaaaagtgcagctcctctgatcatctgccccatgagtgggatagatgggttttctggccatgttgggaatcatggtcattccatggagacctccccttgaggaggtgaattcaggccaaaagggctgttggctgtaatcctacgccaggcacaaggcatcttgttgccttgccacgtcctgtcacagctgggtatccttaccatgttccacgcccttgcagtgggagacaggatgtccatgttctctaccatccttttccttcccatgcagattgtgaaatgtaatgagatgtatcaagatatcctagaaataaaaaccagatgtccacctccagtgtttcatactttctggttttacacatcgctggagggataaagagtatggataatctttggatttggagagccgttcaagatacttccagcttcttggctcagcctggcttcctctggttcagccccacataatgattatggctatttgctgtcatttctgggctagggctcctttctaacaacctagactggaataaggccctgtcagcatggctccctttatcccagttttccgtctgggaacagtacctctgcccctgattcccaatgtgccatagttttattaactccattaaagaagcctgtatgtgttttggttagttacagttattttacaataatggtgggtaatggccccacctctgttatgagataatgttctaatcaatgtctctgcctttgtatcttttctgagggctttgtctgttctcttcattctaatgaaaggtgtattctagtgctgggtgcatatcatccaggataatattctgcccaactccatcctctgttactagatcccttaccagtcacatttgtggactggtggccagtcgtataccatccctggaaggattctgggacaatattccagggattcattgacttcttggctccttttctccatttcctttgggggaagggggaattgaccatgcttaagtgcatcctatcaaggggcagctccgtccccatggccattggatcatgagacactctgaagtcagaaggctggggcagatcacttcaagcaagcccccatgatggttctcagtcctgcttctctgtgggtacgtgcccctctgtttaaaaataaactgaatatggatgttta

SEQ ID NO: 32562 - DNA, 1103 bp, Homo sapiens
  source 1..1103: mol_type = unassigned DNA
tttacgctgccgccggcatccgctcggacgcggccacgttgtcttgcgcgctttgcccgcctggccctgggactctgaccctcggctaccctttcctgccccactagcgtggccgcgagcctcggtgagccggccgtattcccgctctcgcttagggggcacaggcgcaggcatcggcccggccactccaagccttcggtgcgcgggcgcgtctgggatacgggcccgggaggcgccgccctccgtccgcccggtgcctctcaggaacagcgaaccggagagagcgccggagagttgggctcagtgcagagctcggcgccggggcccatgcccgtgcgcccccgcaggccggcgccatggcctccgggagtgtggccgagtgcctgcagcaggagaccacctgccccgtgtgcctgcagtacttcgcagagcccatgatgctcgactgcggccataacatctgttgcgcgtgcctcgcccgctgctggggcacggcagagactaacgtgtcgtgcccgcagtgccgggagaccttcccgcagaggcacatgcggcccaaccggcacctggccaacgtgacccaactggtaaagcagctgcgcaccgagcggccgtcggggcccggcggcgagatgggcgtgtgcgagaagcaccgcgagcccctgaagctgtactgcgaggaggaccagatgcccatctgcgtggtgtgcgaccgctcccgcgagcaccgcggccacagcgtgctgccgctcgaggaggcggtggagggcttcaaggagcaaatccagaaccagctcgaccatttaaaaagagtgaaagatttaaagaagagacgtcgggcccagggggaacaggcacgagctgaactcttgagcctaacccagatggagagggagaagattgtttgggagtttgagcagctgtatcactccttaaaggagcatgagtatcgcctcctggcccgccttgaggagctagacttggccatctacaatagcatcaatggtgccatcacccagttctcttgcaacatctcccacctcagcagcctgatcgctcagctagaagagaagcagcagcagcccaccagggagctcctgcag

SEQ ID NO: 32563 - DNA, 2967 bp, Homo sapiens; identical to SEQ ID NO: 32551
  source 1..2967: mol_type = unassigned DNA

SEQ ID NO: 32564 - DNA, 1812 bp, Homo sapiens
  source 1..1812: mol_type = unassigned DNA
ctaaagcagttcacagaaaaaatgcagtcagatatggagaaaatccaagaatcagctgactcactggaaggtggaattcttgatcttggctcagttttatcccatattctaccagtctcagaattaagagaggctcagttatactcagtggacgtgactctggacccagacacggcctaccccagcctgatcctctctgataatctgcggcaagtgcggtacagttacctccaacaggacctgcctgacaaccccgagaggttcaatctgtttccctgtgtcttgggctctccatgcttcatcgccgggagacattattgggaggtagaggtgggagataaagccaagtggaccataggtgtctgtgaagactcagtgtgcagaaaaggtggagtaacctcagccccccagaatggattctgggcagtgtctttgtggtatgggaaagaatattgggctcttacctccccaatgactgccctacccctgcggaccccgctccagcgggtggggattttcttggactatgatgctggtgaggtctccttctacaacgtgacagagaggtgtcacaccttcactttctctcatgctaccttttgtgggcctgtccggccctacttcagtctgagttactcgggagggaaaagtgcagctcctctgatcatctgccccatgagtgggatagatgggttttctggccatgttgggaatcatggtcattccatggagacctccccttgaggaggtgaattcaggccaaaagggctgttggctgtaatcctacgccaggcacaaggcatcttgttgccttgccacgtcctgtcacagctgggtatccttaccatgttccacgcccttgcagtgggagacaggatgtccatgttctctaccatccttttccttcccatgcagattgtgaaatgtaatgagatgtatcaagatatcctagaaataaaaaccagatgtccacctccagtgtttcatactttctggttttacacatcgctggagggataaagagtatggataatctttggatttggagagccgttcaagatacttccagcttcttggctcagcctggcttcctctggttcagccccacataatgattatggctatttgctgtcatttctgggctagggctcctttctaacaacctagactggaataaggccctgtcagcatggctccctttatcccagttttccgtctgggaacagtacctctgcccctgattcccaatgtgccatagttttattaactccattaaagaagcctgtatgtgttttggttagttacagttattttacaataatggtgggtaatggccccacctctgttatgagataatgttctaatcaatgtctctgcctttgtatcttttctgagggctttgtctgttctcttcattctaatgaaaggtgtattctagtgctgggtgcatatcatccaggataatattctgcccaactccatcctctgttactagatcccttaccagtcacatttgtggactggtggccagtcgtataccatccctggaaggattctgggacaatattccagggattcattgacttcttggctccttttctccatttcctttgggggaagggggaattgaccatgcttaagtgcatcctatcaaggggcagctccgtccccatggccattggatcatgagacactctgaagtcagaaggctggggcagatcacttcaagcaagcccccatgatggttctcagtcctgcttctctgtgggtacgtgcccctctgtttaaaaataaactgaatatggatgttta

SEQ ID NO: 32565 - DNA, 1104 bp, Homo sapiens
  source 1..1104: mol_type = unassigned DNA
gtttacgctgccgccggcatccgctcggacgcggccacgttgtcttgcgcgctttgcccgcctggccctgggactctgaccctcggctaccctttcctgccccactagcgtggccgcgagcctcggtgagccggccgtattcccgctctcgcttagggggcacaggcgcaggcatcggcccggccactccaagccttcggtgcgcgggcgcgtctgggatacgggcccgggaggcgccgccctccgtccgcccggtgcctctcaggaacagcgaaccggagagagcgccggagagttgggctcagtgcagagctcggcgccggggcccatgcccgtgcgcccccgcaggccggcgccatggcctccgggagtgtggccgagtgcctgcagcaggagaccacctgccccgtgtgcctgcagtacttcgcagagcccatgatgctcgactgcggccataacatctgttgcgcgtgcctcgcccgctgctggggcacggcagagactaacgtgtcgtgcccgcagtgccgggagaccttcccgcagaggcacatgcggcccaaccggcacctggccaacgtgacccaactggtaaagcagctgcgcaccgagcggccgtcggggcccggcggcgagatgggcgtgtgcgagaagcaccgcgagcccctgaagctgtactgcgaggaggaccagatgcccatctgcgtggtgtgcgaccgctcccgcgagcaccgcggccacagcgtgctgccgctcgaggaggcggtggagggcttcaaggagcaaatccagaaccagctcgaccatttaaaaagagtgaaagatttaaagaagagacgtcgggcccagggggaacaggcacgagctgaactcttgagcctaacccagatggagagggagaagattgtttgggagtttgagcagctgtatcactccttaaaggagcatgagtatcgcctcctggcccgccttgaggagctagacttggccatctacaatagcatcaatggtgccatcacccagttctcttgcaacatctcccacctcagcagcctgatcgctcagctagaagagaagcagcagcagcccaccagggagctcctgcag

SEQ ID NO: 32566 - DNA, 1411 bp, Homo sapiens
  source 1..1411: mol_type = unassigned DNA
aattaagagaggctcagttatactcagtggacgtgactctggacccagacacggcctaccccagcctgatcctctctgataatctgcggcaagtgcggtacagttacctccaacaggacctgcctgacaaccccgagaggtctccttctacaacgtgacagagaggtgtcacaccttcactttctctcatgctaccttttgtgggcctgtccggccctacttcagtctgagttactcgggagggaaaagtgcagctcctctgatcatctgccccatgagtgggatagatgggttttctggccatgttgggaatcatggtcattccatggagacctccccttgaggaggtgaattcaggccaaaagggctgttggctgtaatcctacgccaggcacaaggcatcttgttgccttgccacgtcctgtcacagctgggtatccttaccatgttccacgcccttgcagtgggagacaggatgtccatgttctctaccatccttttccttcccatgcagattgtgaaatgtaatgagatgtatcaagatatcctagaaataaaaaccagatgtccacctccagtgtttcatactttctggttttacacatcgctggagggataaagagtatggataatctttggatttggagagccgttcaagatacttccagcttcttggctcagcctggcttcctctggttcagccccacataatgattatggctatttgctgtcatttctgggctagggctcctttctaacaacctagactggaataaggccctgtcagcatggctccctttatcccagttttccgtctgggaacagtacctctgcccctgattcccaatgtgccatagttttattaactccattaaagaagcctgtatgtgttttggttagttacagttattttacaataatggtgggtaatggccccacctctgttatgagataatgttctaatcaatgtctctgcctttgtatcttttctgagggctttgtctgttctcttcattctaatgaaaggtgtattctagtgctgggtgcatatcatccaggataatattctgcccaactccatcctctgttactagatcccttaccagtcacatttgtggactggtggccagtcgtataccatccctggaaggattctgggacaatattccagggattcattgacttcttggctccttttctccatttcctttgggggaagggggaattgaccatgcttaagtgcatcctatcaaggggcagctccgtccccatggccattggatcatgagacactctgaagtcagaaggctggggcagatcacttcaagcaagcccccatgatggttctcagtcctgcttctctgtgggtacgtgcccctctgtttaaaaataaactgaatatggatgttta

SEQ ID NO: 32567 - DNA, 1763 bp, Homo sapiens
  source 1..1763: mol_type = unassigned DNA
aatcagctgactcactggaaggtggaattcttgatcttggctcagttttatcccatattctaccagtctcagaattaagagaggctcagttatactcagtggacgtgactctggacccagacacggcctaccccagcctgatcctctctgataatctgcggcaagtgcggtacagttacctccaacaggacctgcctgacaaccccgagaggttcaatctgtttccctgtgtcttgggctctccatgcttcatcgccgggagacattattgggaggtagaggtgggagataaagccaagtggaccataggtgtctgtgaagactcagtgtgcagaaaaggtggagtaacctcagccccccagaatggattctgggcagtgtctttgtggtatgggaaagaatattgggctcttacctccccaatgactgccctacccctgcggaccccgctccagcgggtggggattttcttggactatgatgctggtgaggtctccttctacaacgtgacagagaggtgtcacaccttcactttctctcatgctaccttttgtgggcctgtccggccctacttcagtctgagttactcgggagggaaaagtgcagctcctctgatcatctgccccatgagtgggatagatgggttttctggccatgttgggaatcatggtcattccatggagacctccccttgaggaggtgaattcaggccaaaagggctgttggctgtaatcctacgccaggcacaaggcatcttgttgccttgccacgtcctgtcacagctgggtatccttaccatgttccacgcccttgcagtgggagacaggatgtccatgttctctaccatccttttccttcccatgcagattgtgaaatgtaatgagatgtatcaagatatcctagaaataaaaaccagatgtccacctccagtgtttcatactttctggttttacacatcgctggagggataaagagtatggataatctttggatttggagagccgttcaagatacttccagcttcttggctcagcctggcttcctctggttcagccccacataatgattatggctatttgctgtcatttctgggctagggctcctttctaacaacctagactggaataaggccctgtcagcatggctccctttatcccagttttccgtctgggaacagtacctctgcccctgattcccaatgtgccatagttttattaactccattaaagaagcctgtatgtgttttggttagttacagttattttacaataatggtgggtaatggccccacctctgttatgagataatgttctaatcaatgtctctgcctttgtatcttttctgagggctttgtctgttctcttcattctaatgaaaggtgtattctagtgctgggtgcatatcatccaggataatattctgcccaactccatcctctgttactagatcccttaccagtcacatttgtggactggtggccagtcgtataccatccctggaaggattctgggacaatattccagggattcattgacttcttggctccttttctccatttcctttgggggaagggggaattgaccatgcttaagtgcatcctatcaaggggcagctccgtccccatggccattggatcatgagacactctgaagtcagaaggctggggcagatcacttcaagcaagcccccatgatggttctcagtcctgcttctctgtgggtacgtgcccctctgtttaaaaataaactgaatatggatgttta

SEQ ID NO: 32568 - DNA, 1691 bp, Homo sapiens
  source 1..1691: mol_type = unassigned DNA
aattaagagaggctcagttatactcagtggacgtgactctggacccagacacggcctaccccagcctgatcctctctgataatctgcggcaagtgcggtacagttacctccaacaggacctgcctgacaaccccgagaggttcaatctgtttccctgtgtcttgggctctccatgcttcatcgccgggagacattattgggaggtagaggtgggagataaagccaagtggaccataggtgtctgtgaagactcagtgtgcagaaaaggtggagtaacctcagccccccagaatggattctgggcagtgtctttgtggtatgggaaagaatattgggctcttacctccccaatgactgccctacccctgcggaccccgctccagcgggtggggattttcttggactatgatgctggtgaggtctccttctacaacgtgacagagaggtgtcacaccttcactttctctcatgctaccttttgtgggcctgtccggccctacttcagtctgagttactcgggagggaaaagtgcagctcctctgatcatctgccccatgagtgggatagatgggttttctggccatgttgggaatcatggtcattccatggagacctccccttgaggaggtgaattcaggccaaaagggctgttggctgtaatcctacgccaggcacaaggcatcttgttgccttgccacgtcctgtcacagctgggtatccttaccatgttccacgcccttgcagtgggagacaggatgtccatgttctctaccatccttttccttcccatgcagattgtgaaatgtaatgagatgtatcaagatatcctagaaataaaaaccagatgtccacctccagtgtttcatactttctggttttacacatcgctggagggataaagagtatggataatctttggatttggagagccgttcaagatacttccagcttcttggctcagcctggcttcctctggttcagccccacataatgattatggctatttgctgtcatttctgggctagggctcctttctaacaacctagactggaataaggccctgtcagcatggctccctttatcccagttttccgtctgggaacagtacctctgcccctgattcccaatgtgccatagttttattaactccattaaagaagcctgtatgtgttttggttagttacagttattttacaataatggtgggtaatggccccacctctgttatgagataatgttctaatcaatgtctctgcctttgtatcttttctgagggctttgtctgttctcttcattctaatgaaaggtgtattctagtgctgggtgcatatcatccaggataatattctgcccaactccatcctctgttactagatcccttaccagtcacatttgtggactggtggccagtcgtataccatccctggaaggattctgggacaatattccagggattcattgacttcttggctccttttctccatttcctttgggggaagggggaattgaccatgcttaagtgcatcctatcaaggggcagctccgtccccatggccattggatcatgagacactctgaagtcagaaggctggggcagatcacttcaagcaagcccccatgatggttctcagtcctgcttctctgtgggtacgtgcccctctgtttaaaaataaactgaatatggatgttta

SEQ ID NO: 32569 - DNA, 2686 bp, Homo sapiens
  source 1..2686: mol_type = unassigned DNA
tttacgctgccgccggcatccgctcggacgcggccacgttgtcttgcgcgctttgcccgcctggccctgggactctgaccctcggctaccctttcctgccccactagcgtggccgcgagcctcggtgagccggccgtattcccgctctcgcttagggggcacaggcgcaggcatcggcccggccactccaagccttcggtgcgcgggcgcgtctgggatacgggcccgggaggcgccgccctccgtccgcccggtgcctctcaggaacagcgaaccggagagagcgccggagagttgggctcagtgcggagctcggcgccggggcccatgcccgtgcgcccccgcaggccggcgccatggcctccgggagtgtggccgagtgcctgcagcaggagaccacctgccccgtgtgcctgcagtacttcgcagagcccatgatgctcgactgcggccataacatctgttgcgcgtgcctcgcccgctgctggggcacggcagagactaacgtgtcgtgcccgcagtgccgggagaccttcccgcagaggcacatgcggcccaaccggcacctggccaacgtgacccaactggtaaagcagctgcgcaccgagcggccgtcggggcccggcggcgagatgggcgtgtgcgagaagcaccgcgagcccctgaagctgtactgcgaggaggaccagatgcccatctgcgtggtgtgcgaccgctcccgcgagcaccgcggccacagcgtgctgccgctcgaggaggcggtggagggcttcaaggagcaaatccagaaccagctcgaccatttaaaaagagtgaaagatttaaagaagagacgtcgggcccagggggaacaggcacgagctgaactcttgagcctaacccagatggagagggagaagattgtttgggagtttgagcagctgtatcactccttaaaggagcatgagtatcgcctcctggcccgccttgaggagctagacttggccatctacaatagcatcaatggtgccatcacccagttctcttgcaacatctcccacctcagcagcctgatcgctcagctagaagagaagcagcagcagcccaccagggagctcctgcaggacattggggacacattgagcagggctgaaagaatcaggattcctgaaccttggatcacacctccagatttgcaagagaaaatccacatttttgcccaaaaatgtctattcttgacggagagtctaaagcagttcacagaaaaaatgcagtcagatatggagaaaatccaagaattaagagaggctcagttatactcagtggacgtgactctggacccagacacggcctaccccagcctgatcctctctgataatctgcggcaagtgcggtacagttacctccaacaggacctgcctgacaaccccgagaggtctccttctacaacgtgacagagaggtgtcacaccttcactttctctcatgctaccttttgtgggcctgtccggccctacttcagtctgagttactcgggagggaaaagtgcagctcctctgatcatctgccccatgagtgggatagatgggttttctggccatgttgggaatcatggtcattccatggagacctccccttgaggaggtgaattcaggccaaaagggctgttggctgtaatcctacgccaggcacaaggcatcttgttgccttgccacgtcctgtcacagctgggtatccttaccatgttccacgcccttgcagtgggagacaggatgtccatgttctctaccatccttttccttcccatgcagattgtgaaatgtaatgagatgtatcaagatatcctagaaataaaaaccagatgtccacctccagtgtttcatactttctggttttacacatcgctggagggataaagagtatggataatctttggatttggagagccgttcaagatacttccagcttcttggctcagcctggcttcctctggttcagccccacataatgattatggctatttgctgtcatttctgggctagggctcctttctaacaacctagactggaataaggccctgtcagcatggctccctttatcccagttttccgtctgggaacagtacctctgcccctgattcccaatgtgccatagttttattaactccattaaagaagcctgtatgtgttttggttagttacagttattttacaataatggtgggtaatggccccacctctgttatgagataatgttctaatcaatgtctctgcctttgtatcttttctgagggctttgtctgttctcttcattctaatgaaaggtgtattctagtgctgggtgcatatcatccaggataatattctgcccaactccatcctctgttactagatcccttaccagtcacatttgtggactggtggccagtcgtataccatccctggaaggattctgggacaatattccagggattcattgacttcttggctccttttctccatttcctttgggggaagggggaattgaccatgcttaagtgcatcctatcaaggggcagctccgtccccatggccattggatcatgagacactctgaagtcagaaggctggggcagatcacttcaagcaagcccccatgatggttctcagtcctgcttctctgtgggtacgtgcccctctgtttaaaaataaactgaatatggatgttta

SEQ ID NO: 32570 - DNA, 1813 bp, Homo sapiens; identical to SEQ ID NO: 32554
  source 1..1813: mol_type = unassigned DNA

SEQ ID NO: 32571 - DNA, 1104 bp, Homo sapiens
  source 1..1104: mol_type = unassigned DNA
gtttacgctgccgccggcatccgctcggacgcggccacgttgtcttgcgcgctttgcccgcctggccctgggactctgaccctcggctaccctttcctgccccactagcgtggccgcgagcctcggtgagccggccgtattcccgctctcgcttagggggcacaggcgcaggcatcggcccggccactccaagccttcggtgcgcgggcgcgtctgggatacgggcccgggaggcgccgccctccgtccgcccggtgcctctcaggaacagcgaaccggagagagcgccggagagttgggctcagtgcggagctcggcgccggggcccatgcccgtgcgcccccgcaggccggcgccatggcctccgggagtgtggccgagtgcctgcagcaggagaccacctgccccgtgtgcctgcagtacttcgcagagcccatgatgctcgactgcggccataacatctgttgcgcgtgcctcgcccgctgctggggcacggcagagactaacgtgtcgtgcccgcagtgccgggagaccttcccgcagaggcacatgcggcccaaccggcacctggccaacgtgacccaactggtaaagcagctgcgcaccgagcggccgtcggggcccggcggcgagatgggcgtgtgcgagaagcaccgcgagcccctgaagctgtactgcgaggaggaccagatgcccatctgcgtggtgtgcgaccgctcccgcgagcaccgcggccacagcgtgctgccgctcgaggaggcggtggagggcttcaaggagcaaatccagaaccagctcgaccatttaaaaagagtgaaagatttaaagaagagacgtcgggcccagggggaacaggcacgagctgaactcttgagcctaacccagatggagagggagaagattgtttgggagtttgagcagctgtatcactccttaaaggagcatgagtatcgcctcctggcccgccttgaggagctagacttggccatctacaatagcatcaatggtgccatcacccagttctcttgcaacatctcccacctcagcagcctgatcgctcagctagaagagaagcagcagcagcccaccagggagctcctgcag

SEQ ID NO: 32572 - DNA, 2844 bp, Homo sapiens
  source 1..2844: mol_type = unassigned DNA
cccccggccggtccgcagccccgccccggcccctccctccggcctgtgcggctagtccggcggcggcgccggcgcggggacaggcggaggcgcgggcagggccgggcggacgggcgctggcagcagtagcagcgccgcgggcccttcagagtggccgcagtccgagctttgccctcgcatcctgttccaacgcgaggctggtgtgagtggcgggagccatctgtgggcgccatggcaaagagggaggacagccctggcccagaggtccagccaatggacaagcagttcctggtatgcagcatctgcctggatcggtaccagtgccccaaggttcttccttgcctgcacaccttctgtgagagatgtctccaaaactatatccctgcccagagcctgacgctatcctgtccagtatgccggcagacgtccatcctcccagagcagggcgtctcggcactgcagaacaacttcttcatcagcagcctcatggaggcaatgcagcaggcacctgatggggcccacgacccggaggacccccaccccctcagtgtagtggctggccgccctctctcctgccccaaccatgaaggcaagacgatggagttttactgtgaggcctgtgagacggccatgtgtggtgagtgccgcgccggggagcatcgtgagcagcacaaggcggccctgcagcgccagctcgaggctgtgcgtggccgattgccacagctgtccgcagcaattgccttagtcgggggcatcagccagcagctgcaggagcgcaaggcagaggccctggcccagatcagtgcagcgttcgaggacctggagcaagcactgcagcagcgcaagcaggctctggtcagcgacctggagaccatttgtggggccaaacagaaggtgttgcaaagccagctggacacactgcgccagggtcaggaacacatcggcagtagctgcagctttgcagagcaggcactgcgcctgggctcggccccggaggtgttgctggtgcgcaagcacatgcgagagcggctggctgcattggcggcacaggccttcccggagcggccacatgagaatgcacagctggaactggtccttgaggtggacggtctgcggcgatcggtgctcaatctgggcgcactgctcaccacgagcgccactgcacacgaaacggtggccacgggagagggcctgcgccaggcgctagtgggccagcctgcctcgctcactgtcactaccaaagacaaggacgggcggttggtgcgcacaggcagcgctgagctgcgtgcagagatcaccggcccggacggcacgcgccttccggtgccagtggtggaccacaagaatggcacatatgagctagtgtacacagcgcgcacggaaggcgagctgctcctctcggtgctgctctacggacagccagtgcgcggcagccccttccgcgtgcgtgccctgcgtccgggggacctgccaccttccccggacgatgtgaagcgccgtgtcaagtcccctggcggccccggcagccatgtgcgccagaaggcagtgcgtaggcccagctccatgtacagcacaggcggcaaacgaaaggacaacccaattgaggatgagctcgtcttccgtgttggcagtcgtggaagggagaaaggtgaattcaccaatttacaaggtgtgtccgcagccagcagcggccgcatcgtggtagcagacagcaacaaccagtgtattcaggttttctccaatgagggccagttcaagttccgttttggggtccgaggacgctcacctgggcagctgcagcgccccacaggtgtggcagtggacaccaatggagacataattgtggcagactatgacaaccgttgggtcagcatcttctcccctgagggcaagttcaagaccaagattggagctggccgcctcatgggccccaagggagtggccgtagaccggaatggacatatcattgtggtcgacaacaagtcttgctgcgtctttaccttccagcccaatggcaaactggttggccgttttgggggccgtggggccactgaccgccactttgcagggccccattttgtggctgtgaacaacaagaatgaaattgtagtaacggacttccataaccattcagtgaaggtgtacagtgccgatggagagttcctcttcaagtttggctcccatggcgagggcaatgggcagttcaatgcccccacaggagtagctgtggactccaatggaaacatcattgtggctgactggggcaacagccgcatccaggtattcgacagctctggctccttcctgtcctatatcaacacatctgcagaaccactgtatggtccacagggcctggcactgacctcggatggccatgtggtggtggctgatgctggcaaccactgctttaaagcctatcgctacctccagtagctgtacagaggccctgcctggcttgtggagggacagacattggggtgattggacaagagggtctggctgggaggtgggccagacctggcagcactgaatgtgggctgtgggcatgggtgcacccggtgccctccctctcctacccccacccccacggttgcactttatttattcggttcttgctttggtgactgggtgagcctggactgtggtcccaaggatgtgtgcagagcttcaccctacccttcttacacacctccccacccctgtcagtctgctccccatcccccagcctggggccagaacagcctaccccaggacaggagtccctctagttgtctccctaccaccctatacacactgacagagacagcaataccccaccccccatattaaataaatgtcttcacc

SEQ ID NO: 32573 - DNA, 2879 bp, Homo sapiens
  source 1..2879: mol_type = unassigned DNA
cccccggccggtccgcagccccgccccggcccctccctccggcctgtgcggctagtccggcggcggcgccggcgcggggacaggcggaggcgcgggcagggccgggcggacgggcgctggcagcagtagcagcgccgcgggcccttcagagtggccgcagtccgagctttgccctcgcatcctgttccaacgcgaggctggtgtgagtggcgggagccatctgtgggcgccatggcaaagagggaggacagccctggcccagaggtccagccaatggacaagcagttcctggtatgcagcatctgcctggatcggtaccagtgccccaaggttcttccttgcctgcacaccttctgtgagagatgtctccaaaactatatccctgcccagagcctgacgctatcctgtccagtatgccggcagacgtccatcctcccagagcagggcgtctcggcactgcagaacaacttcttcatcagcagcctcatggaggcaatgcagcaggcacctgatggggcccacgacccggaggacccccaccccctcagtgtagtggctggccgccctctctcctgccccaaccatgaaggcaagacgatggagttttactgtgaggcctgtgagacggccatgtgtggtgagtgccgcgccggggagcatcgtgagcatggcacagtgctgctgagggatgtggtggagcagcacaaggcggccctgcagcgccagctcgaggctgtgcgtggccgattgccacagctgtccgcagcaattgccttagtcgggggcatcagccagcagctgcaggagcgcaaggcagaggccctggcccagatcagtgcagcgttcgaggacctggagcaagcactgcagcagcgcaagcaggctctggtcagcgacctggagaccatttgtggggccaaacagaaggtgttgcaaagccagctggacacactgcgccagggtcaggaacacatcggcagtagctgcagctttgcagagcaggcactgcgcctgggctcggccccggaggtgttgctggtgcgcaagcacatgcgagagcggctggctgcattggcggcacaggccttcccggagcggccacatgagaatgcacagctggaactggtccttgaggtggacggtctgcggcgatcggtgctcaatctgggcgcactgctcaccacgagcgccactgcacacgaaacggtggccacgggagagggcctgcgccaggcgctagtgggccagcctgcctcgctcactgtcactaccaaagacaaggacgggcggttggtgcgcacaggcagcgctgagctgcgtgcagagatcaccggcccggacggcacgcgccttccggtgccagtggtggaccacaagaatggcacatatgagctagtgtacacagcgcgcacggaaggcgagctgctcctctcggtgctgctctacggacagccagtgcgcggcagccccttccgcgtgcgtgccctgcgtccgggggacctgccaccttccccggacgatgtgaagcgccgtgtcaagtcccctggcggccccggcagccatgtgcgccagaaggcagtgcgtaggcccagctccatgtacagcacaggcggcaaacgaaaggacaacccaattgaggatgagctcgtcttccgtgttggcagtcgtggaagggagaaaggtgaattcaccaatttacaaggtgtgtccgcagccagcagcggccgcatcgtggtagcagacagcaacaaccagtgtattcaggttttctccaatgagggccagttcaagttccgttttggggtccgaggacgctcacctgggcagctgcagcgccccacaggtgtggcagtggacaccaatggagacataattgtggcagactatgacaaccgttgggtcagcatcttctcccctgagggcaagttcaagaccaagattggagctggccgcctcatgggccccaagggagtggccgtagaccggaatggacatatcattgtggtcgacaacaagtcttgctgcgtctttaccttccagcccaatggcaaactggttggccgttttgggggccgtggggccactgaccgccactttgcagggccccattttgtggctgtgaacaacaagaatgaaattgtagtaacggacttccataaccattcagtgaaggtgtacagtgccgatggagagttcctcttcaagtttggctcccatggcgagggcaatgggcagttcaatgcccccacaggagtagctgtggactccaatggaaacatcattgtggctgactggggcaacagccgcatccaggtattcgacagctctggctccttcctgtcctatatcaacacatctgcagaaccactgtatggtccacagggcctggcactgacctcggatggccatgtggtggtggctgatgctggcaaccactgctttaaagcctatcgctacctccagtagctgtacagaggccctgcctggcttgtggagggacagacattggggtgattggacaagagggtctggctgggaggtgggccagacctggcagcactgaatgtgggctgtgggcatgggtgcacccggtgccctccctctcctacccccacccccacggttgcactttatttattcggttcttgctttggtgactgggtgagcctggactgtggtcccaaggatgtgtgcagagcttcaccctacccttcttacacacctccccacccctgtcagtctgctccccatcccccagcctggggccagaacagcctaccccaggacaggagtccctctagttgtctccctaccaccctatacacactgacagagacagcaataccccaccccccatattaaataaatgtcttcaccaa

SEQ ID NO: 32574 - DNA, 3033 bp, Homo sapiens
  source 1..3033: mol_type = unassigned DNA
ggtccgcagccccgccccggcccctccctccggcctgtgcggctagtccggcggcggcgccggcgcggggacaggcggaggcgcgggcagggccgggcggacgggcgctggcagcagtagcagcgccgcgggcccttcagagtggccgcagtccgagctttgccctcgcatcctgttccaacgcggaaaggacccctctggttctcctgtagcctgagccctgcctggaggaccccaggcccctccctggttctgacctcctcccttctgcaattggcttcagatcctgggctgcaaacctgcagggacagatggttgcaggttggaggggcaggctgcaccccagggagaggctggtgtgagtggcgggagccatctgtgggcgccatggcaaagagggaggacagccctggcccagaggtccagccaatggacaagcagttcctggtatgcagcatctgcctggatcggtaccagtgccccaaggttcttccttgcctgcacaccttctgtgagagatgtctccaaaactatatccctgcccagagcctgacgctatcctgtccagtatgccggcagacgtccatcctcccagagcagggcgtctcggcactgcagaacaacttcttcatcagcagcctcatggaggcaatgcagcaggcacctgatggggcccacgacccggaggacccccaccccctcagtgtagtggctggccgccctctctcctgccccaaccatgaaggcaagacgatggagttttactgtgaggcctgtgagacggccatgtgtggtgagtgccgcgccggggagcatcgtgagcatggcacagtgctgctgagggatgtggtggagcagcacaaggcggccctgcagcgccagctcgaggctgtgcgtggccgattgccacagctgtccgcagcaattgccttagtcgggggcatcagccagcagctgcaggagcgcaaggcagaggccctggcccagatcagtgcagcgttcgaggacctggagcaagcactgcagcagcgcaagcaggctctggtcagcgacctggagaccatttgtggggccaaacagaaggtgttgcaaagccagctggacacactgcgccagggtcaggaacacatcggcagtagctgcagctttgcagagcaggcactgcgcctgggctcggccccggaggtgttgctggtgcgcaagcacatgcgagagcggctggctgcattggcggcacaggccttcccggagcggccacatgagaatgcacagctggaactggtccttgaggtggacggtctgcggcgatcggtgctcaatctgggcgcactgctcaccacgagcgccactgcacacgaaacggtggccacgggagagggcctgcgccaggcgctagtgggccagcctgcctcgctcactgtcactaccaaagacaaggacgggcggttggtgcgcacaggcagcgctgagctgcgtgcagagatcaccggcccggacggcacgcgccttccggtgccagtggtggaccacaagaatggcacatatgagctagtgtacacagcgcgcacggaaggcgagctgctcctctcggtgctgctctacggacagccagtgcgcggcagccccttccgcgtgcgtgccctgcgtccgggggacctgccaccttccccggacgatgtgaagcgccgtgtcaagtcccctggcggccccggcagccatgtgcgccagaaggcagtgcgtaggcccagctccatgtacagcacaggcggcaaacgaaaggacaacccaattgaggatgagctcgtcttccgtgttggcagtcgtggaagggagaaaggtgaattcaccaatttacaaggtgtgtccgcagccagcagcggccgcatcgtggtagcagacagcaacaaccagtgtattcaggttttctccaatgagggccagttcaagttccgttttggggtccgaggacgctcacctgggcagctgcagcgccccacaggtgtggcagtggacaccaatggagacataattgtggcagactatgacaaccgttgggtcagcatcttctcccctgagggcaagttcaagaccaagattggagctggccgcctcatgggccccaagggagtggccgtagaccggaatggacatatcattgtggtcgacaacaagtcttgctgcgtctttaccttccagcccaatggcaaactggttggccgttttgggggccgtggggccactgaccgccactttgcagggccccattttgtggctgtgaacaacaagaatgaaattgtagtaacggacttccataaccattcagtgaaggtgtacagtgccgatggagagttcctcttcaagtttggctcccatggcgagggcaatgggcagttcaatgcccccacaggagtagctgtggactccaatggaaacatcattgtggctgactggggcaacagccgcatccaggtattcgacagctctggctccttcctgtcctatatcaacacatctgcagaaccactgtatggtccacagggcctggcactgacctcggatggccatgtggtggtggctgatgctggcaaccactgctttaaagcctatcgctacctccagtagctgtacagaggccctgcctggcttgtggagggacagacattggggtgattggacaagagggtctggctgggaggtgggccagacctggcagcactgaatgtgggctgtgggcatgggtgcacccggtgccctccctctcctacccccacccccacggttgcactttatttattcggttcttgctttggtgactgggtgagcctggactgtggtcccaaggatgtgtgcagagcttcaccctacccttcttacacacctccccacccctgtcagtctgctccccatcccccagcctggggccagaacagcctaccccaggacaggagtccctctagttgtctccctaccaccctatacacactgacagagacagcaataccccaccccccatattaaataaatgtcttcacc

SEQ ID NO: 32575 - DNA, 3044 bp, Homo sapiens
  source 1..3044: mol_type = unassigned DNA
ccttctcccagagttctgggtactgcccttctgccgcccagagatcgtgctgaggtacagacggtttctacgtcttcctggtcagccgatagactagcatattccataggagcactccaaggaagccggaaagggcgcctccaggaggcaggcggcccagacaggctcccagagtccgaaatccctgctgccccagctgccttttcttgacggagtctcatctcaatccctgagaccgactacaccgcccttcccggagccggaggcagctggcggagatccgggatccgagatccgggatccggctcgccggcccgccggctccctagcagcaccaaggaggcagcgtccgcaggagaggctggtgtgagtggcgggagccatctgtgggcgccatggcaaagagggaggacagccctggcccagaggtccagccaatggacaagcagttcctggtatgcagcatctgcctggatcggtaccagtgccccaaggttcttccttgcctgcacaccttctgtgagagatgtctccaaaactatatccctgcccagagcctgacgctatcctgtccagtatgccggcagacgtccatcctcccagagcagggcgtctcggcactgcagaacaacttcttcatcagcagcctcatggaggcaatgcagcaggcacctgatggggcccacgacccggaggacccccaccccctcagtgtagtggctggccgccctctctcctgccccaaccatgaaggcaagacgatggagttttactgtgaggcctgtgagacggccatgtgtggtgagtgccgcgccggggagcatcgtgagcatggcacagtgctgctgagggatgtggtggagcagcacaaggcggccctgcagcgccagctcgaggctgtgcgtggccgattgccacagctgtccgcagcaattgccttagtcgggggcatcagccagcagctgcaggagcgcaaggcagaggccctggcccagatcagtgcagcgttcgaggacctggagcaagcactgcagcagcgcaagcaggctctggtcagcgacctggagaccatttgtggggccaaacagaaggtgttgcaaagccagctggacacactgcgccagggtcaggaacacatcggcagtagctgcagctttgcagagcaggcactgcgcctgggctcggccccggaggtgttgctggtgcgcaagcacatgcgagagcggctggctgcattggcggcacaggccttcccggagcggccacatgagaatgcacagctggaactggtccttgaggtggacggtctgcggcgatcggtgctcaatctgggcgcactgctcaccacgagcgccactgcacacgaaacggtggccacgggagagggcctgcgccaggcgctagtgggccagcctgcctcgctcactgtcactaccaaagacaaggacgggcggttggtgcgcacaggcagcgctgagctgcgtgcagagatcaccggcccggacggcacgcgccttccggtgccagtggtggaccacaagaatggcacatatgagctagtgtacacagcgcgcacggaaggcgagctgctcctctcggtgctgctctacggacagccagtgcgcggcagccccttccgcgtgcgtgccctgcgtccgggggacctgccaccttccccggacgatgtgaagcgccgtgtcaagtcccctggcggccccggcagccatgtgcgccagaaggcagtgcgtaggcccagctccatgtacagcacaggcggcaaacgaaaggacaacccaattgaggatgagctcgtcttccgtgttggcagtcgtggaagggagaaaggtgaattcaccaatttacaaggtgtgtccgcagccagcagcggccgcatcgtggtagcagacagcaacaaccagtgtattcaggttttctccaatgagggccagttcaagttccgttttggggtccgaggacgctcacctgggcagctgcagcgccccacaggtgtggcagtggacaccaatggagacataattgtggcagactatgacaaccgttgggtcagcatcttctcccctgagggcaagttcaagaccaagattggagctggccgcctcatgggccccaagggagtggccgtagaccggaatggacatatcattgtggtcgacaacaagtcttgctgcgtctttaccttccagcccaatggcaaactggttggccgttttgggggccgtggggccactgaccgccactttgcagggccccattttgtggctgtgaacaacaagaatgaaattgtagtaacggacttccataaccattcagtgaaggtgtacagtgccgatggagagttcctcttcaagtttggctcccatggcgagggcaatgggcagttcaatgcccccacaggagtagctgtggactccaatggaaacatcattgtggctgactggggcaacagccgcatccaggtattcgacagctctggctccttcctgtcctatatcaacacatctgcagaaccactgtatggtccacagggcctggcactgacctcggatggccatgtggtggtggctgatgctggcaaccactgctttaaagcctatcgctacctccagtagctgtacagaggccctgcctggcttgtggagggacagacattggggtgattggacaagagggtctggctgggaggtgggccagacctggcagcactgaatgtgggctgtgggcatgggtgcacccggtgccctccctctcctacccccacccccacggttgcactttatttattcggttcttgctttggtgactgggtgagcctggactgtggtcccaaggatgtgtgcagagcttcaccctacccttcttacacacctccccacccctgtcagtctgctccccatcccccagcctggggccagaacagcctaccccaggacaggagtccctctagttgtctccctaccaccctatacacactgacagagacagcaataccccaccccccatattaaataaatgtcttcaccaag

SEQ ID NO: 32576 - DNA, 2435 bp, Homo sapiens
  source 1..2435: mol_type = unassigned DNA
gtattcctgtcagcccgggtctgggtcggagcgtctgtgggtgggggcacagatgattttcaaaagctgtgcctctctctgcccacgtgaggcgtgtccatgtccgtgagagcagcagggggattcttcgggctgtggctgctcacgtgagaggctggtgtgagtggcgggagccatctgtgggcgccatggcaaagagggaggacagccctggcccagaggtccagccaatggacaagcagttcctggtatgcagcatctgcctggatcggtaccagtgccccaaggttcttccttgcctgcacaccttctgtgagagatgtctccaaaactatatccctgcccagagcctgacgctatcctgtccagtatgccggcagacgtccatcctcccagagcagggcgtctcggcactgcagaacaacttcttcatcagcagcctcatggaggcaatgcagcaggcacctgatggggcccacgacccggaggacccccaccccctcagtgtagtggctggccgccctctctcctgccccaaccatgaaggcaagacgatggagttttactgtgaggcctgtgagacggccatgtgtggtgagtgccgcgccggggagcatcgtgagcatggcacagtgctgctgagggatgtggtggagcagcacaaggcggccctgcagcgccagctcgaggctgtgcgtggccgattgccacagctgtccgcagcaattgccttagtcgggggcatcagccagcagctgcaggagcgcaaggcagaggccctggcccagatcagtgcagcgttcgaggacctggagcaagcactgcagcagcgcaagcaggctctggtcagcgacctggagaccatttgtggggccaaacagaaggtgttgcaaagccagctggacacactgcgccagggtcaggaacacatcggcagtagctgcagctttgcagagcaggcactgcgcctgggctcggccccggaggtgttgctggtgcgcaagcacatgcgagagcggctggctgcattggcggcacaggccttcccggagcggccacatgagaatgcacagctggaactggtccttgaggtggacggtctgcggcgatcggtgctcaatctgggcgcactgctcaccacgagcgccactgcacacgaaacggtggccacgggagagggcctgcgccaggcgctagtgggccagcctgcctcgctcactgtcactaccaaagacaaggacgggcggttggtgcgcacaggcagcgctgagctgcgtgcagagatcaccggcccggacggcacgcgccttccggtgccagtggtggaccacaagaatggcacatatgagctagtgtacacagcgcgcacggaaggcgagctgctcctctcggtgctgctctacggacagccagtgcgcggcagccccttccgcgtgcgtgccctgcgtccgggggacctgccaccttccccggacgatgtgaagcgccgtgtcaagtcccctggcggccccggcagccatgtgcgccagaaggcagtgcgtaggcccagctccatgtacagcacaggcggcaaacgaaaggacaacccaattgaggatgagctcgtcttccgtgttggcagtcgtggaagggagaaaggtgaattcaccaatttacaaggtgtgtccgcagccagcagcggccgcatcgtggtagcagacagcaacaaccagtgtattcaggttttctccaatgagggccagttcaagttccgttttggggtccgaggacgctcacctgggcagctgcagcgccccacaggtgtggcagtggacaccaatggagacataattgtggcagactatgacaaccgttgggtcagcatcttctcccctgagggcaagttcaagaccaagattggagctggccgcctcatgggccccaagggagtggccgtagaccggaatggacatatcattgtggtcgacaacaagtcttgctgcgtctttaccttccagcccaatggcaaactggttggccgttttgggggccgtggggccactgaccgccactttgcagggccccattttgtggctgtgaacaacaagaatgaaattgtagtaacggacttccataaccattcagtgaaggtgtacagtgccgatggagagttcctcttcaagtttggctcccatggcgagggcaatgggcagttcaatgcccccacaggagtagctgtggactccaatggaaacatcattgatgtgtgcagagcttcaccctacccttcttacacacctccccacccctgtcagtctgctccccatcccccagcctggggccagaacagcctaccccaggacaggagtccctctagttgtctccctaccaccctatacacactgacagagacagcaataccccaccccccatattaaataaatgtcttcaccaag

SEQ ID NO: 32577 - DNA, 2580 bp, Homo sapiens
  source 1..2580: mol_type = unassigned DNA
agtagcagcgccgcgggcccttcagagtggccgcagtccgagctttgccctcgcatcctgttccaacgcgatgtctccaaaactatatccctgcccagagcctgacgctatcctgtccagtatgccggcagacgtccatcctcccagagcagggcgtctcggcactgcagaacaacttcttcatcagcagcctcatggaggcaatgcagcaggcacctgatggggcccacgacccggaggacccccaccccctcagtgtagtggctggccgccctctctcctgccccaaccatgaagacgatggagttttactgtgaggcctgtgagacggccatgtgtggtgagtgccgcgccggggagcatcgtgagcatggcacagtgctgctgagggatgtggtggagcagcacaaggcggccctgcagcgccagctcgaggctgtgcgtggccgattgccacagctgtccgcagcaattgccttagtcgggggcatcagccagcagctgcaggagcgcaaggcagaggccctggcccagatcagtgcagcgttcgaggacctggagcaagcactgcagcagcgcaagcaggctctggtcagcgacctggagaccatttgtggggccaaacagaaggtgttgcaaagccagctggacacactgcgccagggtcaggaacacatcggcagtagctgcagctttgcagagcaggcactgcgcctgggctcggccccggaggtgttgctggtgcgcaagcacatgcgagagcggctggctgcattggcggcacaggccttcccggagcggccacatgagaatgcacagctggaactggtccttgaggtggacggtctgcggcgatcggtgctcaatctgggcgcactgctcaccacgagcgccactgcacacgaaacggtggccacgggagagggcctgcgccaggcgctagtgggccagcctgcctcgctcactgtcactaccaaagacaaggacgggcggttggtgcgcacaggcagcgctgagctgcgtgcagagatcaccggcccggacggcacgcgccttccggtgccagtggtggaccacaagaatggcacatatgagctagtgtacacagcgcgcacggaaggcgagctgctcctctcggtgctgctctacggacagccagtgcgcggcagccccttccgcgtgcgtgccctgcgtccgggggacctgccaccttccccggacgatgtgaagcgccgtgtcaagtcccctggcggccccggcagccatgtgcgccagaaggcagtgcgtaggcccagctccatgtacagcacaggcggcaaacgaaaggacaacccaattgaggatgagctcgtcttccgtgttggcagtcgtggaagggagaaaggtgaattcaccaatttacaaggtgtgtccgcagccagcagcggccgcatcgtggtagcagacagcaacaaccagtgtattcaggttttctccaatgagggccagttcaagttccgttttggggtccgaggacgctcacctgggcagctgcagcgccccacaggtgtggcagtggacaccaatggagacataattgtggcagactatgacaaccgttgggtcagcatcttctcccctgagggcaagttcaagaccaagattggagctggccgcctcatgggccccaagggagtggccgtagaccggaatggacatatcattgtggtcgacaacaagtcttgctgcgtctttaccttccagcccaatggcaaactggttggccgttttgggggccgtggggccactgaccgccactttgcagggccccattttgtggctgtgaacaacaagaatgaaattgtagtaacggacttccataaccattcagtgaaggtgtacagtgccgatggagagttcctcttcaagtttggctcccatggcgagggcaatgggcagttcaatgcccccacaggagtagctgtggactccaatggaaacatcattgtggctgactggggcaacagccgcatccaggtattcgacagctctggctccttcctgtcctatatcaacacatctgcagaaccactgtatggtccacagggcctggcactgacctcggatggccatgtggtggtggctgatgctggcaaccactgctttaaagcctatcgctacctccagtagctgtacagaggccctgcctggcttgtggagggacagacattggggtgattggacaagagggtctggctgggaggtgggccagacctggcagcactgaatgtgggctgtgggcatgggtgcacccggtgccctccctctcctacccccacccccacggttgcactttatttattcggttcttgctttggtgactgggtgagcctggactgtggtcccaaggatgtgtgcagagcttcaccctacccttcttacacacctccccacccctgtcagtctgctccccatcccccagcctggggccagaacagcctaccccaggacaggagtccctctagttgtctccctaccaccctatacacactgacagagacagcaataccccaccccccatattaaataaatgtcttcacc

SEQ ID NO: 32578 - DNA, 2643 bp, Homo sapiens
  source 1..2643: mol_type = unassigned DNA
cccccggccggtccgcagccccgccccggcccctccctccggcctgtgcggctagtccggcggcggcgccggcgcggggacaggcggaggcgcgggcagggccgggcggacgggcgctggcagcagtagcagcgccgcgggcccttcagagtggccgcagtccgagctttgccctcgcatcctgttccaacgcgaggctggtgtgagtggcgggagccatctgtgggcgccatggcaaagagggaggacagccctggcccagaggtccagccaatggacaagcagttcctggtatgcagcatctgcctggatcggtaccagtgccccaaggttcttccttgcctgcacaccttctgtgagagatgtctccaaaactatatccctgcccagagcctgacgctatcctgtccagtatgccggcagacgtccatcctcccagagcagggcgtctcggcactgcagaacaacttcttcatcagcagcctcatggaggcaatgcagcaggcacctgatggggcccacgacccggaggacccccaccccctcagtgtagtggctggccgccctctctcctgccccaaccatgaaggcaagacgatggagttttactgtgaggcctgtgagacggccatgtgtggtgagtgccgcgccggggagcatcgtgagcatggcacagtgctgctgagggatgtggtggagcagcacaaggcggccctgcagcgccagctcgaggctgtgcgtggccgattgccacagctgtccgcagcaattgccttagtcgggggcatcagccagcagctgcaggagcgcaaggcagaggccctggcccagatcagtgcagcgttcgaggacctggagcaagcactgcagcagcgcaagcaggctctggtcagcgacctggtggacggtctgcggcgatcggtgctcaatctgggcgcactgctcaccacgagcgccactgcacacgaaacggtggccacgggagagggcctgcgccaggcgctagtgggccagcctgcctcgctcactgtcactaccaaagacaaggacgggcggttggtgcgcacaggcagcgctgagctgcgtgcagagatcaccggcccggacggcacgcgccttccggtgccagtggtggaccacaagaatggcacatatgagctagtgtacacagcgcgcacggaaggcgagctgctcctctcggtgctgctctacggacagccagtgcgcggcagccccttccgcgtgcgtgccctgcgtccgggggacctgccaccttccccggacgatgtgaagcgccgtgtcaagtcccctggcggccccggcagccatgtgcgccagaaggcagtgcgtaggcccagctccatgtacagcacaggcggcaaacgaaaggacaacccaattgaggatgagctcgtcttccgtgttggcagtcgtggaagggagaaaggtgaattcaccaatttacaaggtgtgtccgcagccagcagcggccgcatcgtggtagcagacagcaacaaccagtgtattcaggttttctccaatgagggccagttcaagttccgttttggggtccgaggacgctcacctgggcagctgcagcgccccacaggtgtggcagtggacaccaatggagacataattgtggcagactatgacaaccgttgggtcagcatcttctcccctgagggcaagttcaagaccaagattggagctggccgcctcatgggccccaagggagtggccgtagaccggaatggacatatcattgtggtcgacaacaagtcttgctgcgtctttaccttccagcccaatggcaaactggttggccgttttgggggccgtggggccactgaccgccactttgcagggccccattttgtggctgtgaacaacaagaatgaaattgtagtaacggacttccataaccattcagtgaaggtgtacagtgccgatggagagttcctcttcaagtttggctcccatggcgagggcaatgggcagttcaatgcccccacaggagtagctgtggactccaatggaaacatcattgtggctgactggggcaacagccgcatccaggtattcgacagctctggctccttcctgtcctatatcaacacatctgcagaaccactgtatggtccacagggcctggcactgacctcggatggccatgtggtggtggctgatgctggcaaccactgctttaaagcctatcgctacctccagtagctgtacagaggccctgcctggcttgtggagggacagacattggggtgattggacaagagggtctggctgggaggtgggccagacctggcagcactgaatgtgggctgtgggcatgggtgcacccggtgccctccctctcctacccccacccccacggttgcactttatttattcggttcttgctttggtgactgggtgagcctggactgtggtcccaaggatgtgtgcagagcttcaccctacccttcttacacacctccccacccctgtcagtctgctccccatcccccagcctggggccagaacagcctaccccaggacaggagtccctctagttgtctccctaccaccctatacacactgacagagacagcaataccccaccccccatattaaataaatgtcttcacc

SEQ ID NO: 32579 - DNA, 2432 bp, Homo sapiens
  source 1..2432: mol_type = unassigned DNA
gtattcctgtcagcccgggtctgggtcggagcgtctgtgggtgggggcacagatgattttcaaaagctgtgcctctctctgcccacgtgaggcgtgtccatgtccgtgagagcagcagggggattcttcgggctgtggctgctcacgtgagaggctggtgtgagtggcgggagccatctgtgggcgccatggcaaagagggaggacagccctggcccagaggtccagccaatggacaagcagttcctggtatgcagcatctgcctggatcggtaccagtgccccaaggttcttccttgcctgcacaccttctgtgagagatgtctccaaaactatatccctgcccagagcctgacgctatcctgtccagtatgccggcagacgtccatcctcccagagcagggcgtctcggcactgcagaacaacttcttcatcagcagcctcatggaggcaatgcagcaggcacctgatggggcccacgacccggaggacccccaccccctcagtgtagtggctggccgccctctctcctgccccaaccatgaaggcaagacgatggagttttactgtgaggcctgtgagacggccatgtgtggtgagtgccgcgccggggagcatcgtgagcatggcacagtgctgctgagggatgtggtggagcagcacaaggcggccctgcagcgccagctcgaggctgtgcgtggccgattgccacagctgtccgcagcaattgccttagtcgggggcatcagccagcagctgcaggagcgcaaggcagaggccctggcccagatcagtgcagcgttcgaggacctggagcaagcactgcagcagcgcaagcaggctctggtcagcgacctggagaccatttgtggggccaaacagaaggtgttgcaaagccagctggacacactgcgccagggtcaggaacacatcggcagtagctgcagctttgcagagcaggcactgcgcctgggctcggccccggaggtgttgctggtgcgcaagcacatgcgagagcggctggctgcattggcggcacaggccttcccggagcggccacatgagaatgcacagctggaactggtccttgaggtggacggtctgcggcgatcggtgctcaatctgggcgcactgctcaccacgagcgccactgcacacgaaacggtggccacgggagagggcctgcgccaggcgctagtgggccagcctgcctcgctcactgtcactaccaaagacaaggacgggcggttggtgcgcacaggcagcgctgagctgcgtgcagagatcaccggcccggacggcacgcgccttccggtgccagtggtggaccacaagaatggcacatatgagctagtgtacacagcgcgcacggaaggcgagctgctcctctcggtgctgctctacggacagccagtgcgcggcagccccttccgcgtgcgtgccctgcgtccgggggacctgccaccttccccggacgatgtgaagcgccgtgtcaagtcccctggcggccccggcagccatgtgcgccagaaggcagtgcgtaggcccagctccatgtacagcacaggcggcaaacgaaaggacaacccaattgaggatgagctcgtcttccgtgttggcagtcgtggaagggagaaaggtgaattcaccaatttacaaggtgtgtccgcagccagcagcggccgcatcgtggtagcagacagcaacaaccagtgtattcaggttttctccaatgagggccagttcaagttccgttttggggtccgaggacgctcacctgggcagctgcagcgccccacaggtgtggcagtggacaccaatggagacataattgtggcagactatgacaaccgttgggtcagcatcttctcccctgagggcaagttcaagaccaagattggagctggccgcctcatgggccccaagggagtggccgtagaccggaatggacatatcattgtggtcgacaacaagtcttgctgcgtctttaccttccagcccaatggcaaactggttggccgttttgggggccgtggggccactgaccgccactttgcagggccccattttgtggctgtgaacaacaagaatgaaattgtagtaacggacttccataaccattcagtgaaggtgtacagtgccgatggagagttcctcttcaagtttggctcccatggcgagggcaatgggcagttcaatgcccccacaggagtagctgtggactccaatggaaacatcattgtgtgcagagcttcaccctacccttcttacacacctccccacccctgtcagtctgctccccatcccccagcctggggccagaacagcctaccccaggacaggagtccctctagttgtctccctaccaccctatacacactgacagagacagcaataccccaccccccatattaaataaatgtcttcaccaag

SEQ ID NO: 32580 - DNA, 2043 bp, Homo sapiens
  source 1..2043: mol_type = unassigned DNA
attacacattcaaagtatccatttgttctcaagaggtagcaagaaacagtatccacagtggactccggggctcctacagacttggcacagcttcctacagtcttgaaacagccctgttgttctgtcatggccagtgggcagtttgtgaacaaactgcaagaggaagtgatctgccccatctgcctggacattctgcagaaacctgtcaccatcgactgtgggcacaatttctgcctcaaatgcatcactcagattggggaaacatcatgtggatttttcaaatgtcccctctgcaaaacttccgtaaggaagaacgcaatcaggttcaactcgctgttgcggaatctggtggagaaaatccaagctctacaagcctctgaggtgcagtccaaaaggaaagaggctacatgcccgaggcaccaggagatgttccactatttctgcgaggatgatgggaagttcctctgttttgtgtgttgtgaatccaaggaccacaaatcccataatgtcagcttgatcgaagaagctgcccagaattatcaggggcagattcaagagcagatccaagtcttgcagcaaaaggagaaggagacagtacaagtgaaggcacaaggtgtacacagggtcgatgtcttcacggaccaggtagaacatgagaagcaaaggatcctcacagaatttgaactcctgcatcaagtcctagaggaggagaagaatttcctgctatcacggatttactggctgggtcatgagggaacggaagcggggaaacactatgttgcctccactgagccacagttgaacgatctcaagaagctcgttgattccctgaagaccaagcagaacatgccacccaggcagctgctggaggatatcaaagtcgtcttgtgcagaagtgaagagtttcagtttctcaacccaacccctgttcctctggaactggagaaaaaactcagtgaagcaaaatcaagacacgactccatcacagggagcctgaaaaaattcaaagaccaactccaggctgataggaaaaaagatgaaaacagattcttcaaaagcatgaataaaaatgacatgaagagctggggcttgttacagaaaaataatcataaaatgaacaaaacctcagagcccgggtcatcttctgcaggcggcagaactacatcggggccaccaaatcaccactcttcagccccatcccactccctgtttcgggcctcgtctgctgggaaagtcacttttccagtatgtctcctggcctcttatgatgagatttctggtcaaggagcgagctctcaggatacgaagacatttgacgttgcgctgtccgaggagctccatgcggcactgagtgagtggctgacagcgatccgggcttggttttgtgaggttccttcaagctaagccagctcagagaacacggggagcggtggtgctacacggacttcggagcatagagtggcgctgagtgagtggctgagaccgaccacggttcttgacttagtggaattgggtcgaaggagtggagaatgggagggctcgggctactgagagtggagatgggggcgggggtggtggtgaagagagttggagaaggaatggacgagttcttgagcaaaaggaggggaagagacaatctccagccacccgccccacgcttgacttcttatcactttggctgtggtgccgcctagtggaaaaaggaagtccctgcagcagtccccgcactctttaagcagctgtttaccgaaggcaccagttcagccaggagtgaaatccggagaggagcaacgccagcctgggtcacagtccatcaaaccccatgagcccgaccactctcgctcttccttacattcccacgtcccccttctctcccaacccctcatatcagcaagggaaattaattaatgagatttgataaatcagtagatagaatgaggtccccattctgaaatatttagcagactggaaccaccacgcaagcctctgtagggggtggatggagacacttctaactttaataaactgcgactgaacgtggaa

SEQ ID NO: 32581 - DNA, 2025 bp, Homo sapiens
  source 1..2025: mol_type = unassigned DNA
atccatttgttctcaagaggtagcaagaaacagtatccacagtggactccggggctcctacagacttggcacagcttcctacagtcttgaaacagccctgttgttctgtcatggccagtgggcagtttgtgaacaaactgcaagaggaagtgatctgccccatctgcctggacattctgcagaaacctgtcaccatcgactgtgggcacaatttctgcctcaaatgcatcactcagattggggaaacatcatgtggatttttcaaatgtcccctctgcaaaacttccgtaaggaagaacgcaatcaggttcaactcgctgttgcggaatctggtggagaaaatccaagctctacaagcctctgaggtgcagtccaaaaggaaagaggctacatgcccgaggcaccaggagatgttccactatttctgcgaggatgatgggaagttcctctgttttgtgtgtcgtgaatccaaggaccacaaatcccataatgtcagcttgatcgaagaagctgcccagaattatcaggggcagattcaagagcagatccaagtcttgcagcaaaaggagaaggagacagtacaagtgaaggcacaaggtgtacacagggtcgatgtcttcacggaccaggtagaacatgagaagcaaaggatcctcacagaatttgaactcctgcatcaagtcctagaggaggagaagaatttcctgctatcacggatttactggctgggtcatgagggaacggaagcggggaaacactatgttgcctccactgagccacagttgaacgatctcaagaagctcgttgattccctgaagaccaagcagaacatgccacccaggcagctgctggagccagctcaaccacatcttcctagaagtgaagagtttcagtttctcaacccaacccctgttcctctggaactggagaaaaaactcagtgaagcaaaatcaagacatgactccatcacagggagcctaaaaaaattcaaagaccaactccaggctgataggaaaaaagatgaaaacagattcttcaaaagcatgaataaaaatgacatgaagagctggggcttgttacagaaaaataatcataaaatgaacaaaacctcagagcccgggtcatcttctgcaggcggcagaactacatcggggccaccaaatcaccactcttcagccccatcccactccctgtttcgggcctcgtctgctgggaaagtcacttttccagtatgtctcctggcctcttatgatgagatttctggtcaaggagcgagctctcaggatacgaagacatttgacgttgcgctgtccgaggagctccatgcggcactgagtgagtggctgacagcgatccgggcttggttttgtgaggttccttcaagctaagccagctcagagaacacggggagcggtggtgctacacggacttcggagcatagagtggcgctgagtgagtggctgagaccgaccacggttcttgacttagtggaattgggtcgaaggagtggagaatgggagggctcgggctactgagagtggagatgggggcgggggtggtggtgaagagagttggagaaggaatggacgaattcttgagcaaaaggaggggaagagacaatctccagccacccgccccacgcttgacttcttatcactttggctgtggtgccgcctagtggaaaaaggaagtccctgcagcagtccccgcactctttaagcagctgtttaccgaaggcaccagttcagccaggagtgaaatccggagaggagcaacgccagcctgggtcacagtccatcaaaccccatgagcccgaccactctcgctcttccttacattcccacgtcccccttctctcccaacccctcatatcagcaagggaaattaattaatgagatttgataaatcagtagatagaatgaggtccccattctgaaatatttagcagactggaaccaccacgcaagcctctgtagggggtggatggagacacttctaactttaataaactgcgactgaacgtgg

SEQ ID NO: 32582 - DNA, 2043 bp, Homo sapiens
  source 1..2043: mol_type = unassigned DNA
attacacattcaaagtatccatttgttctcaagaggtagcaagaaacagtatccacagtggactccggggctcctacagacttggcacagcttcctacagtcttgaaacagccctgttgttctgtcatggccagtgggcagtttgtgaacaaactgcaagaggaagtgatctgccccatctgcctggacattctgcagaaacctgtcaccatcgactgtgggcacaatttctgcctcaaatgcatcactcagattggggaaacatcatgtggatttttcaaatgtcccctctgcaaaacttccgtaaggaagaacgcaatcaggttcaactcgctgttgcggaatctggtggagaaaatccaagctctacaagcctctgaggtgcagtccaaaaggaaagaggctacatgcccgaggcaccaggagatgttccactatttctgcgaggatgatgggaagttcctctgttttgtgtgtcgtgaatccaaggaccacaaatcccataatgtcagcttgatcgaagaagctgcccagaattatcaggggcagattcaagagcagatccaagtcttgcagcaaaaggagaaggagacagtacaagtgaaggcacaaggtgtacacagggtcgatgtcttcacggaccaggtagaacatgagaagcaaaggatcctcacagaatttgaactcctgcatcaagtcctagaggaggagaagaatttcctgctatcacggatttactggctgggtcatgagggaacggaagcggggaaacactatgttgcctccactgagccacagttgaacgatctcaagaagctcgttgattccctgaagaccaagcagaacatgccacccaggcagctgctggaggatatcaaagtcgtcttgtgcagaagtgaagagtttcagtttctcaacccaacccctgttcctctggaactggagaaaaaactcagtgaagcaaaatcaagacatgactccatcacagggagcctaaaaaaattcaaagaccaactccaggctgataggaaaaaagatgaaaacagattcttcaaaagcatgaataaaaatgacatgaagagctggggcttgttacagaaaaataatcataaaatgaacaaaacctcagagcccgggtcatcttctgcaggcggcagaactacatcggggccaccaaatcaccactcttcagccccatcccactccctgtttcgggcctcgtctgctgggaaagtcacttttccagtatgtctcctggcctcttatgatgagatttctggtcaaggagcgagctctcaggatacgaagacatttgacgttgcgctgtccgaggagctccatgcggcactgagtgagtggctgacagcgatccgggcttggttttgtgaggttccttcaagctaagccagctcagagaacacggggagcggtggtgctacacggacttcggagcatagagtggcgctgagtgagtggctgagaccgaccacggttcttgacttagtggaattgggtcgaaggagtggagaatgggagggctcgggctactgagagtggagatgggggcgggggtggtggtgaagagagttggagaaggaatggacgaattcttgagcaaaaggaggggaagagacaatctccagccacccgccccacgcttgacttcttatcactttggctgtggtgccgcctagtggaaaaaggaagtccctgcagcagtccccgcactctttaagcagctgtttaccgaaggcaccagttcagccaggagtgaaatccggagaggagcaacgccagcctgggtcacagtccatcaaaccccatgagcccgaccactctcgctcttccttacattcccacgtcccccttctctcccaacccctcatatcagcaagggaaattaattaatgagatttgataaatcagtagatagaatgaggtccccattctgaaatatttagcagactggaaccaccacgcaagcctctgtagggggtggatggagacacttctaactttaataaactgcgactgaacgtggaa

SEQ ID NO: 32583 - DNA, 870 bp, Homo sapiens
  source 1..870: mol_type = unassigned DNA
attacacattcaaagtatccatttgttctcaagaggtagcaagaaacagtatccacagtggactccggggctcctacagacttggcacagcttcctacagtcttgaaacagccctgttgttctgtcatggccagtgggcagtttgtgaacaaactgcaagaggaagtgatctgccccatctgcctggacattctgcagaaacctgtcaccatcgactgtgggcacaatttctgcctcaaatgcatcactcagattggggaaacatcatgtggatttttcaaatgtcccctctgcaaaacttccgtaaggaagaacgcaatcaggttcaactcgctgttgcggaatctggtggagaaaatccaagctctacaagcctctgaggtgcagtccaaaaggaaagaggctacatgcccgaggcaccaggagatgttccactatttctgcgaggatgatgggaagttcctctgttttgtgtgtcgtgaatccaaggaccacaaatcccataatgtcagcttgatcgaagaagctgcccagaattatcaggggcagattcaagagcagatccaagtcttgcagcaaaaggagaaggagacagtacaagtgaaggcacaaggtgtacacagggtcgatgtcttcacggaccaggtagaacatgagaagcaaaggatcctcacagaatttgaactcctgcatcaagtcctagaggaggagaagaatttcctgctatcacggatttactggctgggtcatgagggaacggaagcggggaaacactatgttgcctccactgagccacagttgaacgatctcaagaagctcgttgattccctgaagaccaagcagaacatgccacccaggcagctgctggag

SEQ ID NO: 32584 - DNA, 2043 bp, Homo sapiens
  source 1..2043: mol_type = unassigned DNA
attacacattcaaagtatccatttgttctcaagaggtagcaagaaacagtatccacagtggactccggggctcctacagacttggcacagcttcctacagtcttgaaacagccctgttgttctgtcatggccagtgggcagtttgtgaacaaactgcaagaggaagtgatctgccccatctgcctggacattctgcagaaacctgtcaccatcgactgtgggcacaatttctgcctcaaatgcatcactcagattggggaaacatcatgtggatttttcaaatgtcccctctgcaaaacttccgtaaggaagaacgcaatcaggttcaactcgctgttgcggaatctggtggagaaaatccaagctctacaagcctctgaggtgcagtccaaaaggaaagaggctacatgcccgaggcaccaggagatgttccactatttctgcgaggatgatgggaagttcctctgttttgtgtgtcgtgaatccaaggaccacaaatcccataatgtcagcttgatcgaagaagctgcccagaattatcaggggcagattcaagagcagatccaagtcttgcagcaaaaggagaaggagacagtacaagtgaaggcacaaggtgtacacagggtcgatgtcttcacggaccaggtagaacatgagaagcaaaggatcctcacagaatttgaactcctgcatcaagtcctagaggaggagaagaatttcctgctatcacggatttactggctgggtcatgagggaacggaagcggggaaacactatgttgcctccactgagccacagttgaacgatctcaagaagctcgttgattccctgaagaccaagcagaacatgccacccaggcagctgctggaggatatcaaagtcgtcttgtgcagaagtgaagagtttcagtttctcaacccaacccctgttcctctggaactggagaaaaaactcagtgaagcaaaatcaagacacgactccatcacagggagcctgaaaaaattcaaagaccaactccaggctgataggaaaaaagatgaaaacagattcttcaaaagcatgaataaaaatgacatgaagagctggggcttgttacagaaaaataatcataaaatgaacaaaacctcagagcccgggtcatcttctgcaggcggcagaactacatcggggccaccaaatcaccactcttcagccccatcccactccctgtttcgggcctcgtctgctgggaaagtcacttttccagtatgtctcctggcctcttatgatgagatttctggtcaaggagcgagctctcaggatacgaagacatttgacgttgcgctgtccgaggagctccatgcggcactgagtgagtggctgacagcgatccgggcttggttttgtaaggttccttcaagctaagccagctcagagaacacggggagcggtggtgctccacggacttcggagcatagagtggcgctgagtgagtggctgagaccgaccacggttcttgacttagtggaattgggtcgaaggagtggagaatgggagggctcgggctactgagagtggagatgggggcgggggtggtggtgaagagagttggagaaggaatggacgagttcttgagcaaaaggaggggaagagacaatctccagccacccgccccacgcttgacttcttatcactttggctgtggtgccgcctagtggaaaaaggaagtccctgcagcagtccccgcactctttaagcagctgtttaccgaaggcaccagttcagccaggagtgaaatccagagacgagcaacgccagcctgggtcacagtccatcaaaccccatgagcccgaccactctcgctcttccttacattcccacgtcccccttctctcccaacccctcatatcagcaagggaaattaattaatgagatttgataaatcagtagatagaatgaggtccccattctgaaatatttagcagactggaaccaccacgcaagcctctgtagggggtggatggagacacttctaactttaataaactgcgactgaacgtggaa

SEQ ID NO: 32585 - DNA, 2043 bp, Homo sapiens
  source 1..2043: mol_type = unassigned DNA
attacacattcaaagtatccatttgttctcaagaggtagcaagaaacagtatccacagtggactccggggctcctacagacttggcacagcttcctacagtcttgaaacagccctgttgttctgtcatggccagtgggcagtttgtgaacaaactgcaagaggaagtgatctgccccatctgcctggacattctgcagaaacctgtcaccatcgactgtgggcacaatttctgcctcaaatgcatcactcagattggggaaacatcatgtggatttttcaaatgtcccctctgcaaaacttccgtaaggaagaacgcaatcaggttcaactcgctgttgcggaatctggtggagaaaatccaagctctacaagcctctgaggtgcagtccaaaaggaaagaggctacatgcccgaggcaccaggagatgttccactatttctgcgaggatgatgggaagttcctctgttttgtgtgtcgtgaatccaaggaccacaaatcccataatgtcagcttgatcgaagaagctgcccagaattatcaggggcagattcaagagcagatccaagtcttgcagcaaaaggagaaggagacagtacaagtgaaggcacaaggtgtacacagggtcgatgtcttcacggaccaggtagaacatgagaagcaaaggatcctcacagaatttgaactcctgcatcaagtcctagaggaggagaagaatttcctgctatcacggatttactggctgggtcatgagggaacggaagcggggaaacactatgttgcctccactgagccacagttgaacgatctcaagaagctcgttgattccctgaagaccaagcagaacatgccacccaggcagctgctggaggatatcaaagtcgtcttgtgcagaagtgaagagtttcagtttctcaacccaacccctgttcctctagaactggagaaaaaactcagtgaagcaaaatcaagacacgactccatcacagggagcctgaaaaaattcaaagaccaactccaggctgataggaaaaaagatgaaaacagattcttcaaaagcatgaataaaaatgacatgaagagctggggcttgttacagaaaaataatcataaaatgaacaaaacctcagagcccgggtcatcttctgcaggcggcagaactacatcggggccaccaaatcaccactcttcagccccatcccactccctgtttcgggcctcgtctgctgggaaagtcacttttccagtatgtctcctggcctcttatgatgagatttctggtcaaggagcgagctctcaggatacgaagacatttgacgttgcgctgtccgaggagctccatgcggcactgagtgagtggctgacagcgatccgggcttggttttgtgaggttccttcaagctaagccagctcagagaacacggggagcggtggtgctacacggacttcggagcatagagtggcgctgagtgagtggctgagaccgaccacggttcttgacttagtggaattgggtcgaaggagtggagaatgggagggctcgggctactgagagtggagatgggggcgggggtggtggtgaagagagttggagaaggaatggacgagttcttgagcaaaaggaggggaagagacaatctccagccacccgccccacgcttgacttcttatcactttggctgtggtgccgcctagtggaaaaaggaagtccctgcagcagtccccgcactctttaagcagctgtttaccgaaggcaccagttcagccaggagtgaaatccggagaggagcaacgccagcctgggtcacagtccatcaaaccccatgagcccgaccactctcgctcttccttacattcccacgtcccccttctctcccaacccctcatatcagcaagggaaattaattaatgagatttgataaatcagtagatagaatgaggtccccattctgaaatatttagcagactggaaccaccacgcaagcctctgtagggggtggatggagacacttctaactttaataaactgcgactgaacgtggaa

SEQ ID NO: 32586 - DNA, 2043 bp, Homo sapiens
  source 1..2043: mol_type = unassigned DNA
attacacattcaaagtatccatttgttctcaagaggtagcaagaaacagtatccacagtggactccggggctcctacagacttggcacagcttcctacagtcttgaaacagccctgttgttctgtcatggccagtgggcagtttgtgaacaaactgcaagaggaagtgatctgccccatctgcctggacattctgcagaaacctgtcaccatcgactgtgggcacaatttctgcctcaaatgcatcactcagattggggaaacatcatgtggatttttcaaatgtcccctctgcaaaacttccgtaaggaagaacgcaatcaggttcaactcgctgttgcggaatctggtggagaaaatccaagctctacaagcctctgaggtgcagtccaaaaggaaagaggctacatgcccgaggcaccaggagatgttccactatttctgcgaggatgatgggaagttcctctgttttgtgtgtcgtgaatccaaggaccacaaatcccataatgtcagcttgatcgaagaagctgcccagaattatcaggggcagattcaagagcagatccaagtcttgcagcaaaaggagaaggagacagtacaagtgaaggcacaaggtgtacacagggtcgatgtcttcacggaccaggtagaacatgagaagcaaaggatcctcacagaatttgaactcctgcatcaagtcctagaggaggagaagaatttcctgctatcacggatttactggctgggtcatgagggaacggaagcggggaaacactatgttgcctccactgagccacagttgaacgatctcaagaagctcgttgattccctgaagaccaagcagaacatgccacccaggcagctgctggaggatatcaaagtcgtcttgtgcagaagtgaagagtttcagtttctcaacccaacccctgttcctctagaactggagaaaaaactcagtgaagcaaaatcaagacacgactccatcacagggagcctgaaaaaattcaaagaccaactccaggctgataggaaaaaagatgaaaacagattcttcaaaagcatgaataaaaatgacatgaagagctggggcttgttacagaaaaataatcataaaatgaacaaaacctcagagcccgggtcatcttctgcaggcggcagaactacatcggggccaccaaatcaccactcttcagccccatcccactccctgtttcgggcctcgtctgctgggaaagtcacttttccagtatgtctcctggcctcttatgatgagatttctggtcaaggagcgagctctcaggatacgaagacatttgacgttgcgctgtccgaggagctccatgcggcactgagtgagtggctgacagcgatccgggcttggttttgtgaggttccttcaagctaagccagctcagagaacacggggagcggtggtgctacacggacttcggagcatagagtggcgctgagtgagtggctgagaccgaccacggttcttgacttagtggaattgggtcgaaggagtggagaatgggagggctcgggctactgagagtggagatgggggcgggggtggtggtgaagagagttggagaaggaatggacgaattcttgagcaaaaggaggggaagagacaatctccagccacccgccccacgcttgacttcttatcactttggctgtggtgccgcctagtggaaaaaggaagtccctgcagcagtccccgcactctttaagcagctgtttaccgaaggcaccagttcagccaggagtgaaatccggagaggagcaacgccagcctgggtcacagtccatcaaaccccatgagcccgaccactctcgctcttccttacattcccacgtcccccttctctcccaacccctcatatcagcaagggaaattaattaatgagatttgataaatcagtagatagaatgaggtccccattctgaaatatttagcagactggaaccaccacgcaagcctctgtagggggtggatggagacacttctaactttaataaactgcgactgaacgtggaa

SEQ ID NO: 32587 - DNA, 2043 bp, Homo sapiens
  source 1..2043: mol_type = unassigned DNA
attacacattcaaagtatccatttgttctcaagaggtagcaagaaacagtatccacagtggactccggggctcctacagacttggcacagcttcctacagtcttgaaacagccctgttgttctgtcatggccagtgggcagtttgtgaacaaactgcaagaggaagtgatctgccccatctgcctggacattctgcagaaacctgtcaccatcgactgtgggcacaatttctgcctcaaatgcatcactcagattggggaaacatcatgtggatttttcaaatgtcccctctgcaaaacttccgtaaggaagaacgcaatcaggttcaactcgctgttgcggaatctggtggagaaaatccaagctctacaagcctctgaggtgcagtccaaaaggaaagaggctacatgcccgaggcaccaggagatgttccactatttctgcgaggatgatgggaagttcctctgttttgtgtgtcgtgaatccaaggaccacaaatcccataatgtcagcttgatcgaagaagctgcccagaattatcaggggcagattcaagagcagatccaagtcttgcagcaaaaggagaaggagacagtacaagtgaaggcacaaggtgtacacagggtcgatgtcttcacggaccaggtagaacatgagaagcaaaggatcctcacagaatttgaactcctgcatcaagtcctagaggaggagaagaatttcctgctatcacggatttactggctgggtcatgagggaacggaagcggggaaacactatgttgcctccactgagccacagttgaacgatctcaagaagctcgttgattccctgaagaccaagcagaacatgccacccaggcagctgctggaggatatcaaagtcgtcttgtgcagaagtgaagagtttcagtttctcaacccaacccctgttcctctggaactggagaaaaaactcagtgaagcaaaatcaagacacgactccatcacagggagcctgaaaaaattcaaagaccaactccaggctgataggaaaaaagatgaaaacagattcttcaaaagcatgaataaaaatgacatgaagagctggggcttgttacagaaaaataatcataaaatgaacaaaacctcagagcccgggtcatcttctgcaggcggcagaactacatcggggccaccaaatcaccactcttcagccccatcccactccctgtttcgggcctcgtctgctgggaaagtcacttttccagtatgtctcctggcctcttatgatgagatttctggtcaaggagcgagctctcaggatacgaagacatttgacgttgcgctgtccgaggagctccatgcggcactgagtgagtggctgacagcgatccgggcttggttttgtgaggttccttcaagctaagccagctcagagaacacggggagcggtggtgctacacggacttcggagcatagagtggcgctgagtgagtggctgagaccgaccacggttcttgacttagtggaattgggtcgaaggagtggagaatgggagggctcgggctactgagagtggagatgggggcgggggtggtggtgaagagagttggagaaggaatggacgagttcttgagcaaaaggaggggaagagacaatctccagccacccgccccacgcttgacttcttatcactttggctgtggtgccgcctagtggaaaaaggaagtccctgcagcagtccccgcactctttaagcagctgtttaccgaaggcaccagttcagccaggagtgaaatccggagaggagcaacgccagcctgggtcacagtccatcaaaccccatgagcccgaccactctcgctcttccttacattcccacgtcccccttctctcccaacccctcatatcagcaagggaaattaattaatgagatttgataaatcagtagatagaatgaggtccccattctgaaatatttagcagactggaaccaccacgcaagcctctgtagggggtggatggagacacttctaactttaataaactgcgactgaacgtggaa

SEQ ID NO: 32588 - DNA, 2043 bp, Homo sapiens
  source 1..2043: mol_type = unassigned DNA
attacacattcaaagtatccatttgttctcaagaggtagcaagaaacagtatccacagtggactccggggctcctacagacttggcacagcttcctacagtcttgaaacagccctgttgttctgtcatggccagtgggcagtttgtgaacaaactgcaagaggaagtgatctgccccatctgcctggacattctgcagaaacctgtcaccattgactgtgggcacaatttctgcctcaaatgcatcactcagattggggaaacatcatgtggatttttcaaatgtcccctctgcaaaacttccgtaaggaagaacgcaatcaggttcaactcgctgttgcggaatctggtggagaaaatccaagctctacaagcctctgaggtgcagtccaaaaggaaagaggctacatgcccgaggcaccaggagatgttccattatttctgcgaggatgatgggaagttcctctgttttgtgtgtcgtgaatccaaggaccacaaatcccataatgtcagcttgatcgaagaagctgcccagaattatcaggggcagattcaagagcagatccaagtcttgcagcaaaaggagaaggagacagtacaagtgaaggcacaaggtgtacacagggtcgatgtcttcacggaccaggtagaacatgagaagcaaaggatcctcacagaatttgaactcctgcatcaagtcctagaggaggagaagaatttcctgctatcacggatttactggctgggtcatgagggaacggaagcagggaaacactatgttgcctccactgagccacagttgaacgatctcaagaagctcattgattccctgaagaccaagcagaacatgccacccaggcagctgctggaggatatcaaagtcgtcttgtgcagaagtgaagagtttcagtttctcaacccaacccctgttcctctggaactggagaaaaaactcagtgaagcaaaatcaagacatgactccatcacagggagcctgaaaaaattcaaagaccaactccaggctgataggaaaaaagatgaaaacagattcttcaaaagcatgaataaaaatgacatgaagagctggggcttgttacagaaaaataatcataaaatgaacaaaacctcagagcccgggtcatcttctgcaggcggcagaactacatcggggccaccaaatcaccactcttcagccccatcccactccctgtttcgggcctcgtctgctgggaaagtcacttttccagtatgtctcctggcctcttatgatgagatttctggtcaaggagcgagctctcaggatacgaagacatttgacgttgcgctgtccgaggagctccatgcggcactgagtgagtggctgacagcgatccgggcttggttttgtaaggttccttcaagctaagccagctcagagaacacggggagcggtggtgctccacggacttcggagcatagagtggcgctgagtgagtggctgagaccgaccacggttcttgacttagtggaattgggtcgaaggagtggagaatgggagggctcgggctactgagagtggagatgggggcgggggtggtggtgaagagagttggagaaggaatggacgagttcttgagcaaaaggaggggaagagacaatctccagccacccgccccacgcttgacttcttatcactttggctgtggtgccgcctagtggaaaaaggaagtccctgcagcagtccccgcactctttaagcagctgtttaccgaaggcaccagttcagccaggagtgaaatccagagacgagcaacgccagcctgggtcacagtccatcaaaccccatgagcccgaccactctcgctcttccttacattcccacgtcccccttctctcccaacccctcatatcagcaagggaaattaattaatgagatttgataaatcagtagatagaatgaggtccccattctgaaatatttagcagactggaaccaccacgcaagcctctgtagggggtggatggagacacttctaactttaataaactgcgactgaacgtggaa

SEQ ID NO: 32589 - DNA, 1648 bp, Homo sapiens
  source 1..1648: mol_type = unassigned DNA
atccatttgttctcaagaggtagcaagaaacagtatccacagtggactccggggctcctacagacttggcacagcttcctacagtcttgaaacagccctgttgttctgtcatggccagtgggcagtttgtgaacaaactgcaagaggaagtgatctgccccatctgcctggacattctgcagaaacctgtcaccatcgactgtgggcacaatttctgcctcaaatgcatcactcagattggggaaacatcatgtggatttttcaaatgtcccctctgcaaaacttccgtaaggaagaacgcaatcaggttcaactcgctgttgcggaatctggtggagaaaatccaagctctacaagcctctgaggtgcagtccaaaaggaaagaggctacatgcccgaggcaccaggagatgttccactatttctgcgaggatgatgggaagttcctctgttttgtgtgtcgtgaatccaaggaccacaaatcccataatgtcagcttgatcgaagaagctgcccagaattatcaggggcagattcaagagcagatccaagtcttgcagcaaaaggagaaggagacagtacaagtgaaggcacaaggtgtacacagggtcgatgtcttcacggaccaggtagaacatgagaagcaaaggatcctcacagaatttgaactcctgcatcaagtcctagaggaggagaagaatttcctgctatcacggatttactggctgggtcatgagggaacggaagcggggaaacactatgttgcctccactgagccacagttgaacgatctcaagaagctcgttgattccctgaagaccaagcagaacatgccacccaggcagctgctggaggatatcaaagtcgtcttgtgcagaagtgaagagtttcagtttctcaacccaacccctgttcctctggaactggagaaaaaactcagtgaagcaaaatcaagacatgactccatcacagggagcctaaaaaaattcaaagaccaactccaggctgataggaaaaaagatgaaaacagattcttcaaaagcatgaataaaaatgacatgaagagctggggcttgttacagaaaaataatcataaaatgaacaaaacctcagagcccgggtcatcttctgcaggcggcagaactacatcggggccaccaaatcaccactcttcagccccatcccactccctgtttcgggcctcgtctgctgggaaagtcacttttccagtatgtctcctggcctcttatgatgagatttctggtcaaggagcgagctctcaggatacgaagacatttgacgttgcgctgtccgaggagctccatgcggcactgagtgagtggctgacagcgatccgggcttggttttgtgaggttccttcaagctaagccagctcagagaacacggggagcggtggtgctacacggacttcggagcatagagtggcgctgatggaaaaaggaagtccctgcagcagtccccgcactctttaagcagctgtttaccgaaggcaccagttcagccaggagtgaaatccggagaggagcaacgccagcctgggtcacagtccatcaaaccccatgagcccgaccactctcgctcttccttacattcccacgtcccccttctctcccaacccctcatatca

SEQ ID NO: 32590 - DNA, 2025 bp, Homo sapiens
  source 1..2025: mol_type = unassigned DNA
atccatttgttctcaagaggtagcaagaaacagtatccacagtggactccggggctcctacagacttggcacagcttcctacagtcttgaaacagccctgttgttctgtcatggccagtgggcagtttgtgaacaaactgcaagaggaagtgatctgccccatctgcctggacattctgcagaaacctgtcaccatcgactgtgggcacaatttctgcctcaaatgcatcactcagattggggaaacatcatgtggatttttcaaatgtcccctctgcaaaacttccgtaaggaagaacgcaatcaggttcaactcgctgttgcggaatctggtggagaaaatccaagctctacaagcctctgaggtgcagtccaaaaggaaagaggctacatgcccgaggcaccaggagatgttccactatttctgcgaggatgatgggaagttcctctgttttgtgtgtcgtgaatccaaggaccacaaatcccataatgtcagcttgatcgaagaagctgcccagaattatcaggggcagattcaagagcagatccaagtcttgcagcaaaaggagaaggagacagtacaagtgaaggcacaaggtgtacacagggtcgatgtcttcacggaccaggtagaacatgagaagcaaaggatcctcacagaatttgaactcctgcatcaagtcctagaggaggagaagaatttcctgctatcacggatttactggctgggtcatgagggaacggaagcggggaaacactatgttgcctccactgagccacagttgaacgatctcaagaagctcgttgattccctgaagaccaagcagaacatgccacccaggcagctgctggagccagctcaaccacatcttcctagaagtgaagagtttcagtttctcaacccaacccctgttcctctggaactggagaaaaaactcagtgaagcaaaatcaagacacgactccatcacagggagcctgaaaaaattcaaagaccaactccaggctgataggaaaaaagatgaaaacagattcttcaaaagcatgaataaaaatgacatgaagagctggggcttgttacagaaaaataatcataaaatgaacaaaacctcagagcccgggtcatcttctgcaggcggcagaactacatcggggccaccaaatcaccactcttcagccccatcccactccctgtttcgggcctcgtctgctgggaaagtcacttttccagtatgtctcctggcctcttatgatgagatttctggtcaaggagcgagctctcaggatacgaagacatttgacgttgcgctgtccgaggagctccatgcggcactgagtgagtggctgacagcgatccgggcttggttttgtgaggttccttcaagctaagccagctcagagaacacggggagcggtggtgctacacggacttcggagcatagagtggcgctgagtgagtggctgagaccgaccacggttcttgacttagtggaattgggtcgaaggagtggagaatgggagggctcgggctactgagagtggagatgggggcgggggtggtggtgaagagagttggagaaggaatggacgagttcttgagcaaaaggaggggaagagacaatctccagccacccgccccacgcttgacttcttatcactttggctgtggtgccgcctagtggaaaaaggaagtccctgcagcagtccccgcactctttaagcagctgtttaccgaaggcaccagttcagccaggagtgaaatccggagaggagcaacgccagcctgggtcacagtccatcaaaccccatgagcccgaccactctcgctcttccttacattcccacgtcccccttctctcccaacccctcatatcagcaagggaaattaattaatgagatttgataaatcagtagatagaatgaggtccccattctgaaatatttagcagactggaaccaccacgcaagcctctgtagggggtggatggagacacttctaactttaataaactgcgactgaacgtgg

SEQ ID NO: 32591 - DNA, 1648 bp, Homo sapiens
  source 1..1648: mol_type = unassigned DNA
atccatttgttctcaagaggtagcaagaaacagtatccacagtggactccggggctcctacagacttggcacagcttcctacagtcttgaaacagccctgttgttctgtcatggccagtgggcagtttgtgaacaaactgcaagaggaagtgatctgccccatctgcctggacattctgcagaaacctgtcaccatcgactgtgggcacaatttctgcctcaaatgcatcactcagattggggaaacatcatgtggatttttcaaatgtcccctctgcaaaacttccgtaaggaagaacgcaatcaggttcaactcgctgttgcggaatctggtggagaaaatccaagctctacaagcctctgaggtgcagtccaaaaggaaagaggctacatgcccgaggcaccaggagatgttccactatttctgcgaggatgatgggaagttcctctgttttgtgtgtcgtgaatccaaggaccacaaatcccataatgtcagcttgatcgaagaagctgcccagaattatcaggggcagattcaagagcagatccaagtcttgcagcaaaaggagaaggagacagtacaagtgaaggcacaaggtgtacacagggtcgatgtcttcacggaccaggtagaacatgagaagcaaaggatcctcacagaatttgaactcctgcatcaagtcctagaggaggagaagaatttcctgctatcacggatttactggctgggtcatgagggaacggaagcggggaaacactatgttgcctccactgagccacagttgaacgatctcaagaagctcgttgattccctgaagaccaagcagaacatgccacccaggcagctgctggaggatatcaaagtcgtcttgtgcagaagtgaagagtttcagtttctcaacccaacccctgttcctctggaactggagaaaaaactcagtgaagcaaaatcaagacacgactccatcacagggagcctgaaaaaattcaaagaccaactccaggctgataggaaaaaagatgaaaacagattcttcaaaagcatgaataaaaatgacatgaagagctggggcttgttacagaaaaataatcataaaatgaacaaaacctcagagcccgggtcatcttctgcaggcggcagaactacatcggggccaccaaatcaccactcttcagccccatcccactccctgtttcgggcctcgtctgctgggaaagtcacttttccagtatgtctcctggcctcttatgatgagatttctggtcaaggagcgagctctcaggatacgaagacatttgacgttgcgctgtccgaggagctccatgcggcactgagtgagtggctgacagcgatccgggcttggttttgtaaggttccttcaagctaagccagctcagagaacacggggagcggtggtgctccacggacttcggagcatagagtggcgctgatggaaaaaggaagtccctgcagcagtccccgcactctttaagcagctgtttaccgaaggcaccagttcagccaggagtgaaatccagagacgagcaacgccagcctgggtcacagtccatcaaaccccatgagcccgaccactctcgctcttccttacattcccacgtcccccttctctcccaacccctcatatca

SEQ ID NO: 32592 - DNA, 2025 bp, Homo sapiens
  source 1..2025: mol_type = unassigned DNA
atccatttgttctcaagaggtagcaagaaacagtatccacagtggactccggggctcctacagacttggcacagcttcctacagtcttgaaacagccctgttgttctgtcatggccagtgggcagtttgtgaacaaactgcaagaggaagtgatctgccccatctgcctggacattctgcagaaacctgtcaccatcgactgtgggcacaatttctgcctcaaatgcatcactcagattggggaaacatcatgtggatttttcaaatgtcccctctgcaaaacttccgtaaggaagaacgcaatcaggttcaactcgctgttgcggaatctggtggagaaaatccaagctctacaagcctctgaggtgcagtccaaaaggaaagaggctacatgcccgaggcaccaggagatgttccactatttctgcgaggatgatgggaagttcctctgttttgtgtgtcgtgaatccaaggaccacaaatcccataatgtcagcttgatcgaagaagctgcccagaattatcaggggcagattcaagagcagatccaagtcttgcagcaaaaggagaaggagacagtacaagtgaaggcacaaggtgtacacagggtcgatgtcttcacggaccaggtagaacatgagaagcaaaggatcctcacagaatttgaactcctgcatcaagtcctagaggaggagaagaatttcctgctatcacggatttactggctgggtcatgagggaacggaagcggggaaacactatgttgcctccactgagccacagttgaacgatctcaagaagctcgttgattccctgaagaccaagcagaacatgccacccaggcagctgctggagccagctcaaccacatcttcctagaagtgaagagtttcagtttctcaacccaacccctgttcctctagaactggagaaaaaactcagtgaagcaaaatcaagacacgactccatcacagggagcctgaaaaaattcaaagaccaactccaggctgataggaaaaaagatgaaaacagattcttcaaaagcatgaataaaaatgacatgaagagctggggcttgttacagaaaaataatcataaaatgaacaaaacctcagagcccgggtcatcttctgcaggcggcagaactacatcggggccaccaaatcaccactcttcagccccatcccactccctgtttcgggcctcgtctgctgggaaagtcacttttccagtatgtctcctggcctcttatgatgagatttctggtcaaggagcgagctctcaggatacgaagacatttgacgttgcgctgtccgaggagctccatgcggcactgagtgagtggctgacagcgatccgggcttggttttgtgaggttccttcaagctaagccagctcagagaacacggggagcggtggtgctacacggacttcggagcatagagtggcgctgagtgagtggctgagaccgaccacggttcttgacttagtggaattgggtcgaaggagtggagaatgggagggctcgggctactgagagtggagatgggggcgggggtggtggtgaagagagttggagaaggaatggacgaattcttgagcaaaaggaggggaagagacaatctccagccacccgccccacgcttgacttcttatcactttggctgtggtgccgcctagtggaaaaaggaagtccctgcagcagtccccgcactctttaagcagctgtttaccgaaggcaccagttcagccaggagtgaaatccggagaggagcaacgccagcctgggtcacagtccatcaaaccccatgagcccgaccactctcgctcttccttacattcccacgtcccccttctctcccaacccctcatatcagcaagggaaattaattaatgagatttgataaatcagtagatagaatgaggtccccattctgaaatatttagcagactggaaccaccacgcaagcctctgtagggggtggatggagacacttctaactttaataaactgcgactgaacgtgg

SEQ ID NO: 32593 - DNA, 2025 bp, Homo sapiens
  source 1..2025: mol_type = unassigned DNA
atccatttgttctcaagaggtagcaagaaacagtatccacagtggactccggggctcctacagacttggcacagcttcctacagtcttgaaacagccctgttgttctgtcatggccagtgggcagtttgtgaacaaactgcaagaggaagtgatctgccccatctgcctggacattctgcagaaacctgtcaccattgactgtgggcacaatttctgcctcaaatgcatcactcagattggggaaacatcatgtggatttttcaaatgtcccctctgcaaaacttccgtaaggaagaacgcaatcaggttcaactcgctgttgcggaatctggtggagaaaatccaagctctacaagcctctgaggtgcagtccaaaaggaaagaggctacatgcccgaggcaccaggagatgttccattatttctgcgaggatgatgggaagttcctctgttttgtgtgtcgtgaatccaaggaccacaaatcccataatgtcagcttgatcgaagaagctgcccagaattatcaggggcagattcaagagcagatccaagtcttgcagcaaaaggagaaggagacagtacaagtgaaggcacaaggtgtacacagggtcgatgtcttcacggaccaggtagaacatgagaagcaaaggatcctcacagaatttgaactcctgcatcaagtcctagaggaggagaagaatttcctgctatcacggatttactggctgggtcatgagggaacggaagcagggaaacactatgttgcctccactgagccacagttgaacgatctcaagaagctcattgattccctgaagaccaagcagaacatgccacccaggcagctgctggagccagctcaaccacatcttcctagaagtgaagagtttcagtttctcaacccaacccctgttcctctggaactggagaaaaaactcagtgaagcaaaatcaagacatgactccatcacagggagcctgaaaaaattcaaagaccaactccaggctgataggaaaaaagatgaaaacagattcttcaaaagcatgaataaaaatgacatgaagagctggggcttgttacagaaaaataatcataaaatgaacaaaacctcagagcccgggtcatcttctgcaggcggcagaactacatcggggccaccaaatcaccactcttcagccccatcccactccctgtttcgggcctcgtctgctgggaaagtcacttttccagtatgtctcctggcctcttatgatgagatttctggtcaaggagcgagctctcaggatacgaagacatttgacgttgcgctgtccgaggagctccatgcggcactgagtgagtggctgacagcgatccgggcttggttttgtaaggttccttcaagctaagccagctcagagaacacggggagcggtggtgctccacggacttcggagcatagagtggcgctgagtgagtggctgagaccgaccacggttcttgacttagtggaattgggtcgaaggagtggagaatgggagggctcgggctactgagagtggagatgggggcgggggtggtggtgaagagagttggagaaggaatggacgagttcttgagcaaaaggaggggaagagacaatctccagccacccgccccacgcttgacttcttatcactttggctgtggtgccgcctagtggaaaaaggaagtccctgcagcagtccccgcactctttaagcagctgtttaccgaaggcaccagttcagccaggagtgaaatccagagacgagcaacgccagcctgggtcacagtccatcaaaccccatgagcccgaccactctcgctcttccttacattcccacgtcccccttctctcccaacccctcatatcagcaagggaaattaattaatgagatttgataaatcagtagatagaatgaggtccccattctgaaatatttagcagactggaaccaccacgcaagcctctgtagggggtggatggagacacttctaactttaataaactgcgactgaacgtgg

SEQ ID NO: 32594 - DNA, 2025 bp, Homo sapiens
  source 1..2025: mol_type = unassigned DNA
atccatttgttctcaagaggtagcaagaaacagtatccacagtggactccggggctcctacagacttggcacagcttcctacagtcttgaaacagccctgttgttctgtcatggccagtgggcagtttgtgaacaaactgcaagaggaagtgatctgccccatctgcctggacattctgcagaaacctgtcaccatcgactgtgggcacaatttctgcctcaaatgcatcactcagattggggaaacatcatgtggatttttcaaatgtcccctctgcaaaacttccgtaaggaagaacgcaatcaggttcaactcgctgttgcggaatctggtggagaaaatccaagctctacaagcctctgaggtgcagtccaaaaggaaagaggctacatgcccgaggcaccaggagatgttccactatttctgcgaggatgatgggaagttcctctgttttgtgtgttgtgaatccaaggaccacaaatcccataatgtcagcttgatcgaagaagctgcccagaattatcaggggcagattcaagagcagatccaagtcttgcagcaaaaggagaaggagacagtacaagtgaaggcacaaggtgtacacagggtcgatgtcttcacggaccaggtagaacatgagaagcaaaggatcctcacagaatttgaactcctgcatcaagtcctagaggaggagaagaatttcctgctatcacggatttactggctgggtcatgagggaacggaagcggggaaacactatgttgcctccactgagccacagttgaacgatctcaagaagctcgttgattccctgaagaccaagcagaacatgccacccaggcagctgctggagccagctcaaccacatcttcctagaagtgaagagtttcagtttctcaacccaacccctgttcctctggaactggagaaaaaactcagtgaagcaaaatcaagacacgactccatcacagggagcctgaaaaaattcaaagaccaactccaggctgataggaaaaaagatgaaaacagattcttcaaaagcatgaataaaaatgacatgaagagctggggcttgttacagaaaaataatcataaaatgaacaaaacctcagagcccgggtcatcttctgcaggcggcagaactacatcggggccaccaaatcaccactcttcagccccatcccactccctgtttcgggcctcgtctgctgggaaagtcacttttccagtatgtctcctggcctcttatgatgagatttctggtcaaggagcgagctctcaggatacgaagacatttgacgttgcgctgtccgaggagctccatgcggcactgagtgagtggctgacagcgatccgggcttggttttgtgaggttccttcaagctaagccagctcagagaacacggggagcggtggtgctacacggacttcggagcatagagtggcgctgagtgagtggctgagaccgaccacggttcttgacttagtggaattgggtcgaaggagtggagaatgggagggctcgggctactgagagtggagatgggggcgggggtggtggtgaagagagttggagaaggaatggacgagttcttgagcaaaaggaggggaagagacaatctccagccacccgccccacgcttgacttcttatcactttggctgtggtgccgcctagtggaaaaaggaagtccctgcagcagtccccgcactctttaagcagctgtttaccgaaggcaccagttcagccaggagtgaaatccggagaggagcaacgccagcctgggtcacagtccatcaaaccccatgagcccgaccactctcgctcttccttacattcccacgtcccccttctctcccaacccctcatatcagcaagggaaattaattaatgagatttgataaatcagtagatagaatgaggtccccattctgaaatatttagcagactggaaccaccacgcaagcctctgtagggggtggatggagacacttctaactttaataaactgcgactgaacgtgg

SEQ ID NO: 32595 - DNA, 1648 bp, Homo sapiens
  source 1..1648: mol_type = unassigned DNA
atccatttgttctcaagaggtagcaagaaacagtatccacagtggactccggggctcctacagacttggcacagcttcctacagtcttgaaacagccctgttgttctgtcatggccagtgggcagtttgtgaacaaactgcaagaggaagtgatctgccccatctgcctggacattctgcagaaacctgtcaccatcgactgtgggcacaatttctgcctcaaatgcatcactcagattggggaaacatcatgtggatttttcaaatgtcccctctgcaaaacttccgtaaggaagaacgcaatcaggttcaactcgctgttgcggaatctggtggagaaaatccaagctctacaagcctctgaggtgcagtccaaaaggaaagaggctacatgcccgaggcaccaggagatgttccactatttctgcgaggatgatgggaagttcctctgttttgtgtgtcgtgaatccaaggaccacaaatcccataatgtcagcttgatcgaagaagctgcccagaattatcaggggcagattcaagagcagatccaagtcttgcagcaaaaggagaaggagacagtacaagtgaaggcacaaggtgtacacagggtcgatgtcttcacggaccaggtagaacatgagaagcaaaggatcctcacagaatttgaactcctgcatcaagtcctagaggaggagaagaatttcctgctatcacggatttactggctgggtcatgagggaacggaagcggggaaacactatgttgcctccactgagccacagttgaacgatctcaagaagctcgttgattccctgaagaccaagcagaacatgccacccaggcagctgctggaggatatcaaagtcgtcttgtgcagaagtgaagagtttcagtttctcaacccaacccctgttcctctagaactggagaaaaaactcagtgaagcaaaatcaagacacgactccatcacagggagcctgaaaaaattcaaagaccaactccaggctgataggaaaaaagatgaaaacagattcttcaaaagcatgaataaaaatgacatgaagagctggggcttgttacagaaaaataatcataaaatgaacaaaacctcagagcccgggtcatcttctgcaggcggcagaactacatcggggccaccaaatcaccactcttcagccccatcccactccctgtttcgggcctcgtctgctgggaaagtcacttttccagtatgtctcctggcctcttatgatgagatttctggtcaaggagcgagctctcaggatacgaagacatttgacgttgcgctgtccgaggagctccatgcggcactgagtgagtggctgacagcgatccgggcttggttttgtgaggttccttcaagctaagccagctcagagaacacggggagcggtggtgctacacggacttcggagcatagagtggcgctgatggaaaaaggaagtccctgcagcagtccccgcactctttaagcagctgtttaccgaaggcaccagttcagccaggagtgaaatccggagaggagcaacgccagcctgggtcacagtccatcaaaccccatgagcccgaccactctcgctcttccttacattcccacgtcccccttctctcccaacccctcatatca

SEQ ID NO: 32596 - DNA, 2025 bp, Homo sapiens
  source 1..2025: mol_type = unassigned DNA
atccatttgttctcaagaggtagcaagaaacagtatccacagtggactccggggctcctacagacttggcacagcttcctacagtcttgaaacagccctgttgttctgtcatggccagtgggcagtttgtgaacaaactgcaagaggaagtgatctgccccatctgcctggacattctgcagaaacctgtcaccatcgactgtgggcacaatttctgcctcaaatgcatcactcagattggggaaacatcatgtggatttttcaaatgtcccctctgcaaaacttccgtaaggaagaacgcaatcaggttcaactcgctgttgcggaatctggtggagaaaatccaagctctacaagcctctgaggtgcagtccaaaaggaaagaggctacatgcccgaggcaccaggagatgttccactatttctgcgaggatgatgggaagttcctctgttttgtgtgtcgtgaatccaaggaccacaaatcccataatgtcagcttgatcgaagaagctgcccagaattatcaggggcagattcaagagcagatccaagtcttgcagcaaaaggagaaggagacagtacaagtgaaggcacaaggtgtacacagggtcgatgtcttcacggaccaggtagaacatgagaagcaaaggatcctcacagaatttgaactcctgcatcaagtcctagaggaggagaagaatttcctgctatcacggatttactggctgggtcatgagggaacggaagcggggaaacactatgttgcctccactgagccacagttgaacgatctcaagaagctcgttgattccctgaagaccaagcagaacatgccacccaggcagctgctggagccagctcaaccacatcttcctagaagtgaagagtttcagtttctcaacccaacccctgttcctctagaactggagaaaaaactcagtgaagcaaaatcaagacacgactccatcacagggagcctgaaaaaattcaaagaccaactccaggctgataggaaaaaagatgaaaacagattcttcaaaagcatgaataaaaatgacatgaagagctggggcttgttacagaaaaataatcataaaatgaacaaaacctcagagcccgggtcatcttctgcaggcggcagaactacatcggggccaccaaatcaccactcttcagccccatcccactccctgtttcgggcctcgtctgctgggaaagtcacttttccagtatgtctcctggcctcttatgatgagatttctggtcaaggagcgagctctcaggatacgaagacatttgacgttgcgctgtccgaggagctccatgcggcactgagtgagtggctgacagcgatccgggcttggttttgtgaggttccttcaagctaagccagctcagagaacacggggagcggtggtgctacacggacttcggagcatagagtggcgctgagtgagtggctgagaccgaccacggttcttgacttagtggaattgggtcgaaggagtggagaatgggagggctcgggctactgagagtggagatgggggcgggggtggtggtgaagagagttggagaaggaatggacgagttcttgagcaaaaggaggggaagagacaatctccagccacccgccccacgcttgacttcttatcactttggctgtggtgccgcctagtggaaaaaggaagtccctgcagcagtccccgcactctttaagcagctgtttaccgaaggcaccagttcagccaggagtgaaatccggagaggagcaacgccagcctgggtcacagtccatcaaaccccatgagcccgaccactctcgctcttccttacattcccacgtcccccttctctcccaacccctcatatcagcaagggaaattaattaatgagatttgataaatcagtagatagaatgaggtccccattctgaaatatttagcagactggaaccaccacgcaagcctctgtagggggtggatggagacacttctaactttaataaactgcgactgaacgtgg

SEQ ID NO: 32597 - DNA, 1648 bp, Homo sapiens
  source 1..1648: mol_type = unassigned DNA
atccatttgttctcaagaggtagcaagaaacagtatccacagtggactccggggctcctacagacttggcacagcttcctacagtcttgaaacagccctgttgttctgtcatggccagtgggcagtttgtgaacaaactgcaagaggaagtgatctgccccatctgcctggacattctgcagaaacctgtcaccatcgactgtgggcacaatttctgcctcaaatgcatcactcagattggggaaacatcatgtggatttttcaaatgtcccctctgcaaaacttccgtaaggaagaacgcaatcaggttcaactcgctgttgcggaatctggtggagaaaatccaagctctacaagcctctgaggtgcagtccaaaaggaaagaggctacatgcccgaggcaccaggagatgttccactatttctgcgaggatgatgggaagttcctctgttttgtgtgttgtgaatccaaggaccacaaatcccataatgtcagcttgatcgaagaagctgcccagaattatcaggggcagattcaagagcagatccaagtcttgcagcaaaaggagaaggagacagtacaagtgaaggcacaaggtgtacacagggtcgatgtcttcacggaccaggtagaacatgagaagcaaaggatcctcacagaatttgaactcctgcatcaagtcctagaggaggagaagaatttcctgctatcacggatttactggctgggtcatgagggaacggaagcggggaaacactatgttgcctccactgagccacagttgaacgatctcaagaagctcgttgattccctgaagaccaagcagaacatgccacccaggcagctgctggaggatatcaaagtcgtcttgtgcagaagtgaagagtttcagtttctcaacccaacccctgttcctctggaactggagaaaaaactcagtgaagcaaaatcaagacacgactccatcacagggagcctgaaaaaattcaaagaccaactccaggctgataggaaaaaagatgaaaacagattcttcaaaagcatgaataaaaatgacatgaagagctggggcttgttacagaaaaataatcataaaatgaacaaaacctcagagcccgggtcatcttctgcaggcggcagaactacatcggggccaccaaatcaccactcttcagccccatcccactccctgtttcgggcctcgtctgctgggaaagtcacttttccagtatgtctcctggcctcttatgatgagatttctggtcaaggagcgagctctcaggatacgaagacatttgacgttgcgctgtccgaggagctccatgcggcactgagtgagtggctgacagcgatccgggcttggttttgtgaggttccttcaagctaagccagctcagagaacacggggagcggtggtgctacacggacttcggagcatagagtggcgctgatggaaaaaggaagtccctgcagcagtccccgcactctttaagcagctgtttaccgaaggcaccagttcagccaggagtgaaatccggagaggagcaacgccagcctgggtcacagtccatcaaaccccatgagcccgaccactctcgctcttccttacattcccacgtcccccttctctcccaacccctcatatca

SEQ ID NO: 32598 - DNA, 1648 bp, Homo sapiens
  source 1..1648: mol_type = unassigned DNA
atccatttgttctcaagaggtagcaagaaacagtatccacagtggactccggggctcctacagacttggcacagcttcctacagtcttgaaacagccctgttgttctgtcatggccagtgggcagtttgtgaacaaactgcaagaggaagtgatctgccccatctgcctggacattctgcagaaacctgtcaccattgactgtgggcacaatttctgcctcaaatgcatcactcagattggggaaacatcatgtggatttttcaaatgtcccctctgcaaaacttccgtaaggaagaacgcaatcaggttcaactcgctgttgcggaatctggtggagaaaatccaagctctacaagcctctgaggtgcagtccaaaaggaaagaggctacatgcccgaggcaccaggagatgttccattatttctgcgaggatgatgggaagttcctctgttttgtgtgtcgtgaatccaaggaccacaaatcccataatgtcagcttgatcgaagaagctgcccagaattatcaggggcagattcaagagcagatccaagtcttgcagcaaaaggagaaggagacagtacaagtgaaggcacaaggtgtacacagggtcgatgtcttcacggaccaggtagaacatgagaagcaaaggatcctcacagaatttgaactcctgcatcaagtcctagaggaggagaagaatttcctgctatcacggatttactggctgggtcatgagggaacggaagcagggaaacactatgttgcctccactgagccacagttgaacgatctcaagaagctcattgattccctgaagaccaagcagaacatgccacccaggcagctgctggaggatatcaaagtcgtcttgtgcagaagtgaagagtttcagtttctcaacccaacccctgttcctctggaactggagaaaaaactcagtgaagcaaaatcaagacatgactccatcacagggagcctgaaaaaattcaaagaccaactccaggctgataggaaaaaagatgaaaacagattcttcaaaagcatgaataaaaatgacatgaagagctggggcttgttacagaaaaataatcataaaatgaacaaaacctcagagcccgggtcatcttctgcaggcggcagaactacatcggggccaccaaatcaccactcttcagccccatcccactccctgtttcgggcctcgtctgctgggaaagtcacttttccagtatgtctcctggcctcttatgatgagatttctggtcaaggagcgagctctcaggatacgaagacatttgacgttgcgctgtccgaggagctccatgcggcactgagtgagtggctgacagcgatccgggcttggttttgtaaggttccttcaagctaagccagctcagagaacacggggagcggtggtgctccacggacttcggagcatagagtggcgctgatggaaaaaggaagtccctgcagcagtccccgcactctttaagcagctgtttaccgaaggcaccagttcagccaggagtgaaatccagagacgagcaacgccagcctgggtcacagtccatcaaaccccatgagcccgaccactctcgctcttccttacattcccacgtcccccttctctcccaacccctcatatca

SEQ ID NO: 32599 - DNA, 2025 bp, Homo sapiens
  source 1..2025: mol_type = unassigned DNA
atccatttgttctcaagaggtagcaagaaacagtatccacagtggactccggggctcctacagacttggcacagcttcctacagtcttgaaacagccctgttgttctgtcatggccagtgggcagtttgtgaacaaactgcaagaggaagtgatctgccccatctgcctggacattctgcagaaacctgtcaccatcgactgtgggcacaatttctgcctcaaatgcatcactcagattggggaaacatcatgtggatttttcaaatgtcccctctgcaaaacttccgtaaggaagaacgcaatcaggttcaactcgctgttgcggaatctggtggagaaaatccaagctctacaagcctctgaggtgcagtccaaaaggaaagaggctacatgcccgaggcaccaggagatgttccactatttctgcgaggatgatgggaagttcctctgttttgtgtgtcgtgaatccaaggaccacaaatcccataatgtcagcttgatcgaagaagctgcccagaattatcaggggcagattcaagagcagatccaagtcttgcagcaaaaggagaaggagacagtacaagtgaaggcacaaggtgtacacagggtcgatgtcttcacggaccaggtagaacatgagaagcaaaggatcctcacagaatttgaactcctgcatcaagtcctagaggaggagaagaatttcctgctatcacggatttactggctgggtcatgagggaacggaagcggggaaacactatgttgcctccactgagccacagttgaacgatctcaagaagctcgttgattccctgaagaccaagcagaacatgccacccaggcagctgctggagccagctcaaccacatcttcctagaagtgaagagtttcagtttctcaacccaacccctgttcctctggaactggagaaaaaactcagtgaagcaaaatcaagacacgactccatcacagggagcctgaaaaaattcaaagaccaactccaggctgataggaaaaaagatgaaaacagattcttcaaaagcatgaataaaaatgacatgaagagctggggcttgttacagaaaaataatcataaaatgaacaaaacctcagagcccgggtcatcttctgcaggcggcagaactacatcggggccaccaaatcaccactcttcagccccatcccactccctgtttcgggcctcgtctgctgggaaagtcacttttccagtatgtctcctggcctcttatgatgagatttctggtcaaggagcgagctctcaggatacgaagacatttgacgttgcgctgtccgaggagctccatgcggcactgagtgagtggctgacagcgatccgggcttggttttgtaaggttccttcaagctaagccagctcagagaacacggggagcggtggtgctccacggacttcggagcatagagtggcgctgagtgagtggctgagaccgaccacggttcttgacttagtggaattgggtcgaaggagtggagaatgggagggctcgggctactgagagtggagatgggggcgggggtggtggtgaagagagttggagaaggaatggacgagttcttgagcaaaaggaggggaagagacaatctccagccacccgccccacgcttgacttcttatcactttggctgtggtgccgcctagtggaaaaaggaagtccctgcagcagtccccgcactctttaagcagctgtttaccgaaggcaccagttcagccaggagtgaaatccagagacgagcaacgccagcctgggtcacagtccatcaaaccccatgagcccgaccactctcgctcttccttacattcccacgtcccccttctctcccaacccctcatatcagcaagggaaattaattaatgagatttgataaatcagtagatagaatgaggtccccattctgaaatatttagcagactggaaccaccacgcaagcctctgtagggggtggatggagacacttctaactttaataaactgcgactgaacgtgg

SEQ ID NO: 32600 - DNA, 1648 bp, Homo sapiens
  source 1..1648: mol_type = unassigned DNA
atccatttgttctcaagaggtagcaagaaacagtatccacagtggactccggggctcctacagacttggcacagcttcctacagtcttgaaacagccctgttgttctgtcatggccagtgggcagtttgtgaacaaactgcaagaggaagtgatctgccccatctgcctggacattctgcagaaacctgtcaccatcgactgtgggcacaatttctgcctcaaatgcatcactcagattggggaaacatcatgtggatttttcaaatgtcccctctgcaaaacttccgtaaggaagaacgcaatcaggttcaactcgctgttgcggaatctggtggagaaaatccaagctctacaagcctctgaggtgcagtccaaaaggaaagaggctacatgcccgaggcaccaggagatgttccactatttctgcgaggatgatgggaagttcctctgttttgtgtgtcgtgaatccaaggaccacaaatcccataatgtcagcttgatcgaagaagctgcccagaattatcaggggcagattcaagagcagatccaagtcttgcagcaaaaggagaaggagacagtacaagtgaaggcacaaggtgtacacagggtcgatgtcttcacggaccaggtagaacatgagaagcaaaggatcctcacagaatttgaactcctgcatcaagtcctagaggaggagaagaatttcctgctatcacggatttactggctgggtcatgagggaacggaagcggggaaacactatgttgcctccactgagccacagttgaacgatctcaagaagctcgttgattccctgaagaccaagcagaacatgccacccaggcagctgctggaggatatcaaagtcgtcttgtgcagaagtgaagagtttcagtttctcaacccaacccctgttcctctggaactggagaaaaaactcagtgaagcaaaatcaagacacgactccatcacagggagcctgaaaaaattcaaagaccaactccaggctgataggaaaaaagatgaaaacagattcttcaaaagcatgaataaaaatgacatgaagagctggggcttgttacagaaaaataatcataaaatgaacaaaacctcagagcccgggtcatcttctgcaggcggcagaactacatcggggccaccaaatcaccactcttcagccccatcccactccctgtttcgggcctcgtctgctgggaaagtcacttttccagtatgtctcctggcctcttatgatgagatttctggtcaaggagcgagctctcaggatacgaagacatttgacgttgcgctgtccgaggagctccatgcggcactgagtgagtggctgacagcgatccgggcttggttttgtgaggttccttcaagctaagccagctcagagaacacggggagcggtggtgctacacggacttcggagcatagagtggcgctgatggaaaaaggaagtccctgcagcagtccccgcactctttaagcagctgtttaccgaaggcaccagttcagccaggagtgaaatccggagaggagcaacgccagcctgggtcacagtccatcaaaccccatgagcccgaccactctcgctcttccttacattcccacgtcccccttctctcccaacccctcatatca

SEQ ID NO: 32601 - DNA, 1648 bp, Homo sapiens; identical to SEQ ID NO: 32595
  source 1..1648: mol_type = unassigned DNA

SEQ ID NO: 32602 - DNA, 3697 bp, Homo sapiens
  source 1..3697: mol_type = unassigned DNA
ggcaggcgggtgggctgccggcggtggactcgtcggagccgcgggcggtcagctttagcaggaatttgaccctctagggcatgaatactgtgctgttcagttctgagctgtgctagcaatacccttcaaaggaagagcaatggctgcagcagcagcttctcacctgaacctggatgccctccgggaagtgctagaatgccccatctgcatggagtccttcacagaagagcagctgcgtcccaagcttctgcactgtggccataccatctgccgccagtgcctggagaagctattggccagtagcatcaatggtgtccgctgtcccttttgcagcaagattacccgcataaccagcttgacccagctgacagacaatctgacagtgctaaagatcattgatacagctgggctcagcgaggctgtggggctgctcatgtgtcggtcctgtgggcggcgtctgccccggcaattctgccggagctgtggtttggtgttatgtgagccctgccgggaggcagaccatcagcctcctggccactgtacactccctgtcaaagaagcagctgaggagcggcgtcgggactttggagagaagttaactcgtctgcgggaacttatgggggagctgcagcggcggaaggcagccttggaaggtgtctccaaggaccttcaggcaaggtataaagcagttctccaggagtatgggcatgaggagcgcagggtccaggatgagctggctcgctctcggaagttcttcacaggctctttggctgaagttgagaagtccaatagtcaagtggtagaggagcagagttacctgcttaacattgcagaggtgcaggctgtgtctcgctgtgactacttcctggccaagatcaagcaggcagatgtagcactactggaggagacagctgatgaggaggagccagagctcactgccagcttgcctcgggagctcaccctgcaagatgtggagctccttaaggtaggtcatgttggccccctccaaattggacaagctgttaagaagccccggacagttaacgtggaagattcctgggccatggaggccacagcgtctgctgcctctacctctgttacttttagagagatggacatgagcccggaggaagtggttgccagccctagggcctcacctgctaaacagcggggtcctgaggcagcctccaatatccagcagtgcctctttctcaagaagatgggggccaaaggcagcactccaggaatgttcaatcttccagtcagtctctacgtgaccagtcaaggtgaagtactagtcgctgaccgtggtaactatcgtatacaagtctttacccgcaaaggctttttgaaggaaatccgccgcagccccagtggcattgatagctttgtgctaagcttccttggggcagatctacccaacctcactcctctctcagtggcaatgaactgccaggggctgattggtgtgactgacagctatgataactccctcaaggtatataccttggatggccactgcgtggcctgtcacaggagccagctgagcaaaccatggggtatcacagccttgccatctggccagtttgtagtaaccgatgtggaaggtggaaagctttggtgtttcacagttgatcgaggatcaggggtggtcaaatacagctgcctatgtagtgctgtgcggcccaaatttgtcacctgtgatgctgagggcaccgtctacttcacccagggcttaggcctcaatctggagaatcggcagaatgagcaccacctggagggtggcttttccattggctctgtaggccctgatgggcagctgggtcgccagattagccacttcttctcggagaatgaggatttccgctgcattgctggcatgtgtgtggatgctcgtggtgatctcatcgtggctgacagtagtcgcaaggaaattctccattttcctaagggtgggggctatagtgtccttattcgagagggacttacctgtccggtgggcatagccctaactcctaaggggcagctgctggtcttggactgttgggatcattgcatcaagatctacagctaccatctgagaagatattccaccccataggggatgagaaattatcagtttcttctgctcccaagccaacttcccttcccttagttcttggttgttagtggcacatgcagaatagactcagcctatgtcctgattccagctgggtagttctagaacttcagaagctccatcttttaatgtttttatttgttatgtccccctccccgcttcccacctaaatttagagctttaaaagatgcactgcccaaataggacacacgatggtgttagctgaagtttgattagcaattaggcacttccaaggctttagtagagagagccactttagccctttgtgccatgtttgaaatttgcccttgtattaaatccttgattttttcccatttggctttgatgcccttgatccattgtttccttcctactataatgtgcttcatctgtgacactttctcttgaactctgattggattcactgtgcatgcttcagtgggatctgctccacctttcagtgacatttaagacatcatattcccgtaacattatgtctcagtctgatcgtctttaccagtatgaaagtcattcatttagtgctaccaaaggggatacacaagccctttaggaagcagtacctctcgcctggaggatctgtgccatcttggattgagaattgcagatgtgacagaatggattgaccctagttggttggtattgatgacttcagcctggaaattgcttgccttttaaagaagcatatatgggttggaattatgccaaagcataggaagctgggaataagcaaacaaatgctgatatagtcagcaaatttggatagtctctagggctcatcatttttcatactacctctctcttctggcctgtgtctaaggaattgtacaacataggccagggccaacaaagtggagaggtggacacattttcatgttcattactaaaacaaacagcaaaactattggtttgttattctgtgttttcctcaagtcagtacatactatttggtttcaggatttctttccatttctctatcaagcattaaataattgagaactgtttcttcatctctggtgttcatgtcttttaattaaatacggaattttggagatgataagagggataacctgcgctatgccattttgcttccttatctcactgtgttctttcagagtgtagatatctacccaggtcaaaattcagccaaaagcactattatgtaaagataataatccaaatctttctcccaaatacatgtgtacagaatcatcccccaaggtttagagtcaccaataccctattctgagcttctgctgtatgttttatgtttataattacagttcacaaaaaggaagttagtcttgtttttaagatcagaagtgggtgagaggacctgtgatgaggttcctgagggtttggtgtttactaagtaatatatcttactctaggtgcagggctgatggcaagccaaagagcaactgccttactttgatgtaaacaaaatttgctaaactgagctgctcaaaattgtttttatggtagtagtgtttctttggattgtatcataatagctgccaaaggataggtaaagaggtcattaaaatgatgttgaactag

SEQ ID NO: 32603 - DNA, 699 bp, Homo sapiens
  source 1..699: mol_type = unassigned DNA
gctgccggcggtggactcgtcggagccgcgggcggtcagatgagtgatggggaaagagcttttggaagtttgagttaattccttatggtcatgcagctaacaggaatttgaccctctagggcatgaatactgtgctgttcagttctgagctgtgctagcaatacccttcaaaggaagagcaatggctgcagcagcagcttctcacctgaacctggatgccctccgggaagtgctagaatgccccatctgcatggagtccttcacagaagagcagctgcgtcccaagcttctgcactgtggccataccatctgccgccagtgcctggagaagctattggccagtagcatcaatggtgtccgctgtcccttttgcagcaagattacccgcataaccagcttgacccagctgacagacaatctgacagtgctaaagatcattgatacagctgggctcagcgaggctgtggggctgctcatgtgtcggtcctgtgggcggcgtctgccccggcaattctgccggagctgtggtttggtgttatgtgagccctgccgggaggcagaccatcagcctcctggccactgtacactccctgtcaaagaagcagctgaggagcggcgtcgggactttggagagaagttaactcgtctgcgggaacttatgggggagctgcagcggcggaaggcagccttggaaggtgt

SEQ ID NO: 32604 - DNA, 3717 bp, Homo sapiens
  source 1..3717: mol_type = unassigned DNA
ggtgctcaacggcgcgtgcgcagagggaggcaggcgggtgggctgccggcggtggactcgtcggagccgcgggcggtcagcaggaatttgaccctctagggcatgaatactgtgctgttcagttctgagctgtgctagcaatacccttcaaaggaagagcaatggctgcagcagcagcttctcacctgaacctggatgccctccgggaagtgctagaatgccccatctgcatggagtccttcacagaagagcagctgcgtcccaagcttctgcactgtggccataccatctgccgccagtgcctggagaagctattggccagtagcatcaatggtgtccgctgtcccttttgcagcaagattacccgcataaccagcttgacccagctgacagacaatctgacagtgctaaagatcattgatacagctgggctcagcgaggctgtggggctgctcatgtgtcggtcctgtgggcggcgtctgccccggcaattctgccggagctgtggtttggtgttatgtgagccctgccgggaggcagaccatcagcctcctggccactgtacactccctgtcaaagaagcagctgaggagcggcgtcgggactttggagagaagttaactcgtctgcgggaacttatgggggagctgcagcggcggaaggcagccttggaaggtgtctccaaggaccttcaggcaaggtataaagcagttctccaggagtatgggcatgaggagcgcagggtccaggatgagctggctcgctctcggaagttcttcacaggctctttggctgaagttgagaagtccaatagtcaagtggtagaggagcagagttacctgcttaacattgcagaggtgcaggctgtgtctcgctgtgactacttcctggccaagatcaagcaggcagatgtagcactactggaggagacagctgatgaggaggagccagagctcactgccagcttgcctcgggagctcaccctgcaagatgtggagctccttaaggtaggtcatgttggccccctccaaattggacaagctgttaagaagccccggacagttaacgtggaagattcctgggccatggaggccacagcgtctgctgcctctacctctgttacttttagagagatggacatgagcccggaggaagtggttgccagccctagggcctcacctgctaaacagcggggtcctgaggcagcctccaatatccagcagtgcctctttctcaagaagatgggggccaaaggcagcactccaggaatgttcaatcttccagtcagtctctacgtgaccagtcaaggtgaagtactagtcgctgaccgtggtaactatcgtatacaagtctttacccgcaaaggctttttgaaggaaatccgccgcagccccagtggcattgatagctttgtgctaagcttccttggggcagatctacccaacctcactcctctctcagtggcaatgaactgccaggggctgattggtgtgactgacagctatgataactccctcaaggtatataccttggatggccactgcgtggcctgtcacaggagccagctgagcaaaccatggggtatcacagccttgccatctggccagtttgtagtaaccgatgtggaaggtggaaagctttggtgtttcacagttgatcgaggatcaggggtggtcaaatacagctgcctatgtagtgctgtgcggcccaaatttgtcacctgtgatgctgagggcaccgtctacttcacccagggcttaggcctcaatctggagaatcggcagaatgagcaccacctggagggtggcttttccattggctctgtaggccctgatgggcagctgggtcgccagattagccacttcttctcggagaatgaggatttccgctgcattgctggcatgtgtgtggatgctcgtggtgatctcatcgtggctgacagtagtcgcaaggaaattctccattttcctaagggtgggggctatagtgtccttattcgagagggacttacctgtccggtgggcatagccctaactcctaaggggcagctgctggtcttggactgttgggatcattgcatcaagatctacagctaccatctgagaagatattccaccccataggggatgagaaattatcagtttcttctgctcccaagccaacttcccttcccttagttcttggttgttagtggcacatgcagaatagactcagcctatgtcctgattccagctgggtagttctagaacttcagaagctccatcttttaatgtttttatttgttatgtccccctccccgcttcccacctaaatttagagctttaaaagatgcactgcccaaataggacacacgatggtgttagctgaagtttgattagcaattaggcacttccaaggctttagtagagagagccactttagccctttgtgccatgtttgaaatttgcccttgtattaaatccttgattttttcccatttggctttgatgcccttgatccattgtttccttcctactataatgtgcttcatctgtgacactttctcttgaactctgattggattcactgtgcatgcttcagtgggatctgctccacctttcagtgacatttaagacatcatattcccgtaacattatgtctcagtctgatcgtctttaccagtatgaaagtcattcatttagtgctaccaaaggggatacacaagccctttaggaagcagtacctctcgcctggaggatctgtgccatcttggattgagaattgcagatgtgacagaatggattgaccctagttggttggtattgatgacttcagcctggaaattgcttgccttttaaagaagcatatatgggttggaattatgccaaagcataggaagctgggaataagcaaacaaatgctgatatagtcagcaaatttggatagtctctagggctcatcatttttcatactacctctctcttctggcctgtgtctaaggaattgtacaacataggccagggccaacaaagtggagaggtggacacattttcatgttcattactaaaacaaacagcaaaactattggtttgttattctgtgttttcctcaagtcagtacatactatttggtttcaggatttctttccatttctctatcaagcattaaataattgagaactgtttcttcatctctggtgttcatgtcttttaattaaatacggaattttggagatgataagagggataacctgcgctatgccattttgcttccttatctcactgtgttctttcagagtgtagatatctacccaggtcaaaattcagccaaaagcactattatgtaaagataataatccaaatctttctcccaaatacatgtgtacagaatcatcccccaaggtttagagtcaccaataccctattctgagcttctgctgtatgttttatgtttataattacagttcacaaaaaggaagttagtcttgtttttaagatcagaagtgggtgagaggacctgtgatgaggttcctgagggtttggtgtttactaagtaatatatcttactctaggtgcagggctgatggcaagccaaagagcaactgccttactttgatgtaaacaaaatttgctaaactgagctgctcaaaattgtttttatggtagtagtgtttctttggattgtatcataatagctgccaaaggataggtaaagaggtcattaaaatgatgttgaact

SEQ ID NO: 32605 - DNA, 8339 bp, Homo sapiens
  source 1..8339: mol_type = unassigned DNA
ctgcggctggggctgggggcggcggcggcggcgacgcgggcggcgggcggcgcggggcggtccggcgggttcaaagaggaaaacatggcggaaaacaaaggcggcggcgaggctgagagcggcggcgggggcagcggcagcgcgccggtaactgccggggccgccgggcccgccgcgcaggaggcggagccgcctctcaccgcggtgctggtggaggaggaggaggaggaaggcggcagggccggcgctgagggcggcgcggccgggcccgacgacgggggggtggccgcggcctcctcgggctcggcccaggctgcttcatctcctgcggcctcagtgggcactggagttgccgggggcgcagtatcgacgccggctccagctccagcctcggctcccgctccgggtccctcggcagggccgcctcctggaccgccagcctcgctcctggacacctgcgccgtgtgtcagcagagcttgcagagccggcgtgaggcggagcccaagctgctgccctgtcttcactccttctgcctgcgctgcctgcccgagccggagcgccagctcagcgtgcccatcccggggggcagcaacggcgacatccagcaagttggtgtaatacggtgcccagtatgccgccaagaatgcagacagatagaccttgtggataattattttgtgaaagacacatctgaagctcctagcagttctgatgaaaaatcagaacaggtatgtactagttgtgaagacaatgcaagtgcagttggcttttgtgtagaatgtggagagtggctatgtaagacatgtatcgaagcacatcaaagagtaaaatttactaaagatcacttgatcaggaagaaagaagatgtctcagagtctgttggagcatctggtcaacgccctgttttctgccctgtacacaaacaagaacagttgaaacttttctgtgaaacatgtgatagattgacatgtagagactgtcagctattggaacacaaagaacataggtatcagtttttggaagaagcttttcaaaatcagaagggtgcaattgagaatctactggcgaaacttcttgagaagaagaattatgttcattttgcagctactcaggtgcagaataggataaaagaagtaaatgagactaacaaacgagtagaacaggaaattaaagtggccattttcacccttatcaatgaaattaataagaaaggaaaatctctcttacaacagctagagaatgttacaaaggaaagacagatgaagttactacagcagcagaatgacatcacaggcctttcccggcaggtgaagcatgttatgaacttcacaaattgggcaattgcaagtggcagcagcacagcactactatacagcaagcgactgattactttccagttgcgtcatattttgaaagcacggtgtgatcctgtccctgctgctaatggagcaatacgtttccattgtgatcccaccttctgggcaaagaatgtagtcaatttaggtaatctagtaatagagagtaaaccagctcctggttatactcctaatgttgtagttgggcaagttcctccagggacaaaccacattagtaaaacccctggacagattaacttagcacagcttcgactccagcacatgcaacaacaagtatatgcacagaaacatcagcagttgcaacagatgaggatgcagcaaccaccagcacctgtaccaactacaacaacaacaacacaacagcatcctagacaagcagcccctcagatgttacaacaacagcctcctcgattgatcagtgtgcaaacaatgcaaagaggcaacatgaactgtggagcttttcaagcccatcagatgagactggctcagaatgctgccagaataccagggatacccaggcacagcggccctcaatattccatgatgcagccacacctccaaagacaacactcaaacccagggcatgctggaccctttcccgtagtatcggtacacaacaccacaatcaacccaacgagccctactacagcaactatggcaaatgcaaaccgaggtcccaccagcccatctgttacagcaatagagctaatcccctcagttaccaatccagaaaaccttccatcgctgccagatattccacccatacagttggaagatgctggctcaagtagtttagataatctactaagtagatacatctcaggcagtcacctacccccacagcctacaagcaccatgaatccttctccaggtccctctgccctttctccgggatcatcaggtttatccaattctcacacacctgtgagacccccaagtacttctagtactggcagtcgaggcagctgtgggtcatcaggaagaactgctgagaagacaagtcttagtttcaaatctgatcaggtgaaggtcaagcaagaacctgggactgaagatgaaatatgtagcttttcaggaggtgtaaaacaagaaaaaacagaggatggcaggaggagtgcttgcatgttgagcagtcctgagagtagcttgacaccacctctctcaaccaacctgcatctagaaagtgaattggatgcattggcaagcctggaaaaccatgtgaaaattgaacctgcagatatgaatgaaagctgcaaacagtcagggctcagcagccttgttaatggaaagtccccaattcgaagcctcatgcacaggtcggcaaggattggaggagatggcaacaataaagatgatgacccaaatgaagactggtgtgctgtctgccaaaacggaggagatctcttgtgctgcgaaaaatgtccaaaggtctttcatctaacttgtcatgttccaacactacttagctttccaagtggggactggatatgcacattttgtagagatattggaaagccagaagttgaatatgattgtgataatttgcaacatagtaagaaggggaaaactgcgcaggggttaagccccgtggaccaaaggaaatgtgaacgtcttctgctttacctctattgccatgaattaagtattgaattccaggagcctgttcctgcttcgataccaaactactataaaattataaagaaaccaatggatttatccaccgtgaaaaagaagcttcagaaaaaacattcccaacactaccaaatcccggatgactttgtggccgatgtccgtttgatcttcaagaactgtgaaaggtttaatgaaatgatgaaagttgttcaagtttatgcagacacacaagagattaatttgaaggctgattcagaagtagctcaggcagggaaagcagttgcattgtactttgaagataaactcacagagatctactcagacaggaccttcgcacctttgccagagtttgagcaggaagaggatgatggtgaggtaactgaggactctgatgaagactttatacagccccgcagaaaacgcctaaagtcagatgagagaccagtacatataaagtaaaatgacatggatttaaatcaattgtttaaaaaaaaaaaaacgaaaaaaaaaaaaaaaacacaaaaaacccagaaaacttttaagtgttgctggaatatcctgcctacagtgggcacctccttgaagaagctgatagcttttacacagtattagattgaaataatggacagaaacacattcttgtcaagaaagggggagagaagtctgtttgcaagtttcaaagcaaaaagcaaaagtgaaatgatttgaggatttctgttctaatggagatgattctctgattgttagaaatggcaaatattgatgattgtgtgctattgattggtgcaggatacttggtatacgagtaaatacttgagactcgtgtcacttgataaattttctttttggactaggtcgcacagttattaaaacaacttttaaccctcccccttcacacacatacatatcaggttgttttctagttaaaaacccaagtagctcagattctactttaatgtcagtgcagatttgcattgaatcatgccattatgttttttctcatttttatgctgttgggtcttagtttttaaattgatataaagaactcagcaatggttttattttctactcatacttagggtttaggaaacactaccactagttatcatttaatcaacttcaatggtctactgaaacaaaaatggtaacttttcattagtggattatttagagttatagtagttgtttccagaaaacacttcctcacaattgtacttcccaatcaaatcatgtgatcatacagttattcccatgaaaggcagaatgtttgtttcaaaattaatctagttttctgtacatttaaatttgagaaggtgacaactggctcttttccagtcttccttcatgtcagttttctgatagaccactattggcaaacagtatctgtcaactaccaaatgtgtaaaattttctgtatttcactttgtcttatttgtaaatagtgaactaaaacttttggcagatcagcaacatttgctgagcctgttttttaagctaatgtgtattcttactaatgttcctatcaagaatggatttgtaatatatgctgtctatttctaatgttcacattcatattttgaggttctatcttattttaatagagaacagacttctcaaaaaatcttcagaagcagcttattattgaaatatcgaaatattgaaataaacccggtggggttagattactcatctgtccaccaagtgggacatttgcatggactgggggcttaaaggacttagaagagacctgtaagtaaatcctgaaaatgagccaatccccacttgaatggttactggagtaaacccacctttaccaccccaattacagcacccgaggccgataaaccaacttggctctggttcatttttcttttcttcatttgtgatgctcagattcaaaatgtgtgttctacactgttacaggcttctcttttgtttgattaaagattttagtcctacttttgtatggacacattagaatattcagagaccaaaatagaagaatttgctgttagatatttttcagaagtcagcagatttgtggcaaatcatttatttgcctttttaaaaattcatttaagcagttcagagagtagactactcagaaaattatttcacgtaattgtctaagaggtcaatattttttaatgcatattgaatcaaataaagtgctctaaagaaattattatacaaattcctttgggttgtttttcttttcttaacaaggggtgggggtaaacaggaatatgattcaggctttctggttgtgtatttaaagagtattgattttattattactattgatttactttattcctggcttccttttcacttttctttcaatttttaaaaaataatttaagccgttgaaaatataccaaactgttgaaacattttactcaaattttaaattcctaaaaatgttttttaataagagggagaaaattatttaaaaatacttatgcctatgccaatttccctcttttttcacaaaatccatgatttcagtttgtaagtagacatatatctaagggcacatttttggaaagtgaggaatagcagcagtataacttcattttgtcaggcctttgagttctaatattttgtattgctcttcaaatggatccttttaaaaaaattgtagataatgagtcataaatagattctgccaactgaggggagaaacattttaagtaaatatttttcagtatttggggccttaaaaaataattgtgtttccttaaaattacatgttagatagagtttttaggtttttttggttttaagattggttaaagcaatttaaaagccacttttttgtcaacatttaatagcctccacttctgttaagataatgtatactgctgaggaattactattaatagctatcaacataccaccattaaattaaggtattcactttagattttttattaaagcttttttcttgcacactgatcgttgtgtttctaagctgattttttcagctctaatatacctatggttaaaaagtataaaaacttaaattgatatttagatatatgttttcctattagtttatgttttaaaaagacaaaattgtatctgtcagtccctgaaggcagtttgtttttatactctctcacatttgtatttgttttttaaatggcagtattttagaagatttggagaaaagtccacataataatgttttcttaaaagcttttaaagtttttgctgtacttcaatttacttcttccatcagaaaactaagaacaaagtgttgctcagtctgttccgctgacctaaatttgtgttttcagcacttggctcagccaattcactgagtgaaggaattgctttatgaggcaaagcatgtgaaagttctaaagtatggttagattgtaggtcgtgctctatatggaaacatcaaaccattactacagagaaatgataaggcattggatccactattgaaattattatttttggatcaacaagttggtactttctgacttctgtatcttaacataagggaattttaggtaatgctaagtcagttgtctcattttttgtgataagttttggaatttttagttaattgaaataaataatgcttttaaatagaagtaaaaggtttataagtgtgcaaattgtagatttatcaattacctcagcaggtatcctgccatgtaattattagtgattagtgttaataagataatagattcaggtcttccaactatgcccttggattgtggcctactgtatgttattaaatggtctcttactatccaaaatgggagtagatgctgtggccccgtctcccttggcttttacgtcccatatccacccccattcatgtacaacatgtgaaatataaaaatctcatttcttgtcaaaatcagcactgcttatttgcatactcagcatcggatcagtgagtagttttataaaaaatccacgcacccaactcccttagttaaaacagattcttaattcataccatgaattcttaatttctgtaccatctatgttaatgatctgctgaaggtgactcaagattttcaaggtgtaatacagtttgatcatgtaccggacctggatatttaattttttttccctcacagttaatctcctccttgataaagcaataacactgctttgagtctgttgcctaatagcatgtcagaatcctctcctggatggtgattttataggaaagtttgtatgcatatcacccagtctatcttttaaaaattaagaaatttaaatgtatgctggaagtaatgacactatattgtggcattttattttaaaaattggggaaagttgcatatttttttaaaagtaagtgtttgagtaaaaaaattgaaggtacttttttaaggaaaaaaatttatatgccacagtttacatagacatttcagattcaacacgtactcttgaatataatggtttcttttacttggtcaaaatgcatgtatagcatttctttcatcttagttccttgtgtttgcctatgtggtcctttatatattttttattgtatcgaagaaacaaaactatcttcaaaaataagttaatttggatatatttgtcatatcaaactacaaagtgtacaaagttaagtttagcccttttctagaaagtgatctttaaaattaaaaatgctcctcttttaaattcaccaaatttatgtgtgggaaggcaccaaaatgattttgtaagtgccactgcaatattccctttcaagtgtggcctaaatttcaatcttaaggatggaatgcatgtctgctccttgttctgaaaaatgtaggcatctactacattttaaaacacagtgaaacatatacataagcctataaaaaaagatttgtgcaatttgaaagcctgttaattttttatgtagacatacctacacacgaaagggttaaattcacagccttactagttccttgcttccagtatttcaattggtctcctcccctcattattattattactactagtactattatttttgcacatagttaactgcccttcaatatgattcttaaaaagtgctgtttctgtggtatcgtattctctaaataatcatatttaattttttaaaacaaggttgcagtttctaattgtttcgttcctgtgtttttgctggtgtgtaataaaagcaagttttttcttttcatggttatttaatacattagctgcctgtaaataattcttgttataatgctctggaatgtgttgtagaagttgtattagattagttttaaacccttgtttgaaagccacattgttttggttatttctattaaattagaaaattgaaaaagttttcaaatgaa

SEQ ID NO: 32606 - DNA, 3457 bp, Homo sapiens
  source 1..3457: mol_type = unassigned DNA
ctgcggctggggctgggggcggcggcggcggcgacgcgggcggcgggcggcgcggggcggtccggcgggttcaaagaggaaaacatggcggaaaacaaaggcggcggcgaggctgagagcggcggcgggggcagcggcagcgcgccggtaactgccggggccgccgggcccgccgcgcaggaggcggagccgcctctcaccgcggtgctggtggaggaggaggaggaggaaggcggcagggccggcgctgagggcggcgcggccgggcccgacgacgggggggtggccgcggcctcctcgggctcggcccaggctgcttcatctcctgcggcctcagtgggcactggagttgccgggggcgcagtatcgacgccggctccagctccagcctcggctcccgctccgggtccctcggcagggccgcctcctggaccgccagcctcgctcctggacacctgcgccgtgtgtcagcagagcttgcagagccggcgtgaggcggagcccaagctgctgccctgtcttcactccttctgcctgcgctgcctgcccgagccggagcgccagctcagcgtgcccatcccggggggcagcaacggcgacatccagcaagttggtgtaatacggtgcccagtatgccgccaagaatgcagacagatagaccttgtggataattattttgtgaaagacacatctgaagctcctagcagttctgatgaaaaatcagaacaggtatgtactagttgtgaagacaatgcaagtgcagttggcttttgtgtagaatgtggagagtggctatgtaagacatgtatcgaagcacatcaaagagtaaaatttactaaagatcacttgatcaggaagaaagaagatgtctcagagtctgttggagcatctggtcaacgccctgttttctgccctgtacacaaacaagaacagttgaaacttttctgtgaaacatgtgatagattgacatgtagagactgtcagctattggaacacaaagaacataggtatcagtttttggaagaagcttttcaaaatcagaagggtgcaattgagaatctactggcgaaacttcttgagaagaagaattatgttcattttgcagctactcaggtgcagaataggataaaagaagtaaatgagactaacaaacgagtagaacaggaaattaaagtggccattttcacccttatcaatgaaattaataagaaaggaaaatctctcttacaacagctagagaatgttacaaaggaaagacagatgaagttactacagcagcagaatgacatcacaggcctttcccggcaggtgaagcatgttatgaacttcacaaattgggcaattgcaagtggcagcagcacagcactactatacagcaagcgactgattactttccagttgcgtcatattttgaaagcacggtgtgatcctgtccctgctgctaatggagcaatacgtttccattgtgatcccaccttctgggcaaagaatgtagtcaatttaggtaatctagtaatagagagtaaaccagctcctggttatactcctaatgttgtagttgggcaagttcctccagggacaaaccacattagtaaaacccctggacagattaacttagcacagcttcgactccagcacatgcaacaacaagtatatgcacagaaacatcagcagttgcaacagatgaggatgcagcaaccaccagcacctgtaccaactacaacaacaacaacacaacagcatcctagacaagcagcccctcagatgttacaacaacagcctcctcgattgatcagtgtgcaaacaatgcaaagaggcaacatgaactgtggagcttttcaagcccatcagatgagactggctcagaatgctgccagaataccagggatacccaggcacagcggccctcaatattccatgatgcagccacacctccaaagacaacactcaaacccagggcatgctggaccctttcccgtagtatcggtacacaacaccacaatcaacccaacgagccctactacagcaactatggcaaatgcaaaccgaggtcccaccagcccatctgttacagcaatagagctaatcccctcagttaccaatccagaaaaccttccatcgctgccagatattccacccatacagttggaagatgctggctcaagtagtttagataatctactaagtagatacatctcaggcagtcacctacccccacagcctacaagcaccatgaatccttctccaggtccctctgccctttctccgggatcatcaggtttatccaattctcacacacctgtgagacccccaagtacttctagtactggcagtcgaggcagctgtgggtcatcaggaagaactgctgagaagacaagtcttagtttcaaatctgatcaggtgaaggtcaagcaagaacctgggactgaagatgaaatatgtagcttttcaggaggtgtaaaacaagaaaaaacagaggatggcaggaggagtgcttgcatgttgagcagtcctgagagtagcttgacaccacctctctcaaccaacctgcatctagaaagtgaattggatgcattggcaagcctggaaaaccatgtgaaaattgaacctgcagatatgaatgaaagctgcaaacagtcagggctcagcagccttgttaatggaaagtccccaattcgaagcctcatgcacaggtcggcaaggattggaggagatggcaacaataaagatgatgacccaaatgaagactggtgtgctgtctgccaaaacggaggagatctcttgtgctgcgaaaaatgtccaaaggtctttcatctaacttgtcatgttccaacactacttagctttccaagtggggactggatatgcacattttgtagagatattggaaagccagaagttgaatatgattgtgataatttgcaacatagtaagaaggggaaaactgcgcaggggttaagccccgtggaccaaaggaaatgtgaacgtcttctgctttacctctattgccatgaattaagtattgaattccaggagcctgttcctgcttcgataccaaactactataaaattataaagaaaccaatggatttatccaccgtgaaaaagaagcttcagaaaaaacattcccaacactaccaaatcccggatgactttgtggccgatgtccgtttgatcttcaagaactgtgaaaggtttaatgaagctgattcagaagtagctcaggcagggaaagcagttgcattgtactttgaagataaactcacagagatctactcagacaggaccttcgcacctttgccagagtttgagcaggaagaggatgatggtgaggtaactgaggactctgatgaagactttatacagccccgcagaaaacgcctaaagtcagatgagagaccagtacatataaagtaaaatgacatggatttaaatcaattgtttaaaaaaaaaaaaa

SEQ ID NO: 32607 - DNA, 2706 bp, Homo sapiens
  source 1..2706: mol_type = unassigned DNA
agtctgttggagcatctggtcaacgccctgttttctgccctgtacacaaacaagaacagttgaaacttttctgtgaaacatgtgatagattgacatgtagagactgtcagctattggaacacaaagaacataggtatcagtttttggaagaagcttttcaaaatcagaagggtgcaattgagaatctactggcgaaacttcttgagaagaagaattatgttcattttgcagctactcaggtgcagaataggataaaagaagtaaatgagactaacaaacgagtagaacaggaaattaaagtggccattttcacccttatcaatgaaattaataagaaaggaaaatctctcttacaacagctagagaatgttacaaaggaaagacagatgaagttactacagcagcagaatgacatcacaggcctttcccggcaggtgaagcatgttatgaacttcacaaattgggcaattgcaagtggcagcagcacagcactactatacagcaagcgactgattactttccagttgcgtcatattttgaaagcacggtgtgatcctgtccctgctgctaatggagcaatacgtttccattgtgatcccaccttctgggcaaagaatgtagtcaatttaggtaatctagtaatagagagtaaaccagctcctggttatactcctaatgttgtagttgggcaagttcctccagggacaaaccacattagtaaaacccctggacagattaacttagcacagcttcgactccagcacatgcaacaacaagtatatgcacagaaacatcagcagttgcaacagatgaggatgcagcaaccaccagcacctgtaccaactacaacaacaacaacacaacagcatcctagacaagcagcccctcagatgttacaacaacagcctcctcgattgatcagtgtgcaaacaatgcaaagaggcaacatgaactgtggagcttttcaagcccatcagatgagactggctcagaatgctgccagaataccagggatacccaggcacagcggccctcaatattccatgatgcagccacacctccaaagacaacactcaaacccagggcatgctggaccctttcccgtagtatcggtacacaacaccacaatcaacccaacgagccctactacagcaactatggcaaatgcaaaccgaggtcccaccagcccatctgttacagcaatagagctaatcccctcagttaccaatccagaaaaccttccatcgctgccagatattccacccatacaggcaaacgttgttccgatgatgcactcctggtatgagtttggagccagagagaagacccaggaccaaaatgtgttggaagatgctggctcaagtagtttagataatctactaagtagatacatctcaggcagtcacctacccccacagcctacaagcaccatgaatccttctccaggtccctctgccctttctccgggatcatcaggtttatccaattctcacacacctgtgagacccccaagtacttctagtactggcagtcgaggcagctgtgggtcatcaggaagaactgctgagaagacaagtcttagtttcaaatctgatcaggtgaaggtcaagcaagaacctgggactgaagatgaaatatgtagcttttcaggaggtgtaaaacaagaaaaaacagaggatggcaggaggagtgcttgcatgttgagcagtcctgagagtagcttgacaccacctctctcaaccaacctgcatctagaaagtgaattggatgcattggcaagcctggaaaaccatgtgaaaattgaacctgcagatatgaatgaaagctgcaaacagtcagggctcagcagccttgttaatggaaagtccccaattcgaagcctcatgcacaggtcggcaaggattggaggagatggcaacaataaagatgatgacccaaatgaagactggtgtgctgtctgccaaaacggaggagatctcttgtgctgcgaaaaatgtccaaaggtctttcatctaacttgtcatgttccaacactacttagctttccaagtggggactggatatgcacattttgtagagatattggaaagccagaagttgaatatgattgtgataatttgcaacatagtaagaaggggaaaactgcgcaggggttaagccccgtggaccaaaggaaatgtgaacgtcttctgctttacctctattgccatgaattaagtattgaattccaggagcctgttcctgcttcgataccaaactactataaaattataaagaaaccaatggatttatccaccgtgaaaaagaagcttcagaaaaaacattcccaacactaccaaatcccggatgactttgtggccgatgtccgtttgatcttcaagaactgtgaaaggtttaatgaaatgatgaaagttgttcaagtttatgcagacacacaagagattaatttgaaggctgattcagaagtagctcaggcagggaaagcagttgcattgtactttgaagataaactcacagagatctactcagacaggaccttcgcacctttgccagagtttgagcaggaagaggatgatggtgaggtaactgaggactctgatgaagactttatacagccccgcagaaaacgcctaaagtcagatgagagaccagtacatataaagtaaaatgacatggatttaaatcaattgtttaaaaaaaaaaaaa

SEQ ID NO: 32608 - DNA, 2708 bp, Homo sapiens
  source 1..2708: mol_type = unassigned DNA
aagaagatgtctcagagtctgttggagcatctggtcaacgccctgttttctgccctgtacacaaacaagaacagttgaaacttttctgtgaaacatgtgatagattgacatgtagagactgtcagctattggaacacaaagaacataggtatcagtttttggaagaagcttttcaaaatcagaagggtgcaattgagaatctactggcgaaacttcttgagaagaagaattatgttcattttgcagctactcaggtgcagaataggataaaagaagtaaatgagactaacaaacgagtagaacaggaaattaaagtggccattttcacccttatcaatgaaattaataagaaaggaaaatctctcttacaacagctagagaatgttacaaaggaaagacagatgaagttactacagcagcagaatgacatcacaggcctttcccggcaggtgaagcatgttatgaacttcacaaattgggcaattgcaagtggcagcagcacagcactactatacagcaagcgactgattactttccagttgcgtcatattttgaaagcacggtgtgatcctgtccctgctgctaatggagcaatacgtttccattgtgatcccaccttctgggcaaagaatgtagtcaatttaggtaatctagtaatagagagtaaaccagctcctggttatactcctaatgttgtagttgggcaagttcctccagggacaaaccacattagtaaaacccctggacagattaacttagcacagcttcgactccagcacatgcaacaacaagtatatgcacagaaacatcagcagttgcaacagatgaggatgcagcaaccaccagcacctgtaccaactacaacaacaacaacacaacagcatcctagacaagcagcccctcagatgttacaacaacagcctcctcgattgatcagtgtgcaaacaatgcaaagaggcaacatgaactgtggagcttttcaagcccatcagatgagactggctcagaatgctgccagaataccagggatacccaggcacagcggccctcaatattccatgatgcagccacacctccaaagacaacactcaaacccagggcatgctggaccctttcccgtagtatcggtacacaacaccacaatcaacccaacgagccctactacagcaactatggcaaatgcaaaccgaggtcccaccagcccatctgttacagcaatagagctaatcccctcagttaccaatccagaaaaccttccatcgctgccagatattccacccatacaggcaaacgttgttccgatgatgcactcctggtatgagtttggagccagagagaagacccaggaccaaaatgtgttggaagatgctggctcaagtagtttagataatctactaagtagatacatctcaggcagtcacctacccccacagcctacaagcaccatgaatccttctccaggtccctctgccctttctccgggatcatcaggtttatccaattctcacacacctgtgagacccccaagtacttctagtactggcagtcgaggcagctgtgggtcatcaggaagaactgctgagaagacaagtcttagtttcaaatctgatcaggtgaaggtcaagcaagaacctgggactgaagatgaaatatgtagcttttcaggaggtgtaaaacaagaaaaaacagaggatggcaggaggagtgcttgcatgttgagcagtcctgagagtagcttgacaccacctctctcaaccaacctgcatctagaaagtgaattggatgcattggcaagcctggaaaaccatgtgaaaattgaacctgcagatatgaatgaaagctgcaaacagtcagggctcagcagccttgttaatggaaagtccccaattcgaagcctcatgcacaggtcggcaaggattggaggagatggcaacaataaagatgatgacccaaatgaagactggtgtgctgtctgccaaaacggaggagatctcttgtgctgcgaaaaatgtccaaaggtctttcatctaacttgtcatgttccaacactacttagctttccaagtggggactggatatgcacattttgtagagatattggaaagccagaagttgaatatgattgtgataatttgcaacatagtaagaaggggaaaactgcgcaggggttaagccccgtggaccaaaggaaatgtgaacgtcttctgctttacctctattgccatgaattaagtattgaattccaggagcctgttcctgcttcgataccaaactactataaaattataaagaaaccaatggatttatccaccgtgaaaaagaagcttcagaaaaaacattcccaacactaccaaatcccggatgactttgtggccgatgtccgtttgatcttcaagaactgtgaaaggtttaatgaaatgatgaaagttgttcaagtttatgcagacacacaagagattaatttgaaggctgattcagaagtagctcaggcagggaaagcagttgcattgtactttgaagataaactcacagagatctactcagacaggaccttcgcacctttgccagagtttgagcaggaagaggatgatggtgaggtaactgaggactctgatgaagactttatacagccccgcagaaaacgcctaaagtcagatgagagaccagtacatataaagtaaaatgacatggatttaaatcaattgttt

SEQ ID NO: 32609 - DNA, 3025 bp, Homo sapiens
  source 1..3025: mol_type = unassigned DNA
agggatcccctgcctttctcggaacggaacggagcagagtcgtgcgtggttgagtttagataaaagccgagtgagcgcgctctgttccttaagattagtttaaggtgccttggattgctctgaagagctttgaccacctgatattgcttacatctggaacttcttggcttctcattccccagatgtgcgggtcagagaggattctacaggcaggaaacatcttagaaatcagggttgggcaggcaggagccaggagagtagctacaatgacttcaccagtactggtggacatacgagaagaggtgacctgccctatctgcctggagctcctaacagaacccctgagcatagactgtggccacagcttctgccaagcctgcatcacaccaaatggcagggaatcagtgattggtcaagaaggggaaagaagctgccctgtgtgccagaccagctaccagccagggaacctgcggcctaatcggcatctggccaacatagtgaggcggctcagagaggtagtgttgggccctgggaagcagctgaaagcagttctttgtgcagaccatggagaaaaactgcagctcttctgtcaggaggatgggaaggtcatttgctggctttgtgagcggtctcaggagcaccgtggtcaccacacgttcctcgtggaggaggttgcccaggagtaccaggagaagtttcaggagtctctaaagaagctgaagaacgaggagcaggaagctgagaagctaacagcttttatcagagagaagaaaacatcctggaagaatcagatggagcctgagagatgcaggatccagacagagtttaatcagctgcgaaatatcctagacagagtggagcaacgggagctgaaaaagctggaacaggaagagaagaaggggctacgaattatagaagaggctgagaatgatctggtccaccagacccagtcgctgcgagagctcatctcggatctggagcgtcgatgtcaggggtcaacaatggagctgctgcaggatgtgagtgatgtcacagaaaggagtgagttctggaccctgaggaagccagaagctctccctacaaagctgagaagtatgttccgagccccagatctgaaaaggatgctgcgagtgtgtagagagctgacagatgtccaaagctactgggccatccaggggtctttaaccagaagagagaggagagcctcaggagttaggaccagaagaagccagggaagcagtgcaatggcttcaaaaatcttgcttaacgtacaagaggaggtgacctgtcccatctgcctggagctgttgacagaacccttgagtctagactgtggccacagcctctgccgagcctgcatcactgtgagcaacaaggaggcagtgaccagcatgggaggaaaaagcagctgtcctgtgtgtggtatcagttactcatttgaacatctacaggctaatcagcatctggccaacatagtggagagactcaaggaggtcaagttgagcccagacaatgggaagaagagagatctctgtgatcatcatggagagaaactcctactcttctgtaaggaggataggaaagtcatttgctggctttgtgagcggtctcaggagcaccgtggtcaccacacagtcctcacggaggaagtattcaaggaatgtcaggagaaactccaggcagtcctcaagaggctgaagaaggaagaggaggaagctgagaagctggaagctgacatcagagaagagaaaacttcctggaagtatcaggtacaaactgagagacaaaggatacaaacagaatttgatcagcttagaagcatcctaaataatgaggagcagagagagctgcaaagattggaagaagaagaaaagaagacgctggataagtttgcagaggctgaggatgagctagttcagcagaagcagttggtgagagagctcatctcagatgtggagtgtcggagtcagtggtcaacaatggagctgctgcaggacatgagtggaatcatgaaatggagtgagatctggaggctgaaaaagccaaaaatggtttccaagaaactgaagactgtattccatgctccagatctgagtaggatgctgcaaatgtttagagaactgacagctgtccggtgctactgggtggatgtcacactgaattcagtcaacctaaatttgaatcttgtcctttcagaagatcagagacaagtgatatctgtgccaatttggccttttcagtgttataattatggtgtcttgggatcccaatatttctcctctgggaaacattactgggaagtggacgtgtccaagaaaactgcctggatcctgggggtatactgtagaacatattcccgccatatgaagtatgttgttagaagatgtgcaaatcgtcaaaatctttacaccaaatacagacctctatttggctactgggttatagggttacagaataaatgtaagtatggtgtctttgaagagtctttgtcctctgatcccgaggttttgactctctccatggctgtgcctccctgccgtgttggggttttcctcgactatgaagcaggcattgtctcatttttcaatgtcacaagccatggctccctcatttacaagttctctaaatgttgcttttctcagcctgtttatccatatttcaatccttggaactgtccagctcccatgactctatgcccaccaagctcttgaattttctcatttcttcacctacaaccctttgtcttgacttatctcctgcaactgactcatctgcaacattcacaccattgcttccttgtggtttcccttctttagaacttttactcatccttgagatgtatggtgtatttggcttgagttatgagagatgcttatttattcatttactctttttcatattttcagagaaagttacctaatccctcctaaagacacagcagtatgggtataacatccttgccttcccatttatccatgtttcactttatcactgatatgaagaggcccaaagcctgttagccacc

SEQ ID NO: 32610 - DNA, 2311 bp, Homo sapiens
  source 1..2311: mol_type = unassigned DNA
tgaatgaatcctgaccacacccaccctggcttttcttcacctcttcaaccaggagccgagatttctgttgctctgaagccatccaggggtctttaaccagaagagagaggagagcctcaggagttaggaccagaagaagccagggaagcagtgcaatggcttcaaaaatcttgcttaacgtacaagaggaggtgacctgtcccatctgcctggagctgttgacagaacccttgagtctagactgtggccacagcctctgccgagcctgcatcactgtgagcaacaaggaggcagtgaccagcatgggaggaaaaagcagctgtcctgtgtgtggtatcagttactcatttgaacatctacaggctaatcagcatctggccaacatagtggagagactcaaggaggtcaagttgagcccagacaatgggaagaagagagatctctgtgatcatcatggagagaaactcctactcttctgtaaggaggataggaaagtcatttgctggctttgtgagcggtctcaggagcaccgtggtcaccacacagtcctcacggaggaagtattcaaggaatgtcaggagaaactccaggcagtcctcaagaggctgaagaaggaagaggaggaagctgagaagctggaagctgacatcagagaagagaaaacttcctggaagtatcaggtacaaactgagagacaaaggatacaaacagaatttgatcagcttagaagcatcctaaataatgaggagcagagagagctgcaaagattggaagaagaagaaaagaagacgctggataagtttgcagaggctgaggatgagctagttcagcagaagcagttggtgagagagctcatctcagatgtggagtgtcggagtcagtggtcaacaatggagctgctgcaggacatgagtggaatcatgaaatggagtgagatctggaggctgaaaaagccaaaaatggtttccaagaaactgaagactgtattccatgctccagatctgagtaggatgctgcaaatgtttagagaactgacagctgtccggtgctactgggtggatgtcacactgaattcagtcaacctaaatttgaatcttgtcctttcagaagatcagagacaagtgatatctgtgccaatttggccttttcagtgttataattatggtgtcttgggatcccaatatttctcctctgggaaacattactgggaagtggacgtgtccaagaaaactgcctggatcctgggggtatactgtagaacatattcccgccatatgaagtatgttgttagaagatgtgcaaatcgtcaaaatctttacaccaaatacagacctctatttggctactgggttatagggttacagaataaatgtaagtatggtgtctttgaagagtctttgtcctctgatcccgaggttttgactctctccatggctgtgcctccctgccgtgttggggttttcctcgactatgaagcaggcattgtctcatttttcaatgtcacaagccatggctccctcatttacaagttctctaaatgttgcttttctcagcctgtttatccatatttcaatccttggaactgtccagctcccatgactctatgcccaccaagctcttgaattttctcatttcttcacctacaaccctttgtcttgacttatctcctgcaactgactcatctgcaacattcacaccattgcttccttgtggtttcccttctttagaacttttactcatccttgagatgtatggtgtatttggcttgagttatgagagatgcttatttattcatttactctttttcatattttcagagaaagttacctaatccctcctaaagacacagcagtatgggtataacatccttgccttcccatttatccatgtttcactttatcactgatatgaagaggcccaaagcctgttagccaccatccatgctacctaggtagtccataggaaccacccccatgaccaccaccaacatcaactaaaggttcttggagggtatgtcagtgtgttgctcaggataccccaggtacatcaaggaatcaaggagaggaaaatatgagcaatatgtgtattcagagtgaagattttatgtccagagtatttgagctcaaaccttgcctgttgttttctaatcatgatgaatactttctcagtttctttttcctgaaatataaattgggatttaagactgtacctaactattaagatcactgtgtaaaactaagtgtctctaaatgtaatgcatcgatttagtgtctggaacataataaatatttgctctcatgattgctaaaaa

SEQ ID NO: 32611 - DNA, 2151 bp, Homo sapiens
  source 1..2151: mol_type = unassigned DNA
atggcttcaaaaatcttgcttaacgtacaagaggaggtgacctgtcccatctgcctggagctgttgacagaacccttgagtctagactgtggccacagcctctgccgagcctgcatcactgtgagcaacaaggaggcagtgaccagcatgggaggaaaaagcagctgtcctgtgtgtggtatcagttactcatttgaacatctacaggctaatcagcatctggccaacatagtggagagactcaaggaggtcaagttgagcccagacaatgggaagaagagagatctctgtgatcatcatggagagaaactcctactcttctgtaaggaggataggaaagtcatttgctggctttgtgagcggtctcaggagcaccgtggtcaccacacagtcctcacggaggaagtattcaaggaatgtcaggagaaactccaggcagtcctcaagaggctgaagaaggaagaggaggaagctgagaagctggaagctgacatcagagaagagaaaacttcctggaagtatcaggtacaaactgagagacaaaggatacaaacagaatttgatcagcttagaagcatcctaaataatgaggagcagagagagctgcaaagattggaagaagaagaaaagaagacgctggataagtttgcagaggctgaggatgagctagttcagcagaagcagttggtgagagagctcatctcagatgtggagtgtcggagtcagtggtcaacaatggagctgctgcaggacatgagtggaatcatgaaatggagtgagatctggaggctgaaaaagccaaaaatggtttccaagaaactgaagactgtattccatgctccagatctgagtaggatgctgcaaatgtttagagaactgacagctgtccggtgctactgggtggatgtcacactgaattcagtcaacctaaatttgaatcttgtcctttcagaagatcagagacaagtgatatctgtgccaatttggccttttcagtgttataattatggtgtcttgggatcccaatatttctcctctgggaaacattactgggaagtggacgtgtccaagaaaactgcctggatcctgggggtatactgtagaacatattcccgccatatgaagtatgttgttagaagatgtgcaaatcgtcaaaatctttacaccaaatacagacctctatttggctactgggttatagggttacagaataaatgtaagtatggtgtctttgaagagtctttgtcctctgatcccgaggttttgactctctccatggctgtgcctccctgccgtgttggggttttcctcgactatgaagcaggcattgtctcatttttcaatgtcacaagccatggctccctcatttacaagttctctaaatgttgcttttctcagcctgtttatccatatttcaatccttggaactgtccagctcccatgactctatgcccaccaagctcttgaattttctcatttcttcacctacaaccctttgtcttgacttatctcctgcaactgactcatctgcaacattcacaccattgcttccttgtggtttcccttctttagaacttttactcatccttgagatgtatggtgtatttggcttgagttatgagagatgcttatttattcatttactctttttcatattttcagagaaagttacctaatccctcctaaagacacagcagtatgggtataacatccttgccttcccatttatccatgtttcactttatcactgatatgaagaggcccaaagcctgttagccaccatccatgctacctaggtagtccataggaaccacccccatgaccaccaccaacatcaactaaaggttcttggagggtatgtcagtgtgttgctcaggataccccaggtacatcaaggaatcaaggagaggaaaatatgagcaatatgtgtattcagagtgaagattttatgtccagagtatttgagctcaaaccttgcctgttgttttctaatcatgatgaatactttctcagtttctttttcctgaaatataaattgggatttaagactgtacctaactattaagatcactgtgtaaaactaagtgtctctaaatgtaatgcatcgatttagtgtctggaacataataaatatttgctctcatgattgct

SEQ ID NO: 32612 - DNA, 2493 bp, Homo sapiens
  source 1..2493: mol_type = unassigned DNA
gtgatctcggctcactgcaacctctgtctcctgggttcaagcgatcctcctgtctcagcctcccgagtaactgggattacaggcgcccaccaccatgcccggctaatttttgtatttttgtagacagggtttcgacatgttggccaggctggtctcaaactcctgacctcaagtgatccacccgcctcagcctcccaaagtgctgggattacaggtgtgagccactgcgcccgtcctgactcatgcaacttctgcttcagccatccaggggtctttaaccagaagagagaggagagcctcaggagttaggaccagaagaagccagggaagcagtgcaatggcttcaaaaatcttgcttaacgtacaagaggaggtgacctgtcccatctgcctggagctgttgacagaacccttgagtctagactgtggccacagcctctgccgagcctgcatcactgtgagcaacaaggaggcagtgaccagcatgggaggaaaaagcagctgtcctgtgtgtggtatcagttactcatttgaacatctacaggctaatcagcatctggccaacatagtggagagactcaaggaggtcaagttgagcccagacaatgggaagaagagagatctctgtgatcatcatggagagaaactcctactcttctgtaaggaggataggaaagtcatttgctggctttgtgagcggtctcaggagcaccgtggtcaccacacagtcctcacggaggaagtattcaaggaatgtcaggagaaactccaggcagtcctcaagaggctgaagaaggaagaggaggaagctgagaagctggaagctgacatcagagaagagaaaacttcctggaagtatcaggtacaaactgagagacaaaggatacaaacagaatttgatcagcttagaagcatcctaaataatgaggagcagagagagctgcaaagattggaagaagaagaaaagaagacgctggataagtttgcagaggctgaggatgagctagttcagcagaagcagttggtgagagagctcatctcagatgtggagtgtcggagtcagtggtcaacaatggagctgctgcaggacatgagtggaatcatgaaatggagtgagatctggaggctgaaaaagccaaaaatggtttccaagaaactgaagactgtattccatgctccagatctgagtaggatgctgcaaatgtttagagaactgacagctgtccggtgctactgggtggatgtcacactgaattcagtcaacctaaatttgaatcttgtcctttcagaagatcagagacaagtgatatctgtgccaatttggccttttcagtgttataattatggtgtcttgggatcccaatatttctcctctgggaaacattactgggaagtggacgtgtccaagaaaactgcctggatcctgggggtatactgtagaacatattcccgccatatgaagtatgttgttagaagatgtgcaaatcgtcaaaatctttacaccaaatacagacctctatttggctactgggttatagggttacagaataaatgtaagtatggtgtctttgaagagtctttgtcctctgatcccgaggttttgactctctccatggctgtgcctccctgccgtgttggggttttcctcgactatgaagcaggcattgtctcatttttcaatgtcacaagccatggctccctcatttacaagttctctaaatgttgcttttctcagcctgtttatccatatttcaatccttggaactgtccagctcccatgactctatgcccaccaagctcttgaattttctcatttcttcacctacaaccctttgtcttgacttatctcctgcaactgactcatctgcaacattcacaccattgcttccttgtggtttcccttctttagaacttttactcatccttgagatgtatggtgtatttggcttgagttatgagagatgcttatttattcatttactctttttcatattttcagagaaagttacctaatccctcctaaagacacagcagtatgggtataacatccttgccttcccatttatccatgtttcactttatcactgatatgaagaggcccaaagcctgttagccaccatccatgctacctaggtagtccataggaaccacccccatgaccaccaccaacatcaactaaaggttcttggagggtatgtcagtgtgttgctcaggataccccaggtacatcaaggaatcaaggagaggaaaatatgagcaatatgtgtattcagagtgaagattttatgtccagagtatttgagctcaaaccttgcctgttgttttctaatcatgatgaatactttctcagtttctttttcctgaaatataaattgggatttaagactgtacctaactattaagatcactgtgtaaaactaagtgtctctaaatgtaatgcatcgatttagtgtctggaacataataaatatttgctctcatgattgctaaaaa

SEQ ID NO: 32613 - DNA, 4050 bp, Homo sapiens
  source 1..4050: mol_type = unassigned DNA
tggttaacagcttatgggcggggagctcggcaaaactcagactaaaaacagaaaaagagaaaagaaaggacaaattcgatacacccgcgtcggtcctccagagtttgtgaaggggtgtaaacatgtcggagtctggggagatgagtgaatttggctacatcatggaattgatagctaaaggcaaggttaccattaagaatatcgaaagggagctcatttgcccagcatgcaaggagctgtttacccacccattgattctcccttgccaacatagtatctgtcataaatgtgtaaaagaactcctgctgactctcgatgattcattcaacgatgtgggatcagacaactccaatcaaagcagtcctcgacttcggctcccctcccctagtatggataaaattgaccgaattaacagaccaggctggaagcgcaattcattgaccccgaggacaactgttttcccttgccctggctgtgagcatgatgtggatcttggagaacgaggaatcaatggtctgtttcgaaacttcactttggaaactattgtggaaagatatcgtcaagcagctagggcagccacagccattatgtgtgacctttgtaaaccaccacctcaagaatccacaaaaagctgcatggactgtagtgcaagttactgcaatgaatgcttcaaaattcatcacccttggggtactataaaagctcaacatgagtatgttggtccaactactaacttcagacccaagattttaatgtgcccagaacatgaaacagagagaataaacatgtactgtgaattatgtaggaggccagtttgccatctgtgtaagttgggtggtaatcatgccaaccaccgtgtaaccactatgagcagtgcctacaaaaccttaaaggaaaagctttcaaaggatattgattaccttattggtaaggaaagccaggtgaagagtcaaatatctgaactaaacttgttaatgaaagaaacagagtgtaatggagagagggctaaagaagaagcaattacacattttgaaaagctctttgaagttctggaagagaggaaatcatctgttttgaaagcaattgactcctctaagaaactaagattagacaaatttcagactcaaatggaagagtaccagggacttctagagaacaatggacttgtgggatatgctcaagaagtgctaaaggagacagatcagtcttgctttgtgcagacagcaaagcagctccacctcagaatacagaaagccacagaatctttgaagagctttagacctgcagctcagacttcttttgaagactatgttgttaatacctctaaacaaacagaacttcttggagaattatcctttttctctagtggcatagacgtgccagagatcaatgaggaacagagcaaagtttataacaatgccttgataaattggcaccatccagaaaaggataaagctgatagctatgttcttgaatatcggaaaatcaatagagatgatgaaatgtcatggaatgagatagaagtgtgtggaacaagtaaaataattcaagacttggaaaacagtagtacctatgctttcagagtaagagcttacaagggttcaatctgtagtccttgcagcagagaattgattcttcatactcctccagctccagttttcagcttcctctttgatgaaaaatgtggctataataatgaacacctcctgctgaacttgaagagagaccgtgtagagagtagagctggatttaatcttctgcttgctgcagaacgcatccaagtgggttattacacaagcttagactacatcattggagatactggcattacaaaaggaaaacacttctgggccttccgtgtggaaccatattcatacctggtaaaagtgggagttgcttctagcgataaactacaagaatggctccgttctccccgggatgcagttagtccaagatatgagcaagacagtgggcatgacagtggaagtgaggatgcctgttttgattcttcacaaccatttaccttagttactataggcatgcagaaattttttatacccaagtcacctacttcttctaatgaacctgaaaatagagttctccctatgccaacaagtattgggattttccttgactgtgataaaggcaaagtagatttctatgatatggatcagatgaaatgcctttatgaacgccaagtggactgttcacatacactgtatccagcatttgcattaatgggcagtggaggaattcagcttgaagaacccatcacagcaaaatatctggaataccaagaggacatgtagttgaaacatctgatgtgactcaggataaaaactgtaaacaaagcaatgccttagcgttaaccttcgtaactaattacatatcgctgagtgttctgtcaccccacttgtgtttgagtatgattcttcttgaaatacagaaaatctaaacagccttgtgtcttcatgtcgttgttctgcctttcacaaatgatgaaagtgaagatgttctttccaagttaatactgaagtggttaactttgcaactggactgtcttttactttatgtacaggatatctaatttatttctgtcagctggtgttgctgacactttccttatggtgggggggatacaaaagtatttattatgattctcttctgtttgacttttcatttttatatcatgtttatgtcctaagagaagatattttttaaatgccttatggataggaattagtactaagcaatgtgtcttgcatttgttttcaataggaaaacaaagttctagataggttaaaagaaaaacaccataaaagtggtagtatatttaagtggaaaattatgtattttaaagtgtgtaactattaaaaatatattgcctggaaaaggaatactactgttttgttttgttaagaccacaaactgtattgctaaggacattttaagagtctgcttagccataacactcatttaacagcatgggtagtaagcatggtttcttgcagaaaacacaaagttctcagctaacacattaaacttctcactttatatactttttttcagagaaatttatctttagtttttcttattctgtgaaaatatttgttcttatgtcaaagaattatttttcagatatattggtaaagatggactgatattaaaagtcatatttattcttttacccccttactgtgttttgtgattttcatttttggcccaattattacatatcaggttttcctgatttatatttacatgtttgaaaagttcattatatattttagtagcgttacatatattataaatttttgtaacatttaaatgttcacttatgtggcattttctgtttctcattggtaataagcatttctaatataagcaagtaaaaatacaaatttaattacttagaaatgataactaagatcacaatgactgtgtaccctttaaaatatcttttaatttgaggaattacattctatctaaattgtgtgtctgtttttgaaaggtgttgctttcaagtaggtggtttttatttaaagtacttatttttttgaggttaaaatattcagaaactacttttatgcattgtagcagtaatcatttatggaatgcttttgacatgttttaacagggtaaccaaaacttttaggcctgttttttttggttgtccttgttgttatatttttaatggaaatctgttactcaggctggtagcattaaattagctttttaccctcaactcaagtagcaaatatcatggagaacttcagtgtttagcaggctgttaatttcccatctatgaatagcactttatgatgtaggctaaactaagcaaataatgcagcgttatgtggatcattatgcaataaagctgctaaagtcacatttgtggttgatactcaagccttgtacaagcacatatgatgtagacatttttaaatgtgaagctttaacaggaataggatagctgtttcaaaccttgtgcaattgtaaataaattgtttagctgtgtttctttcatttttaataaaaaattaaaaagaa

SEQ ID NO: 32614 - DNA, 1322 bp, Homo sapiens
  source 1..1322: mol_type = unassigned DNA
gatggggcttttttccagatcttcgcgccgagagccggggacggccaacctgccggcatgcgataaaggccggggaatgtctagctggggccgcgctgagccgagtgcggacccgctttgtgtgcgcgtttgtttgtctccgctgcggtccgaaccgctgccgcgacccccgaggaggcggggcctccgcgcgcccggctccgcctggtgagggtttcacggcctctgctgccgccgccgccgccctcgtttgttccgttagatcgcgcagccccgaccgctgcacccggatcctagcaagccgggcgaggctgcccgggagccctcgatggccttcatttcacccaagcccgcttcttgctttccccggcgcttcccctcttttcctggttaacagcttatgggcggggagctcggcaaaactcagactaaaaacagaaaaagagaaaagaaaggacaaattcgatacacccgcgtcggtcctccagagtttgtgaaggggtgtaaacatgtcggagtctggggagatgagtgaatttggctacatcatggaattgatagctaaaggcaaggcttcagcaatgggcctgcagcaaacccatgagcattcccggttgacttctaaaggtggagaggcccgctgtccctttgaaatctctgaggttggaaagcagtctctcccaagaagaacttaggacaattcctctctctgttttgtgggggttggagggggagagttggtctggagtaggctcctaaccatttcaacgtaagcttatttcctaccactctcctcaggctcaaatcctgccccgccccgcagccccagcactagcccatttaagacccctgttttgtgtgtgattatacaggatttgaacactgaatattaaccatggaatagcagacctttgagactgacttgctttattttcctctgtggggttcggttccactttgtagttcgggtttgtaatgtaaagaataatgggaaactggtctaattatgagagttaagagagtagaggcctgtagttggcctgccctccgccccaccatccctcaaagttgagaccactgagttaaccatcctcttaatttctctcacttttcccccagatttgtttcatccttgtactggacttctcaagctctgtacataattaaaaatacatagctttacatttttacaaacttaatacctggaatatatgcttgttgtaaagtattcaaacttcacagaaaggttcacagagtaaaaagtctaagttcatgcccacctccaatctcattccttccccagtggcagcagtttgtgtgtc

SEQ ID NO: 32615 - DNA, 693 bp, Homo sapiens
  source 1..693: mol_type = unassigned DNA
gatggggcttttttccagatcttcgcgccgagagccggggacggccaacctgccggcatgcgataaaggccggggaatgtctagctggggccgcgctgagccgagtgcggacccgctttgtgtgcgcgtttgtttgtctccgctgcggtccgaaccgctgccgcgacccccgaggaggcggggcctccgcgcgcccggctccgcctggtgagggtttcacggcctctgctgccgccgccgccgccctcgtttgttccgttagatcgcgcagccccgaccgctgcacccggatcctagcaagccgggcgaggctgcccgggagccctcgatggccttcatttcacccaagcccgcttcttgctttccccggcgcttcccctcttttcctggttaacagcttatgggcggggagctcggcaaaactcagactaaaaacagaaaaagagaaaagaaaggacaaattcgatacacccgcgtcggtcctccagagtttgtgaaggggtgtaaacatgtcggagtctggggagatgagtgaatttggctacatcatggaattgatagctaaaggcaagatgccggattggagacgaggctaccgctgcagacagggctgtgggaagacgacggaacttgccacagcgacagacttctcccaaacaggaaataaaagtgggaagcattttaaaacctaaa

SEQ ID NO: 32616 - DNA, 4508 bp, Homo sapiens
  source 1..4508: mol_type = unassigned DNA
acagcgtcctgcgcgcatgcgcttcgcagcttctctcgccgccgcgcccccagctgctctggttacggttggtgtttgcgaattctctgcggcaccttcttcgctgaactccaccgtcagttccataggcgcgcgcccgcgtcacgtgggccgaggttccggcgcggctgctggccggcggctgagccgggagaaaggagctgcggccaccgttcgccctacttctgcgcctcggggcgggcgcgccggtaaaaatggcgaaatgggggtaggcggcgctggacctgaagagatggggcgcgcaggtggggcggttgtcagagccccctgacgtgggcgccgggcttttatcggcgatttgatctggcgacctcgggccggcgcctaagaggtcagactgcggagcctgcgggtcgccagcggccccgccgagagccggaggcaatggatgaacagagcgtggagagcattgctgaggttttccgatgtttcatttgtatggagaaattgcgggatgcacgcctgtgtcctcattgctccaaactgtgttgtttcagctgtattaggcgctggctgacagagcagagagctcaatgtcctcattgccgtgctccactccagctacgagaactagtaaattgtcgttgggcagaagaagtaacacaacagcttgatactcttcaactctgcagtctcaccaaacatgaagaaaatgaaaaggacaaatgtgaaaatcaccatgaaaaacttagtgtattttgctggacttgtaagaagtgtatctgccatcagtgtgcactttggggaggaatgcatggcggacatacctttaaacctttggcagaaatttatgagcaacacgtcactaaagtgaatgaagaggtagccaaacttcgtcggcgtctcatggaactgatcagcttagttcaagaagtggaaaggaatgtagaagctgtaagaaatgcaaaagatgagcgtgttcgggaaattaggaatgcagtggagatgatgattgcacggttagacacacagctgaagaataagcttataacactgatgggtcagaagacatctctaacccaagaaacagagcttttggaatccttacttcaggaggtggagcaccagttgcggtcttgtagtaagagtgagttgatatctaagagctcagagatccttatgatgtttcagcaagttcatcggaagcccatggcatcttttgttaccactcctgttccaccagactttaccagtgaattagtgccatcttacgattcagctacttttgttttagagaatttcagcactttgcgtcagagagcagatcctgtttacagtccacctcttcaagtttcaggactttgctggaggttaaaagtttacccagatggaaatggagttgtgcgaggttactacttatctgtgtttctggagctctcagctggcttgcctgaaacttctaaatatgaatatcgtgtagagatggttcaccagtcctgtaatgatcctacaaaaaatatcattcgagaatttgcatctgactttgaagttggagaatgctggggctataatagatttttccgtttggacttactcgcaaatgaaggatacttgaatccacaaaatgatacagtgattttaaggtttcaggtacgttcaccaactttctttcaaaaatcccgggaccagcattggtacattactcagttggaagctgcacagactagttatatccaacaaataaacaaccttaaagagagacttactattgagctgtctcgaactcagaagtcaagagatttgtcaccaccagataaccatcttagcccccaaaatgatgatgctctggagacacgagctaagaagtctgcatgctctgacatgcttctcgaaggtggtcctactacagcttctgtaagagaggccaaagaggatgaagaagatgaggagaagattcagaatgaagattatcatcacgagctttcagatggagatctggatctggatcttgtttatgaggatgaagtaaatcagctcgatggcagcagttcctctgctagttccacagcaacaagtaatacagaagaaaatgatattgatgaagaaactatgtctggagaaaatgatgtggaatataacaacatggaattagaagagggagaactcatggaagatgcagctgctgcaggacccgcaggtagtagccatggttatgtgggttccagtagtagaatatcaagaagaacacatttatgctccgctgctaccagtagtttactagacattgatccattaattttaatacatttgttggaccttaaggaccggagcagtatagaaaatttgtggggcttacagcctcgcccacctgcttcacttctgcagcccacagcatcatattctcgaaaagataaagaccaaaggaagcaacaggcaatgtggcgagtgccctctgatttaaagatgctaaaaagactcaaaactcaaatggccgaagttcgatgtatgaaaactgatgtaaagaatacactttcagaaataaaaagcagcagtgctgcttctggagacatgcagacaagccttttttctgctgaccaggcagctctggctgcatgtggaactgaaaactctggcagattgcaggatttgggaatggaactcctggcaaagtcatcagttgccaattgttacatacgaaactccacaaataagaagagtaattcgcccaagccagctcgatccagtgtagcaggtagtctatcacttcgaagagcagtggaccctggagaaaatagtcgttcaaagggagactgtcagactctgtctgaaggctccccaggaagctctcagtctgggagcaggcacagttctccccgagccttgatacatggcagtatcggtgatattctgccaaaaactgaagaccggcagtgtaaagctttggattcagatgctgttgtggttgcagttttcagtggcttgcctgcggttgagaaaaggaggaaaatggtcaccttgggggctaatgctaaaggaggtcatctggaaggactgcagatgactgatttggaaaataattctgaaactggagagttacagcctgtactacctgaaggagcttcagctgcccctgaagaaggaatgagtagcgacagtgacattgaatgtgacactgagaatgaggagcaggaagagcataccagtgtgggcgggtttcacgactccttcatggtcatgacacagcccccggatgaagatacacattccagttttcctgatggtgaacaaataggccctgaagatctcagcttcaatacagatgaaaatagtggaaggtaattgccaaatcaagagaactgacttgcaagctaccttgaccctgaattttgctgtagttggtgctcaaatttgtcatcagtcagataatcagatttggtcttatttcttcattatctcgacctgaaatagtaatttggaaactgttggaaggtggcacagtttagtctaagacagcagtagtacatgggaaaaacagtatgggaagagttctttgtaatgtaaggaaataacaatgtagttctctattaatttagcaaatttgtacattcacaaaaggcagtttgtctactacagcagaaggctggttaactgccagaaaatgtacctccaggccctgcatgccgtcagtaacccgcccggcattggtgctctactgtctttggctagagcttagttgtgtttaaataatcatctttatatttggggttttaattacagttccattagtgcctgtagattagtgaacagaaaattgctttggaagagattctgccctgtagacactatgtgaataactgaagtaacactagactgaatctcctttttggagtatgtatcttctctcacttgttcaagtacaggcacactgttcaaccgcatggtatctttctgttgtgtgacttctacaaatgtaattttaaatgaaattaagttaacatggattcattacgttcctggccctgtagacacgtgtaagattatttaaaattctttcatttttttctgcctcttactatacgactgtagtgcaacaaatattttaaagcccccttttcttctttattttcattagttgtacattgatttcagtgtcaacacatttaaagattcattcatgttgcacagtggcttacatgaacgtgaaactgtgatataaggttttctttcatactcataattagcccaaaacagttgccaaactttgccattgtgctcctgcatttgtgtttgagctgctatatatttgtggaaattacactgaaagttgactaagagactattgaaaaagcatgaataattaaatatacatgtgagagacatctcatctgctgtattttacttagtgaatattgttcactcttccgtgtctgatgtcttgctgaatgctgtgactcatagtttacttttgttcaaaatagtttgcactttttgttaataaaatcaacttg

SEQ ID NO: 32617 - DNA, 4391 bp, Homo sapiens
  source 1..4391: mol_type = unassigned DNA
acagcgtcctgcgcgcatgcgcttcgcagcttctctcgccgccgcgcccccagctgctctggttacggttggtgtttgcgaattctctgcggcaccttcttcgctgaactccaccgtcagttccataggcgcgcgcccgcgtcacgtgggccgaggttccggcgcggctgctggccggcggctgagccgggagaaaggagctgcggccaccgttcgccctacttctgcgcctcggggcgggcgcgccggtaaaaatggcgaaatgggggtaggcggcgctggacctgaagagatggggcgcgcaggtggggcggttgtcagagccccctgacgtgggcgccgggcttttatcggcgatttgatctggcgacctcgggccggcgcctaagaggtcagactgcggagcctgcgggtcgccagcggccccgccgagagccggaggcaatggatgaacagagcgtggagagcattgctgaggttttccgatgtttcatttgtatggagaaattgcgggatgcacgcctgtgtcctcattgctccaaactgtgttgtttcagctgtattaggcgctggctgacagagcagagagctcaatgtcctcattgccgtgctccactccagctacgagaactagtaaattgtcgttgggcagaagaagtaacacaacagcttgatactcttcaactctgcagtctcaccaaacatgaagaaaatgaaaaggacaaatgtgaaaatcaccatgaaaaacttagtgtattttgctggacttgtaagaagtgtatctgccatcagtgtgcactttggggaggaatgcatggcggacatacctttaaacctttggcagaaatttatgagcaacacgtcactaaagtgaatgaagaggtagccaaacttcgtcggcgtctcatggaactgatcagcttagttcaagaagtggaaaggaatgtagaagctgtaagaaatgcaaaagatgagcgtgttcgggaaattaggaatgcagtggagatgatgattgcacggttagacacacagctgaagaataagcttataacactgatgggtcagaagacatctctaacccaagaaacagagcttttggaatccttacttcaggaggtggagcaccagttgcggtcttgtagtaagagtgagttgatatctaagagctcagagatccttatgatgtttcagcaagttcatcggaagcccatggcatcttttgttaccactcctgttccaccagactttaccagtgaattagtgccatcttacgattcagctacttttgttttagagaatttcagcactttgcgtcagagagcagatcctgtttacagtccacctcttcaagtttcaggactttgctggaggttaaaagtttacccagatggaaatggagttgtgcgaggttactacttatctgtgtttctggagctctcagctggcttgcctgaaacttctaaatatgaatatcgtgtagagatggttcaccagtcctgtaatgatcctacaaaaaatatcattcgagaatttgcatctgactttgaagttggagaatgctggggctataatagatttttccgtttggacttactcgcaaatgaaggatacttgaatccacaaaatgatacagtgattttaaggtttcaggtacgttcaccaactttctttcaaaaatcccgggaccagcattggtacattactcagttggaagctgcacagactagttatatccaacaaataaacaaccttaaagagagacttactattgagctgtctcgaactcagaagtcaagagatttgtcaccaccagataaccatcttagcccccaaaatgatgatgctctggagacacgagctaagaagtctgcatgctctgacatgcttctcgaaggtggtcctactacagcttctgtaagagaggccaaagaggatgaagaagatgaggagaagattcagaatgaagattatcatcacgagctttcagatggagatctggatctggatcttgtttatgaggatgaagtaaatcagctcgatggcagcagttcctctgctagttccacagcaacaagtaatacagaagaaaatgatattgatgaagaaactatgtctggagaaaatgatgtggaatataacaacatggaattagaagagggagaactcatggaagatgcagctgctgcaggacccgcaggtagtagccatggttatgtgggttccagtagtagaatatcaagaagaacacatttatgctccgctgctaccagtagtttactagacattgatccattaattttaatacatttgttggaccttaaggaccggagcagtatagaaaatttgtggggcttacagcctcgcccacctgcttcacttctgcagcccacagcatcatattctcgaaaagataaagaccaaaggaagcaacaggcaatgtggcgagtgccctctgatttaaagatgctaaaaagactcaaaactcaaatggccgaagttcgatgtatgaaaactgatgtaaagaatacactttcagaaataaaaagcagcagtgctgcttctggagacatgcagacaagccttttttctgctgaccaggcagctctggctgcatgtggaactgaaaactctggcagattgcaggatttgggaatggaactcctggcaaagtcatcagttgccaattgttacatacgaaactccacaaataagaagagtaattcgcccaagccagctcgatccagtgtagcaggtagtctatcacttcgaagagcagtggaccctggagaaaatagtcgttcaaagggagactgtcagactctgtctgaaggctccccaggaagctctcagtctgggagcaggcacagttctccccgagccttgatacatggcagtatcggtgatattctgccaaaaactgaagaccggcagtgtaaagctttggattcagatgctgttgtggttgcagttttcagtggcttgcctgcggttgagaaaaggaggaaaatggtcaccttgggggctaatgctaaaggaggtcatctggaaggactgcagatgactgatttggaaaataattctgaaactggagagttacagcctgtactacctgaaggagcttcagctgcccctgaagaagatacacattccagttttcctgatggtgaacaaataggccctgaagatctcagcttcaatacagatgaaaatagtggaaggtaattgccaaatcaagagaactgacttgcaagctaccttgaccctgaattttgctgtagttggtgctcaaatttgtcatcagtcagataatcagatttggtcttatttcttcattatctcgacctgaaatagtaatttggaaactgttggaaggtggcacagtttagtctaagacagcagtagtacatgggaaaaacagtatgggaagagttctttgtaatgtaaggaaataacaatgtagttctctattaatttagcaaatttgtacattcacaaaaggcagtttgtctactacagcagaaggctggttaactgccagaaaatgtacctccaggccctgcatgccgtcagtaacccgcccggcattggtgctctactgtctttggctagagcttagttgtgtttaaataatcatctttatatttggggttttaattacagttccattagtgcctgtagattagtgaacagaaaattgctttggaagagattctgccctgtagacactatgtgaataactgaagtaacactagactgaatctcctttttggagtatgtatcttctctcacttgttcaagtacaggcacactgttcaaccgcatggtatctttctgttgtgtgacttctacaaatgtaattttaaatgaaattaagttaacatggattcattacgttcctggccctgtagacacgtgtaagattatttaaaattctttcatttttttctgcctcttactatacgactgtagtgcaacaaatattttaaagcccccttttcttctttattttcattagttgtacattgatttcagtgtcaacacatttaaagattcattcatgttgcacagtggcttacatgaacgtgaaactgtgatataaggttttctttcatactcataattagcccaaaacagttgccaaactttgccattgtgctcctgcatttgtgtttgagctgctatatatttgtggaaattacactgaaagttgactaagagactattgaaaaagcatgaataattaaatatacatgtgagagacatctcatctgctgtattttacttagtgaatattgttcactcttccgtgtctgatgtcttgctgaatgctgtgactcatagtttacttttgttcaaaatagtttgcactttttgttaataaaatcaacttg

SEQ ID NO: 32618 - DNA, 3548 bp, Homo sapiens
  source 1..3548: mol_type = unassigned DNA
gaattctctgcggcaccttcttcgctgaactccaccgtcagttccataggcgcgcgcccgcgtcacgtgggccgaggttccggcgcggctgctggccggcggctgagccgggagaaaggagctgcggccaccgttcgccctacttctgcgcctcggggcgggcgcgccggtaaaaatggcgaaatgggggtaggcggcgctggacctgaagagatggggcgcgcaggtggggcggttgtcagagccccctgacgtgggcgccgggcttttatcggcgatttgatctggcgacctcgggccggcgcctaagaggtcagactgcggagcctgcgggtcgccagcggccccgccgagagccggaggcaatggatgaacagagcgtggagcgctggctgacagagcagagagctcaatgtcctcattgccgtgctccactccagctacgagaactagtaaattgtcgttgggcagaagaagtaacacaacagcttgatactcttcaactctgcagtctcaccaaacatgaagaaaatgaaaaggacaaatgtgaaaatcaccatgaaaaacttagtgtattttgctggacttgtaagaagtgtatctgccatcagtgtgcactttggggaggaatgcatggcggacatacctttaaacctttggcagaaatttatgagcaacacgtcactaaagtgaatgaagaggtagccaaacttcgtcggcgtctcatggaactgatcagcttagttcaagaagtggaaaggaatgtagaagctgtaagaaatgcaaaagatgagcgtgttcgggaaattaggaatgcagtggagatgatgattgcacggttagacacacagctgaagaataagcttataacactgatgggtcagaagacatctctaacccaagaaacagagcttttggaatccttacttcaggaggtggagcaccagttgcggtcttgtagtaagagtgagttgatatctaagagctcagagatccttatgatgtttcagcaagttcatcggaagcccatggcatcttttgttaccactcctgttccaccagactttaccagtgaattagtgccatcttacgattcagctacttttgttttagagaatttcagcactttgcgtcagagagcagatcctgtttacagtccacctcttcaagtttcaggactttgctggaggttaaaagtttacccagatggaaatggagttgtgcgaggttactacttatctgtgtttctggagctctcagctggcttgcctgaaacttctaaatatgaatatcgtgtagagatggttcaccagtcctgtaatgatcctacaaaaaatatcattcgagaatttgcatctgactttgaagttggagaatgctggggctataatagatttttccgtttggacttactcgcaaatgaaggatacttgaatccacaaaatgatacagtgattttaaggtttcaggtacgttcaccaactttctttcaaaaatcccgggaccagcattggtacattactcagttggaagctgcacagactagttatatccaacaaataaacaaccttaaagagagacttactattgagctgtctcgaactcagaagtcaagagatttgtcaccaccagataaccatcttagcccccaaaatgatgatgctctggagacacgagctaagaagtctgcatgctctgacatgcttctcgaaggtggtcctactacagcttctgtaagagaggccaaagaggatgaagaagatgaggagaagattcagaatgaagattatcatcacgagctttcagatggagatctggatctggatcttgtttatgaggatgaagtaaatcagctcgatggcagcagttcctctgctagttccacagcaacaagtaatacagaagaaaatgatattgatgaagaaactatgtctggagaaaatgatgtggaatataacaacatggaattagaagagggagaactcatggaagatgcagctgctgcaggacccgcaggtagtagccatggttatgtgggttccagtagtagaatatcaagaagaacacatttatgctccgctgctaccagtagtttactagacattgatccattaattttaatacatttgttggaccttaaggaccggagcagtatagaaaatttgtggggcttacagcctcgcccacctgcttcacttctgcagcccacagcatcatattctcgaaaagataaagaccaaaggaagcaacaggcaatgtggcgagtgccctctgatttaaagatgctaaaaagactcaaaactcaaatggccgaagttcgatgtatgaaaactgatgtaaagaatacactttcagaaataaaaagcagcagtgctgcttctggagacatgcagacaagccttttttctgctgaccaggcagctctggctgcatgtggaactgaaaactctggcagattgcaggatttgggaatggaactcctggcaaagtcatcagttgccaattgttacatacgaaactccacaaataagaagagtaattcgcccaagccagctcgatccagtgtagcaggtagtctatcacttcgaagagcagtggaccctggagaaaatagtcgttcaaagggagactgtcagactctgtctgaaggctccccaggaagctctcagtctgggagcaggcacagttctccccgagccttgatacatggcagtatcggtgatattctgccaaaaactgaagaccggcagtgtaaagctttggattcagatgctgttgtggttgcagttttcagtggcttgcctgcggttgagaaaaggaggaaaatggtcaccttgggggctaatgctaaaggaggtcatctggaaggactgcagatgactgatttggaaaataattctgaaactggagagttacagcctgtactacctgaaggagcttcagctgcccctgaagaaggaatgagtagcgacagtgacattgaatgtgacactgagaatgaggagcaggaagagcataccagtgtgggcgggtttcacgactccttcatggtcatgacacagcccccggatgaagatacacattccagttttcctgatggtgaacaaataggccctgaagatctcagcttcaatacagatgaaaatagtggaaggtaattgccaaatcaagagaactgacttgcaagctaccttgaccctgaattttgctgtagttggtgctcaaatttgtcatcagtcagataatcagatttggtcttatttcttcattatctcgacctgaaatagtaatttggaaactgttggaaggtggcacagtttagtctaagacagcagtagtacatgggaaaaacagtatgggaagagttctttgtaatgtaaggaaataacaatgtagttctctattaatttagcaaatttgtacattcacaaaaggcagtttgtctactacagcagaaggctggttaactgccagaaaatgtacctccaggccctgcatgccgtcagtaacccgcccggcattggtgctctactgtctttggctagagc

SEQ ID NO: 32619 - DNA, 3616 bp, Homo sapiens
  source 1..3616: mol_type = unassigned DNA
acagcgtcctgcgcgcatgcgcttcgcagcttctctcgccgccgcgcccccagctgctctggttacggttggtgtttgcgaattctctgcggcaccttcttcgctgaactccaccgtcagttccataggcgcgcgcccgcgtcacgtgggccgaggttccggcgcggctgctggccggcggctgagccgggagaaaggagctgcggccaccgttcgccctacttctgcgcctcggggcgggcgcgccggtaaaaatggcgaaatgggggtaggcggcgctggacctgaagagatggggcgcgcaggtggggcggttgtcagagccccctgacgtgggcgccgggcttttatcggcgatttgatctggcgacctcgggccggcgcctaagaggtcagactgcggagcctgcgggtcgccagcggccccgccgagagccggaggcaatggatgaacagagcgtggagagcattgctgaggttttccgatgtttcatttgtatggagaaattgcgggatgcacgcctgtgtcctcattgctccaaactgtgttgtttcagctgtattaggcgctggctgacagagcagagagctcaatgtcctcattgccgtgctccactccagctacgagaactagtaaattgtcgttgggcagaagaagtaacacaacagcttgatactcttcaactctgcagtctcaccaaacatgaagaaaatgaaaaggacaaatgtgaaaatcaccatgaaaaacttagtgtattttgctggacttgtaagaagtgtatctgccatcagtgtgcactttggggaggaatgcatggcggacatacctttaaacctttggcagaaatttatgagcaacacgtcactaaagtgaatgaagaggtagccaaacttcgtcggcgtctcatggaactgatcagcttagttcaagaagtggaaaggaatgtagaagctgtaagaaatgcaaaagatgagcgtgttcgggaaattaggaatgcagtggagatgatgattgcacggttagacacacagctgaagaataagcttataacactgatgggtcagaagacatctctaacccaagaaacagagcttttggaatccttacttcaggaggtggagcaccagttgcggtcttgtagtaagagtgagttgatatctaagagctcagagatccttatgatgtttcagcaagttcatcggaagcccatggcatcttttgttaccactcctgttccaccagactttaccagtgaattagtgccatcttacgattcagctacttttgttttagagaatttcagcactttgcgtcagagagcagatcctgtttacagtccacctcttcaagtttcaggactttgctggaggttaaaagtttacccagatggaaatggagttgtgcgaggttactacttatctgtgtttctggagctctcagctggcttgcctgaaacttctaaatatgaatatcgtgtagagatggttcaccagtcctgtaatgatcctacaaaaaatatcattcgagaatttgcatctgactttgaagttggagaatgctggggctataatagatttttccgtttggacttactcgcaaatgaaggatacttgaatccacaaaatgatacagtgattttaaggtttcaggtacgttcaccaactttctttcaaaaatcccgggaccagcattggtacattactcagttggaagctgcacagactagttatatccaacaaataaacaaccttaaagagagacttactattgagctgtctcgaactcagaagtcaagagatttgtcaccaccagataaccatcttagcccccaaaatgatgatgctctggagacacgagctaagaagtctgcatgctctgacatgcttctcgaaggtggtcctactacagcttctgtaagagaggccaaagaggatgaagaagatgaggagaagattcagaatgaagattatcatcacgagctttcagatggagatctggatctggatcttgtttatgaggatgaagtaaatcagctcgatggcagcagttcctctgctagttccacagcaacaagtaatacagaagaaaatgatattgatgaagaaactatgtctggagaaaatgatgtggaatataacaacatggaattagaagagggagaactcatggaagatgcagctgctgcaggacccgcaggtagtagccatggttatgtgggttccagtagtagaatatcaagaagaacacatttatgctccgctgctaccagtagtttactagacattgatccattaattttaatacatttgttggaccttaaggaccggagcagtatagaaaatttgtggggcttacagcctcgcccacctgcttcacttctgcagcccacagcatcatattctcgaaaagataaagaccaaaggaagcaacaggcaatgtggcgagtgccctctgatttaaagatgctaaaaagactcaaaactcaaatggccgaagttcgatgtatgaaaactgatgtaaagaatacactttcagaaataaaaagcagcagtgctgcttctggagacatgcagacaagccttttttctgctgaccaggcagctctggctgcatgtggaactgaaaactctggcagattgcaggatttgggaatggaactcctggcaaagtcatcagttgccaattgttacatacgaaactccacaaataagaagagtaattcgcccaagccagctcgatccagtgtagcaggtagtctatcacttcgaagagcagtggaccctggagaaaatagtcgttcaaagggagactgtcagactctgtctgaaggctccccaggaagctctcagtctgggagcaggcacagttctccccgagccttgatacatggcagtatcggtgatattctgccaaaaactgaagaccggcagtgtaaagctttggattcagatgctgttgtggttgcagttttcagtggcttgcctgcggttgagaaaaggaggaaaatggtcaccttgggggctaatgctaaaggaggtcatctggaaggactgcagatgactgatttggaaaataattctgaaactggagagttacagcctgtactacctgaaggagcttcagctgcccctgaagaaggaatgagtagcgacagtgacattgaatgtgacactgagaatgaggagcaggaagagcataccagtgtgggcgggtttcacgactccttcatggtcatgacacagcccccggatgaagatacacattccagttttcctgatggtgaacaaataggccctgaagatctcagcttcaatacagatgaaaatagtggaagataatttgatttgaaactgacactgcacctgatgggttaacaagatctaggcttcagaaggtgacagatatgagtgaggaccatgtgtggggcaaagcctcagaatgatgaaaaggttccggcactatagttggggccatgttgactccttttcaaccatttgtcacagacgtgagaagaagaaatgacttcaaaatcaagagaaaacaaatactgaaagtctctacttacatccaaattttaaaaaataaaatctgtagattaacaatctgatcattgct

SEQ ID NO: 32620 - DNA, 3338 bp, Homo sapiens
  source 1..3338: mol_type = unassigned DNA
cccagcttccactgacacgagcctcggcgcggcttccgcttccggcgagtattgtgtgtcgcgccgcggggcgggggcgaggggaggaggaaggagggaggcagcgctccggcggctccgcgccccgcactcccggacccgaagccgggaagattcctttcttgtctgttagaaacgtatgtcaaacgaggatacagtgtctggaactattggttctaagatataagtggaatgagcctggatcaggagaagtatgctgagctagagttgaaggaagcttctctttctaacaagagaaagcagagttaaattatggcagagacaagtctgttagaggctggggcctctgcagcctctacagctgcggctttggagaacttacaggtggaggcgagctgctctgtgtgcctggagtatctgaaggaacctgtcatcattgagtgtgggcacaacttctgcaaagcttgcatcacccgctggtgggaggacctagagagggacttcccttgtcctgtctgtcgaaagacatcccgctaccgcagtctccgacctaatcggcaactaggcagtatggtggaaattgccaagcagctccaggccgtcaagcggaagatccgggatgagagcctctgcccccaacaccatgaggccctcagccttttctgttatgaggaccaggaggctgtatgcttgatatgtgcaatttcccacacccaccgggcccacaccgttgtgccactggacgatgctacacaggagtacaaggaaaaactgcagaagtgtctggagcccctggaacagaagctgcaggagatcactcgctgcaagtcctctgaggagaagaagcctggtgagctcaagagactagtggaaagtcgccgacagcagatcttgagggagtttgaagagcttcataggcggctggatgaagagcagcaggtgttgctttcacgactggaagaagaggaacaggacattctgcagcgactccgagaaaatgctgctcaccttggggacaagcgccgggacctggcccacttggctgccgaggtggagggcaagtgcttacagtcaggcttcgagatgcttaaggatgtcaaaagtaccctggaaaagaatattcctagaaagttcggaggctcactctcaacgatctgtccacgggatcataaggctctccttggattagtaaaagaaatcaacagatgtgaaaaggtgaagaccatggaggtgacttcagtatccatagagctggaaaagaacttcagcaattttccccgacagtactttgccctaaggaaaatccttaaacagctaattgcggatgtgaccctggaccctgagacagctcatcctaacctagtcctgtcagaggatcgtaagagcgtcaagttcgtggagacaagactccgggatctccctgacacaccaaggcgtttcaccttctacccttgcgtcctggctactgagggtttcacctcaggtcgacactactgggaggtggaggtgggcgacaagacccactgggcagtgggtgtatgccgggactccgtgagccgaaagggcgagttgactccactccctgagactggctactggcgggtgcggctatggaatggggacaaatatgcagccaccaccacaccttttacccctttgcacatcaaggtgaaacccaagcgggtaggcatattcctagactatgaggccggcacactgtctttctacaatgtcacagaccgctctcatatctacaccttcactgatacttttactgagaaactttggcccctcttctacccaggcatccgggctggacggaagaatgctgcaccacttaccatcaggcccccaacagattgggagtgacaggttgggatgtgggaatgactggggtgaggcagggtcaagtgctacgggcctccttcccgtgtcctgctggaacgtcttcgtgtccacctgggtccagtcctgaatcatcttggagaaacaccttggtttctaggatggttttgtgtggagggggaggtaggactgggctggatgagagagcacagctgtgacttcctcctaactgtcagggtggggagctggttcccagaggattgtctaccctgaagtccatcaggttttctgttgcacaaggacgggtcaggaaggaaggagaggcttttccagaaacaaaaaatctgtgagggtctgacttgctcaaaccagaggaggaaacagaaacccctgcacatctttttagggggttctttgacccaggatagtcttgcttcttgaggtagatcacaggggtctgtgtacctctgaattcatgagagatgaatgacagatgctctcatgggtctagatattgaggagtttttctgagggcagagattggacatcaacaaggctagaagggtcagggaagtgggctaaaggaacagattcctagagattaatgaagaggagggaggtttctttggtcttctattccaagggtaaggttgcgattatgggtaagattggccagaggtaggaatgtggggagaaggagaggctgaaaagaaagcagaggagaacccaggtccctgcctcagccttcagcagagttggcttattgcctgcctctataccaataagtcagtcaccttgctcctctccagaggcaaagtggaagagatcctgcaagacacatctatcctttcacagtgttcccaagggaacttggaaaggagagtcaggtattagaggaaagagaagggtatttgtatacaaagccctggccttaaagaatgttacttagtagctactcccaaattgtcagccttcttacctggccaaggtgtccaagccagaaaggaaaaaaggttatggagtctttctcaccctaaggacagggtggaagagggtggtatatagggaagggccagataggcaacttcatttggcttgtgtgcatctggcctggaactggtgttaagccaggcttttgcttgtttgttgccatccctcaccctttgccatttcccttttcagagaatgtaaatgattttcatgttaggccaaaataaacaacttatagggtacatatgttgtcataaaaggtaaaagtgatgcatgccaaaccaaactaaaccaatttggattatctgctattcgggtaatcttcacagaaatgactgagagaagaatctgcagtttactgagggcatttcagttcctcctaccacctcaacaggactttgtccagactctcctcctcttacctttgtgccttgactgtggttctttgtggcaagatactttggttggttaaaataatatggaacaaaggatccactgaagtg

SEQ ID NO: 32621 - DNA, 3535 bp, Homo sapiens
  source 1..3535: mol_type = unassigned DNA
cggcagcgtcatagcggcgggcatcccatctgcacgtcacacctctttctcacctggacacgcatcccttcctaccctgccagccacgacgtttcctctttcccctctccaatgccccagccccagatctggcggaagaagatggagaacgggggtgggacagagttgtggacaacctctcaggagagggtcgcaaggtgggaccctgaacagtggtagaaacaaaatgagattgtccctgaagtttgcccttcagctgagacacaaggagtagaggaagaggaaggactaacgcagaggcactcaaggtctcactatgactgtagttgagagtcctctcccttcttccctaaccctttccccatttctctcaccacttctttgccagtctagatccgtcctggtgccttactgtgcatacagttctactcgtctcagattcctttcttgtctgttagaaacgtatgtcaaacgaggatacagtgtctggaactattggttctaagatataagtggaatgagcctggatcaggagaagtatgctgagctagagttgaaggaagcttctctttctaacaagagaaagcagagttaaattatggcagagacaagtctgttagaggctggggcctctgcagcctctacagctgcggctttggagaacttacaggtggaggcgagctgctctgtgtgcctggagtatctgaaggaacctgtcatcattgagtgtgggcacaacttctgcaaagcttgcatcacccgctggtgggaggacctagagagggacttcccttgtcctgtctgtcgaaagacatcccgctaccgcagtctccgacctaatcggcaactaggcagtatggtggaaattgccaagcagctccaggccgtcaagcggaagatccgggatgagagcctctgcccccaacaccatgaggccctcagccttttctgttatgaggaccaggaggctgtatgcttgatatgtgcaatttcccacacccaccgggcccacaccgttgtgccactggacgatgctacacaggagtacaaggaaaaactgcagaagtgtctggagcccctggaacagaagctgcaggagatcactcgctgcaagtcctctgaggagaagaagcctggtgagctcaagagactagtggaaagtcgccgacagcagatcttgagggagtttgaagagcttcataggcggctggatgaagagcagcaggtgttgctttcacgactggaagaagaggaacaggacattctgcagcgactccgagaaaatgctgctcaccttggggacaagcgccgggacctggcccacttggctgccgaggtggagggcaagtgcttacagtcaggcttcgagatgcttaaggatgtcaaaagtaccctggaaaaatgtgaaaaggtgaagaccatggaggtgacttcagtatccatagagctggaaaagaacttcagcaattttccccgacagtactttgccctaaggaaaatccttaaacagctaattgcggatgtgaccctggaccctgagacagctcatcctaacctagtcctgtcagaggatcgtaagagcgtcaagttcgtggagacaagactccgggatctccctgacacaccaaggcgtttcaccttctacccttgcgtcctggctactgagggtttcacctcaggtcgacactactgggaggtggaggtgggcgacaagacccactgggcagtgggtgtatgccgggactccgtgagccgaaagggcgagttgactccactccctgagactggctactggcgggtgcggctatggaatggggacaaatatgcagccaccaccacaccttttacccctttgcacatcaaggtgaaacccaagcgggtaggcatattcctagactatgaggccggcacactgtctttctacaatgtcacagaccgctctcatatctacaccttcactgatacttttactgagaaactttggcccctcttctacccaggcatccgggctggacggaagaatgctgcaccacttaccatcaggcccccaacagattgggagtgacaggttgggatgtgggaatgactggggtgaggcagggtcaagtgctacgggcctccttcccgtgtcctgctggaacgtcttcgtgtccacctgggtccagtcctgaatcatcttggagaaacaccttggtttctaggatggttttgtgtggagggggaggtaggactgggctggatgagagagcacagctgtgacttcctcctaactgtcagggtggggagctggttcccagaggattgtctaccctgaagtccatcaggttttctgttgcacaaggacgggtcaggaaggaaggagaggcttttccagaaacaaaaaatctgtgagggtctgacttgctcaaaccagaggaggaaacagaaacccctgcacatctttttagggggttctttgacccaggatagtcttgcttcttgaggtagatcacaggggtctgtgtacctctgaattcatgagagatgaatgacagatgctctcatgggtctagatattgaggagtttttctgagggcagagattggacatcaacaaggctagaagggtcagggaagtgggctaaaggaacagattcctagagattaatgaagaggagggaggtttctttggtcttctattccaagggtaaggttgcgattatgggtaagattggccagaggtaggaatgtggggagaaggagaggctgaaaagaaagcagaggagaacccaggtccctgcctcagccttcagcagagttggcttattgcctgcctctataccaataagtcagtcaccttgctcctctccagaggcaaagtggaagagatcctgcaagacacatctatcctttcacagtgttcccaagggaacttggaaaggagagtcaggtattagaggaaagagaagggtatttgtatacaaagccctggccttaaagaatgttacttagtagctactcccaaattgtcagccttcttacctggccaaggtgtccaagccagaaaggaaaaaaggttatggagtctttctcaccctaaggacagggtggaagagggtggtatatagggaagggccagataggcaacttcatttggcttgtgtgcatctggcctggaactggtgttaagccaggcttttgcttgtttgttgccatccctcaccctttgccatttcccttttcagagaatgtaaatgattttcatgttaggccaaaataaacaacttatagggtacatatgttgtcataaaaggtaaaagtgatgcatgccaaaccaaactaaaccaatttggattatctgctattcgggtaatcttcacagaaatgactgagagaagaatctgcagtttactgagggcatttcagttcctcctaccacctcaacaggactttgtccagactctcctcctcttacctttgtgccttgactgtggttctttgtggcaagatactttggttggttaaaataatatggaacaaaggatccactgaagtga

SEQ ID NO: 32622 - DNA, 3198 bp, Homo sapiens
  source 1..3198: mol_type = unassigned DNA
gcgaggggaggaggaaggagggaggcagcgctccggcggctccgcgccccgcactcccggacccgaagccgggaagatccgtcctggtgccttactgtgcatacagttctactcgtctcagaaacgtatgtcaaacgaggatacagtgtctggaactattggttctaagatataagtggaatgagcctggatcaggagaagtatgctgagctagagttgaaggaagcttctctttctaacaagagaaagcagagttaaattatggcagagacaagtctgttagaggctggggcctctgcagcctctacagctgcggctttggagaacttacaggtggaggcgagctgctctgtgtgcctggagtatctgaaggaacctgtcatcattgagtgtgggcacaacttctgcaaagcttgcatcacccgctggtgggaggacctagagagggacttcccttgtcctgtctgtcgaaagacatcccgctaccgcagtctccgacctaatcggcaactaggcagtatggtggaaattgccaagcagctccaggccgtcaagcggaagatccgggatgagagcctctgcccccaacaccatgaggccctcagccttttctgttatgaggaccaggaggctgtatgcttgatatgtgcaatttcccacacccaccgggctcacaccgttgtgccactggacgatgctacacaggagtacaaggaaaaactgcagaagtgtctggagcccctggaacagaagctgcaggagatcactcgctgcaagtcctctgaggagaagaagcctggtgagctcaagagactagtggaaagtcgccgacagcagatcttgagggagtttgaagagcttcataggcggctggatgaagagcagcaggtgttgctttcacgactggaagaagaggaacaggacattctgcagcgactccgagaaaatgctgctcaccttggggacaagcgccgggacctggcccacttggctgccgaggtggagggcaagtgcttacagtcaggcttcgagatgcttaaggatgtcaaaagtaccctggaaaaatgtgaaaaggtgaagaccatggaggtgacttcagtatccatagagctggaaaagaacttcagcaattttccccgacagtactttgccctaaggaaaatccttaaacagctaattgcggatgtgaccctggaccctgagacagctcatcctaacctagtcctgtcagaggatcgtaagagcgtcaagttcgtggagacaagactccgggatctccctgacacaccaaggcgtttcaccttctacccttgcgtcctggctactgagggtttcacctcaggtcgacactactgggaggtggaggtgggcgacaagacccactgggcagtgggtgtatgccgggactccgtgagccgaaagggcgagttgactccactccctgagactggctactggcgggtgcggctatggaatggggacaaatatgcagccaccaccacaccttttacccctttgcacatcaaggtgaaacccaagcgggtaggcatattcctagactatgaggccggcacactgtctttctacaatgtcacagaccgctctcatatctacaccttcactgatacttttactgagaaactttggcccctcttctacccaggcatccgggctggacggaagaatgctgcaccacttaccatcaggcccccaacagattgggagtgacaggttgggatgtgggaatgactggggtgaggcagggtcaagtgctacgggcctccttcccgtgtcctgctggaacgtcttcgtgtccacctgggtccagtcctgaatcatcttggagaaacaccttggtttctaggatggttttgtgtggagggggaggtaggactgggctggatgagagagcacagctgtgacttcctcctaactgtcagggtggggagctggttcccagaggattgtctaccctgaagtccatcaggttttctgttgcacaaggacgggtcaggaaggaaggagaggcttttccagaaacaaaaaatctgtgagggtctgacttgctcaaaccagaggaggaaacagaaacccctgcacatctttttagggggttctttgacccaggatagtcttgcttcttgaggtagatcacaggggtctgtgtacctctgaattcatgagagatgaatgacagatgctctcatgggtctagatattgaggagtttttctgagggcagagattggacatcaacaaggctagaagggtcagggaagtgggctaaaggaacagattcctagagattaatgaagaggagggaggtttctttggtcttctattccaagggtaaggttgcgattatgggtaagattggccagaggtaggaatgtggggagaaggagaggctgaaaagaaagcagaggagaacccaggtccctgcctcagccttcagcagagttggcttattgcctgcctctataccaataagtcagtcaccttgctcctctccagaggcaaagtggaagagatcctgcaagacacatctatcctttcacagtgttcccaagggaacttggaaaggagagtcaggtattagaggaaagagaagggtatttgtatacaaagccctggccttaaagaatgttacttagtagctactcccaaattgtcagccttcttacctggccaaggtgtccaagccagaaaggaaaaaaggttatggagtctttctcaccctaaggacagggtggaagagggtggtatatagggaagggccagataggcaacttcatttggcttgtgtgcatctggcctggaactggtgttaagccaggcttttgcttgtttgttgccatccctcaccctttgccatttcccttttcagagaatgtaaatgattttcatgttaggccaaaataaacaacttatagggtacatatgttgtcataaaaggtaaaagtgatgcatgccaaaccaaactaaaccaatttggattatctgctattcgggtaatcttcacagaaatgactgagagaagaatctgcagtttactgagggcatttcagttcctcctaccacctcaacaggactttgtccagactctcctcctcttacctttgtgccttgactgtggttctttgtggcaagatactttggttggttaaaataatatggaacaaaggatccactgaagtga

SEQ ID NO: 32623 - DNA, 3187 bp, Homo sapiens
  source 1..3187: mol_type = unassigned DNA
attcctttcttgtctgttagaaacgtatgtcaaacgaggatacagtgtctggaactattggttctaagatataagtggaatgagcctggatcaggagaagtatgctgagctagagttgaaggaagcttctctttctaacaagagaaagcagagttaaattatggcagagacaagtctgttagaggctggggcctctgcagcctctacagctgcggctttggagaacttacaggtggaggcgagctgctctgtgtgcctggagtatctgaaggaacctgtcatcattgagtgtgggcacaacttctgcaaagcttgcatcacccgctggtgggaggacctagagagggacttcccttgtcctgtctgtcgaaagacatcccgctaccgcagtctccgacctaatcggcaactaggcagtatggtggaaattgccaagcagctccaggccgtcaagcggaagatccgggatgagagcctctgcccccaacaccatgaggccctcagccttttctgttatgaggaccaggaggctgtatgcttgatatgtgcaatttcccacacccaccgggctcacaccgttgtgccactggacgatgctacacaggagtacaaggaaaaactgcagaagtgtctggagcccctggaacagaagctgcaggagatcactcgctgcaagtcctctgaggagaagaagcctggtgagctcaagagactagtggaaagtcgccgacagcagatcttgagggagtttgaagagcttcataggcggctggatgaagagcagcaggtgttgctttcacgactggaagaagaggaacaggacattctgcagcgactccgagaaaatgctgctcaccttggggacaagcgccgggacctggcccacttggctgccgaggtggagggcaagtgcttacagtcaggcttcgagatgcttaaggatgtcaaaagtaccctggaaaagaatattcctagaaagttcggaggctcactctcaacgatctgtccacgggatcataaggctctccttggattagtaaaagaaatcaacagatgtgaaaaggtgaagaccatggaggtgacttcagtatccatagagctggaaaagaacttcagcaattttccccgacagtactttgccctaaggaaaatccttaaacagctaattgcggatgtgaccctggaccctgagacagctcatcctaacctagtcctgtcagaggatcgtaagagcgtcaagttcgtggagacaagactccgggatctccctgacacaccaaggcgtttcaccttctacccttgcgtcctggctactgagggtttcacctcaggtcgacactactgggaggtggaggtgggcgacaagacccactgggcagtgggtgtatgccgggactccgtgagccgaaagggcgagttgactccactccctgagactggctactggcgggtgcggctatggaatggggacaaatatgcagccaccaccacaccttttacccctttgcacatcaaggtgaaacccaagcgggtaggcatattcctagactatgaggccggcacactgtctttctacaatgtcacagaccgctctcatatctacaccttcactgatacttttactgagaaactttggcccctcttctacccaggcatccgggctggacggaagaatgctgcaccacttaccatcaggcccccaacagattgggagtgacaggttgggatgtgggaatgactggggtgaggcagggtcaagtgctacgggcctccttcccgtgtcctgctggaacgtcttcgtgtccacctgggtccagtcctgaatcatcttggagaaacaccttggtttctaggatggttttgtgtggagggggaggtaggactgggctggatgagagagcacagctgtgacttcctcctaactgtcagggtggggagctggttcccagaggattgtctaccctgaagtccatcaggttttctgttgcacaaggacgggtcaggaaggaaggagaggcttttccagaaacaaaaaatctgtgagggtctgacttgctcaaaccagaggaggaaacagaaacccctgcacatctttttagggggttctttgacccaggatagtcttgcttcttgaggtagatcacaggggtctgtgtacctctgaattcatgagagatgaatgacagatgctctcatgggtctagatattgaggagtttttctgagggcagagattggacatcaacaaggctagaagggtcagggaagtgggctaaaggaacagattcctagagattaatgaagaggagggaggtttctttggtcttctattccaagggtaaggttgcgattatgggtaagattggccagaggtaggaatgtggggagaaggagaggctgaaaagaaagcagaggagaacccaggtccctgcctcagccttcagcagagttggcttattgcctgcctctataccaataagtcagtcaccttgctcctctccagaggcaaagtggaagagatcctgcaagacacatctatcctttcacagtgttcccaagggaacttggaaaggagagtcaggtattagaggaaagagaagggtatttgtatacaaagccctggccttaaagaatgttacttagtagctactcccaaattgtcagccttcttacctggccaaggtgtccaagccagaaaggaaaaaaggttatggagtctttctcaccctaaggacagggtggaagagggtggtatatagggaagggccagataggcaacttcatttggcttgtgtgcatctggcctggaactggtgttaagccaggcttttgcttgtttgttgccatccctcaccctttgccatttcccttttcagagaatgtaaatgattttcatgttaggccaaaataaacaacttatagggtacatatgttgtcataaaaggtaaaagtgatgcatgccaaaccaaactaaaccaatttggattatctgctattcgggtaatcttcacagaaatgactgagagaagaatctgcagtttactgagggcatttcagttcctcctaccacctcaacaggactttgtccagactctcctcctcttacctttgtgccttgactgtggttctttgtggcaagatactttggttggttaaaataatatggaacaaaggatccactgaagtga

SEQ ID NO: 32624 - DNA, 3535 bp, Homo sapiens
  source 1..3535: mol_type = unassigned DNA
cggcagcgtcatagcggcgggcatcccatctgcacgtcacacctctttctcacctggacacgcatcccttcctaccctgccagccacgacgtttcctctttcccctctccaatgccccagccccagatctggcggaagaagatggagaacgggggtgggacagagttgtggacaacctctcaggagagggtcgcaaggtgggaccctgaacagtggtagaaacaaaatgagattgtccctgaagtttgcccttcagctgagacacaaggagtagaggaagaggaaggactaacgcagaggcactcaaggtctcactatgactgtagttgagagtcctctcccttcttccctaaccctttccccatttctctcaccacttctttgccagtctagatccgtcctggtgccttactgtgcatacagttctactcgtctcagattcctttcttgtctgttagaaacgtatgtcaaacgaggatacagtgtctggaactattggttctaagatataagtggaatgagcctggatcaggagaagtatgctgagctagagttgaaggaagcttctctttctaacaagagaaagcagagttaaattatggcagagacaagtctgttagaggctggggcctctgcagcctctacagctgcggctttggagaacttacaggtggaggcgagctgctctgtgtgcctggagtatctgaaggaacctgtcatcattgagtgtgggcacaacttctgcaaagcttgcatcacccgctggtgggaggacctagagagggacttcccttgtcctgtctgtcgaaagacatcccgctaccgcagtctccgacctaatcggcaactaggcagtatggtggaaattgccaagcagctccaggccgtcaagcggaagatccgggatgagagcctctgcccccaacaccatgaggccctcagccttttctgttatgaggaccaggaggctgtatgcttgatatgtgcaatttcccacacccaccgggctcacaccgttgtgccactggacgatgctacacaggagtacaaggaaaaactgcagaagtgtctggagcccctggaacagaagctgcaggagatcactcgctgcaagtcctctgaggagaagaagcctggtgagctcaagagactagtggaaagtcgccgacagcagatcttgagggagtttgaagagcttcataggcggctggatgaagagcagcaggtgttgctttcacgactggaagaagaggaacaggacattctgcagcgactccgagaaaatgctgctcaccttggggacaagcgccgggacctggcccacttggctgccgaggtggagggcaagtgcttacagtcaggcttcgagatgcttaaggatgtcaaaagtaccctggaaaaatgtgaaaaggtgaagaccatggaggtgacttcagtatccatagagctggaaaagaacttcagcaattttccccgacagtactttgccctaaggaaaatccttaaacagctaattgcggatgtgaccctggaccctgagacagctcatcctaacctagtcctgtcagaggatcgtaagagcgtcaagttcgtggagacaagactccgggatctccctgacacaccaaggcgtttcaccttctacccttgcgtcctggctactgagggtttcacctcaggtcgacactactgggaggtggaggtgggcgacaagacccactgggcagtgggtgtatgccgggactccgtgagccgaaagggcgagttgactccactccctgagactggctactggcgggtgcggctatggaatggggacaaatatgcagccaccaccacaccttttacccctttgcacatcaaggtgaaacccaagcgggtaggcatattcctagactatgaggccggcacactgtctttctacaatgtcacagaccgctctcatatctacaccttcactgatacttttactgagaaactttggcccctcttctacccaggcatccgggctggacggaagaatgctgcaccacttaccatcaggcccccaacagattgggagtgacaggttgggatgtgggaatgactggggtgaggcagggtcaagtgctacgggcctccttcccgtgtcctgctggaacgtcttcgtgtccacctgggtccagtcctgaatcatcttggagaaacaccttggtttctaggatggttttgtgtggagggggaggtaggactgggctggatgagagagcacagctgtgacttcctcctaactgtcagggtggggagctggttcccagaggattgtctaccctgaagtccatcaggttttctgttgcacaaggacgggtcaggaaggaaggagaggcttttccagaaacaaaaaatctgtgagggtctgacttgctcaaaccagaggaggaaacagaaacccctgcacatctttttagggggttctttgacccaggatagtcttgcttcttgaggtagatcacaggggtctgtgtacctctgaattcatgagagatgaatgacagatgctctcatgggtctagatattgaggagtttttctgagggcagagattggacatcaacaaggctagaagggtcagggaagtgggctaaaggaacagattcctagagattaatgaagaggagggaggtttctttggtcttctattccaagggtaaggttgcgattatgggtaagattggccagaggtaggaatgtggggagaaggagaggctgaaaagaaagcagaggagaacccaggtccctgcctcagccttcagcagagttggcttattgcctgcctctataccaataagtcagtcaccttgctcctctccagaggcaaagtggaagagatcctgcaagacacatctatcctttcacagtgttcccaagggaacttggaaaggagagtcaggtattagaggaaagagaagggtatttgtatacaaagccctggccttaaagaatgttacttagtagctactcccaaattgtcagccttcttacctggccaaggtgtccaagccagaaaggaaaaaaggttatggagtctttctcaccctaaggacagggtggaagagggtggtatatagggaagggccagataggcaacttcatttggcttgtgtgcatctggcctggaactggtgttaagccaggcttttgcttgtttgttgccatccctcaccctttgccatttcccttttcagagaatgtaaatgattttcatgttaggccaaaataaacaacttatagggtacatatgttgtcataaaaggtaaaagtgatgcatgccaaaccaaactaaaccaatttggattatctgctattcgggtaatcttcacagaaatgactgagagaagaatctgcagtttactgagggcatttcagttcctcctaccacctcaacaggactttgtccagactctcctcctcttacctttgtgccttgactgtggttctttgtggcaagatactttggttggttaaaataatatggaacaaaggatccactgaagtga

SEQ ID NO: 32625 - DNA, 3187 bp, Homo sapiens
  source 1..3187: mol_type = unassigned DNA
attcctttcttgtctgttagaaacgtatgtcaaacgaggatacagtgtctggaactattggttctaagatataagtggaatgagcctggatcaggagaagtatgctgagctagagttgaaggaagcttctctttctaacaagagaaagcagagttaaattatggcagagacaagtctgttagaggctggggcctctgcagcctctacagctgcggctttggagaacttacaggtggaggcgagctgctctgtgtgcctggagtatctgaaggaacctgtcatcattgagtgtgggcacaacttctgcaaagcttgcatcacccgctggtgggaggacctagagagggacttcccttgtcctgtctgtcgaaagacatcccgctaccgcagtctccgacctaatcggcaactaggcagtatggtggaaattgccaagcagctccaggccgtcaagcggaagatccgggatgagagcctctgcccccaacaccatgaggccctcagccttttctgttatgaggaccaggaggctgtatgcttgatatgtgcaatttcccacacccaccgggcccacaccgttgtgccactggacgatgctacacaggagtacaaggaaaaactgcagaagtgtctggagcccctggaacagaagctgcaggagatcactcgctgcaagtcctctgaggagaagaagcctggtgagctcaagagactagtggaaagtcgccgacagcagatcttgagggagtttgaagagcttcataggcggctggatgaagagcagcaggtgttgctttcacgactggaagaagaggaacaggacattctgcagcgactccgagaaaatgctgctcaccttggggacaagcgccgggacctggcccacttggctgccgaggtggagggcaagtgcttacagtcaggcttcgagatgcttaaggatgtcaaaagtaccctggaaaagaatattcctagaaagttcggaggctcactctcaacgatctgtccacgggatcataaggctctccttggattagtaaaagaaatcaacagatgtgaaaaggtgaagaccatggaggtgacttcagtatccatagagctggaaaagaacttcagcaattttccccgacagtactttgccctaaggaaaatccttaaacagctaattgcggatgtgaccctggaccctgagacagctcatcctaacctagtcctgtcagaggatcgtaagagcgtcaagttcgtggagacaagactccgggatctccctgacacaccaaggcgtttcaccttctacccttgcgtcctggctactgagggtttcacctcaggtcgacactactgggaggtggaggtgggcgacaagacccactgggcagtgggtgtatgccgggactccgtgagccgaaagggcgagttgactccactccctgagactggctactggcgggtgcggctatggaatggggacaaatatgcagccaccaccacaccttttacccctttgcacatcaaggtgaaacccaagcgggtaggcatattcctagactatgaggccggcacactgtctttctacaatgtcacagaccgctctcatatctacaccttcactgatacttttactgagaaactttggcccctcttctacccaggcatccgggctggacggaagaatgctgcaccacttaccatcaggcccccaacagattgggagtgacaggttgggatgtgggaatgactggggtgaggcagggtcaagtgctacgggcctccttcccgtgtcctgctggaacgtcttcgtgtccacctgggtccagtcctgaatcatcttggagaaacaccttggtttctaggatggttttgtgtggagggggaggtaggactgggctggatgagagagcacagctgtgacttcctcctaactgtcagggtggggagctggttcccagaggattgtctaccctgaagtccatcaggttttctgttgcacaaggacgggtcaggaaggaaggagaggcttttccagaaacaaaaaatctgtgagggtctgacttgctcaaaccagaggaggaaacagaaacccctgcacatctttttagggggttctttgacccaggatagtcttgcttcttgaggtagatcacaggggtctgtgtacctctgaattcatgagagatgaatgacagatgctctcatgggtctagatattgaggagtttttctgagggcagagattggacatcaacaaggctagaagggtcagggaagtgggctaaaggaacagattcctagagattaatgaagaggagggaggtttctttggtcttctattccaagggtaaggttgcgattatgggtaagattggccagaggtaggaatgtggggagaaggagaggctgaaaagaaagcagaggagaacccaggtccctgcctcagccttcagcagagttggcttattgcctgcctctataccaataagtcagtcaccttgctcctctccagaggcaaagtggaagagatcctgcaagacacatctatcctttcacagtgttcccaagggaacttggaaaggagagtcaggtattagaggaaagagaagggtatttgtatacaaagccctggccttaaagaatgttacttagtagctactcccaaattgtcagccttcttacctggccaaggtgtccaagccagaaaggaaaaaaggttatggagtctttctcaccctaaggacagggtggaagagggtggtatatagggaagggccagataggcaacttcatttggcttgtgtgcatctggcctggaactggtgttaagccaggcttttgcttgtttgttgccatccctcaccctttgccatttcccttttcagagaatgtaaatgattttcatgttaggccaaaataaacaacttatagggtacatatgttgtcataaaaggtaaaagtgatgcatgccaaaccaaactaaaccaatttggattatctgctattcgggtaatcttcacagaaatgactgagagaagaatctgcagtttactgagggcatttcagttcctcctaccacctcaacaggactttgtccagactctcctcctcttacctttgtgccttgactgtggttctttgtggcaagatactttggttggttaaaataatatggaacaaaggatccactgaagtga

SEQ ID NO: 32626 - DNA, 3198 bp, Homo sapiens
  source 1..3198: mol_type = unassigned DNA
gcgaggggaggaggaaggagggaggcagcgctccggcggctccgcgccccgcactcccggacccgaagccgggaagatccgtcctggtgccttactgtgcatacagttctactcgtctcagaaacgtatgtcaaacgaggatacagtgtctggaactattggttctaagatataagtggaatgagcctggatcaggagaagtatgctgagctagagttgaaggaagcttctctttctaacaagagaaagcagagttaaattatggcagagacaagtctgttagaggctggggcctctgcagcctctacagctgcggctttggagaacttacaggtggaggcgagctgctctgtgtgcctggagtatctgaaggaacctgtcatcattgagtgtgggcacaacttctgcaaagcttgcatcacccgctggtgggaggacctagagagggacttcccttgtcctgtctgtcgaaagacatcccgctaccgcagtctccgacctaatcggcaactaggcagtatggtggaaattgccaagcagctccaggccgtcaagcggaagatccgggatgagagcctctgcccccaacaccatgaggccctcagccttttctgttatgaggaccaggaggctgtatgcttgatatgtgcaatttcccacacccaccgggcccacaccgttgtgccactggacgatgctacacaggagtacaaggaaaaactgcagaagtgtctggagcccctggaacagaagctgcaggagatcactcgctgcaagtcctctgaggagaagaagcctggtgagctcaagagactagtggaaagtcgccgacagcagatcttgagggagtttgaagagcttcataggcggctggatgaagagcagcaggtgttgctttcacgactggaagaagaggaacaggacattctgcagcgactccgagaaaatgctgctcaccttggggacaagcgccgggacctggcccacttggctgccgaggtggagggcaagtgcttacagtcaggcttcgagatgcttaaggatgtcaaaagtaccctggaaaaatgtgaaaaggtgaagaccatggaggtgacttcagtatccatagagctggaaaagaacttcagcaattttccccgacagtactttgccctaaggaaaatccttaaacagctaattgcggatgtgaccctggaccctgagacagctcatcctaacctagtcctgtcagaggatcgtaagagcgtcaagttcgtggagacaagactccgggatctccctgacacaccaaggcgtttcaccttctacccttgcgtcctggctactgagggtttcacctcaggtcgacactactgggaggtggaggtgggcgacaagacccactgggcagtgggtgtatgccgggactccgtgagccgaaagggcgagttgactccactccctgagactggctactggcgggtgcggctatggaatggggacaaatatgcagccaccaccacaccttttacccctttgcacatcaaggtgaaacccaagcgggtaggcatattcctagactatgaggccggcacactgtctttctacaatgtcacagaccgctctcatatctacaccttcactgatacttttactgagaaactttggcccctcttctacccaggcatccgggctggacggaagaatgctgcaccacttaccatcaggcccccaacagattgggagtgacaggttgggatgtgggaatgactggggtgaggcagggtcaagtgctacgggcctccttcccgtgtcctgctggaacgtcttcgtgtccacctgggtccagtcctgaatcatcttggagaaacaccttggtttctaggatggttttgtgtggagggggaggtaggactgggctggatgagagagcacagctgtgacttcctcctaactgtcagggtggggagctggttcccagaggattgtctaccctgaagtccatcaggttttctgttgcacaaggacgggtcaggaaggaaggagaggcttttccagaaacaaaaaatctgtgagggtctgacttgctcaaaccagaggaggaaacagaaacccctgcacatctttttagggggttctttgacccaggatagtcttgcttcttgaggtagatcacaggggtctgtgtacctctgaattcatgagagatgaatgacagatgctctcatgggtctagatattgaggagtttttctgagggcagagattggacatcaacaaggctagaagggtcagggaagtgggctaaaggaacagattcctagagattaatgaagaggagggaggtttctttggtcttctattccaagggtaaggttgcgattatgggtaagattggccagaggtaggaatgtggggagaaggagaggctgaaaagaaagcagaggagaacccaggtccctgcctcagccttcagcagagttggcttattgcctgcctctataccaataagtcagtcaccttgctcctctccagaggcaaagtggaagagatcctgcaagacacatctatcctttcacagtgttcccaagggaacttggaaaggagagtcaggtattagaggaaagagaagggtatttgtatacaaagccctggccttaaagaatgttacttagtagctactcccaaattgtcagccttcttacctggccaaggtgtccaagccagaaaggaaaaaaggttatggagtctttctcaccctaaggacagggtggaagagggtggtatatagggaagggccagataggcaacttcatttggcttgtgtgcatctggcctggaactggtgttaagccaggcttttgcttgtttgttgccatccctcaccctttgccatttcccttttcagagaatgtaaatgattttcatgttaggccaaaataaacaacttatagggtacatatgttgtcataaaaggtaaaagtgatgcatgccaaaccaaactaaaccaatttggattatctgctattcgggtaatcttcacagaaatgactgagagaagaatctgcagtttactgagggcatttcagttcctcctaccacctcaacaggactttgtccagactctcctcctcttacctttgtgccttgactgtggttctttgtggcaagatactttggttggttaaaataatatggaacaaaggatccactgaagtga

SEQ ID NO: 32627 - DNA, 3249 bp, Homo sapiens
  source 1..3249: mol_type = unassigned DNA
cccagcttccactgacacgagcctcggcgcggcttccgcttccggcgagtattgtgtgtcgcgccgcggggcgggggcgaggggaggaggaaggagggaggcagcgctccggcggctccgcgccccgcactcccggacccgaagccgggaagattcctttcttgtctgttagaaacgtatgtcaaacgaggatacagtgtctggaactattggttctaagatataagtggaatgagcctggatcaggagaagtatgctgagctagagttgaaggaagcttctctttctaacaagagaaagcagagttaaattatggcagagacaagtctgttagaggctggggcctctgcagcctctacagctgcggctttggagaacttacaggtggaggcgagctgctctgtgtgcctggagtatctgaaggaacctgtcatcattgagtgtgggcacaacttctgcaaagcttgcatcacccgctggtgggaggacctagagagggacttcccttgtcctgtctgtcgaaagacatcccgctaccgcagtctccgacctaatcggcaactaggcagtatggtggaaattgccaagcagctccaggccgtcaagcggaagatccgggatgagagcctctgcccccaacaccatgaggccctcagccttttctgttatgaggaccaggaggctgtatgcttgatatgtgcaatttcccacacccaccgggcccacaccgttgtgccactggacgatgctacacaggagtacaaggaaaaactgcagaagtgtctggagcccctggaacagaagctgcaggagatcactcgctgcaagtcctctgaggagaagaagcctggtgagctcaagagactagtggaaagtcgccgacagcagatcttgagggagtttgaagagcttcataggcggctggatgaagagcagcaggtgttgctttcacgactggaagaagaggaacaggacattctgcagcgactccgagaaaatgctgctcaccttggggacaagcgccgggacctggcccacttggctgccgaggtggagggcaagtgcttacagtcaggcttcgagatgcttaaggatgtcaaaagtaccctggaaaaatgtgaaaaggtgaagaccatggaggtgacttcagtatccatagagctggaaaagaacttcagcaattttccccgacagtactttgccctaaggaaaatccttaaacagctaattgcggatgtgaccctggaccctgagacagctcatcctaacctagtcctgtcagaggatcgtaagagcgtcaagttcgtggagacaagactccgggatctccctgacacaccaaggcgtttcaccttctacccttgcgtcctggctactgagggtttcacctcaggtcgacactactgggaggtggaggtgggcgacaagacccactgggcagtgggtgtatgccgggactccgtgagccgaaagggcgagttgactccactccctgagactggctactggcgggtgcggctatggaatggggacaaatatgcagccaccaccacaccttttacccctttgcacatcaaggtgaaacccaagcgggtaggcatattcctagactatgaggccggcacactgtctttctacaatgtcacagaccgctctcatatctacaccttcactgatacttttactgagaaactttggcccctcttctacccaggcatccgggctggacggaagaatgctgcaccacttaccatcaggcccccaacagattgggagtgacaggttgggatgtgggaatgactggggtgaggcagggtcaagtgctacgggcctccttcccgtgtcctgctggaacgtcttcgtgtccacctgggtccagtcctgaatcatcttggagaaacaccttggtttctaggatggttttgtgtggagggggaggtaggactgggctggatgagagagcacagctgtgacttcctcctaactgtcagggtggggagctggttcccagaggattgtctaccctgaagtccatcaggttttctgttgcacaaggacgggtcaggaaggaaggagaggcttttccagaaacaaaaaatctgtgagggtctgacttgctcaaaccagaggaggaaacagaaacccctgcacatctttttagggggttctttgacccaggatagtcttgcttcttgaggtagatcacaggggtctgtgtacctctgaattcatgagagatgaatgacagatgctctcatgggtctagatattgaggagtttttctgagggcagagattggacatcaacaaggctagaagggtcagggaagtgggctaaaggaacagattcctagagattaatgaagaggagggaggtttctttggtcttctattccaagggtaaggttgcgattatgggtaagattggccagaggtaggaatgtggggagaaggagaggctgaaaagaaagcagaggagaacccaggtccctgcctcagccttcagcagagttggcttattgcctgcctctataccaataagtcagtcaccttgctcctctccagaggcaaagtggaagagatcctgcaagacacatctatcctttcacagtgttcccaagggaacttggaaaggagagtcaggtattagaggaaagagaagggtatttgtatacaaagccctggccttaaagaatgttacttagtagctactcccaaattgtcagccttcttacctggccaaggtgtccaagccagaaaggaaaaaaggttatggagtctttctcaccctaaggacagggtggaagagggtggtatatagggaagggccagataggcaacttcatttggcttgtgtgcatctggcctggaactggtgttaagccaggcttttgcttgtttgttgccatccctcaccctttgccatttcccttttcagagaatgtaaatgattttcatgttaggccaaaataaacaacttatagggtacatatgttgtcataaaaggtaaaagtgatgcatgccaaaccaaactaaaccaatttggattatctgctattcgggtaatcttcacagaaatgactgagagaagaatctgcagtttactgagggcatttcagttcctcctaccacctcaacaggactttgtccagactctcctcctcttacctttgtgccttgactgtggttctttgtggcaagatactttggttggttaaaataatatggaacaaaggatccactgaagtga

SEQ ID NO: 32628 - DNA, 3249 bp, Homo sapiens
  source 1..3249: mol_type = unassigned DNA
cccagcttccactgacacgagcctcggcgcggcttccgcttccggcgagtattgtgtgtcgcgccgcggggcgggggcgaggggaggaggaaggagggaggcagcgctccggcggctccgcgccccgcactcccggacccgaagccgggaagattcctttcttgtctgttagaaacgtatgtcaaacgaggatacagtgtctggaactattggttctaagatataagtggaatgagcctggatcaggagaagtatgctgagctagagttgaaggaagcttctctttctaacaagagaaagcagagttaaattatggcagagacaagtctgttagaggctggggcctctgcagcctctacagctgcggctttggagaacttacaggtggaggcgagctgctctgtgtgcctggagtatctgaaggaacctgtcatcattgagtgtgggcacaacttctgcaaagcttgcatcacccgctggtgggaggacctagagagggacttcccttgtcctgtctgtcgaaagacatcccgctaccgcagtctccgacctaatcggcaactaggcagtatggtggaaattgccaagcagctccaggccgtcaagcggaagatccgggatgagagcctctgcccccaacaccatgaggccctcagccttttctgttatgaggaccaggaggctgtatgcttgatatgtgcaatttcccacacccaccgggctcacaccgttgtgccactggacgatgctacacaggagtacaaggaaaaactgcagaagtgtctggagcccctggaacagaagctgcaggagatcactcgctgcaagtcctctgaggagaagaagcctggtgagctcaagagactagtggaaagtcgccgacagcagatcttgagggagtttgaagagcttcataggcggctggatgaagagcagcaggtgttgctttcacgactggaagaagaggaacaggacattctgcagcgactccgagaaaatgctgctcaccttggggacaagcgccgggacctggcccacttggctgccgaggtggagggcaagtgcttacagtcaggcttcgagatgcttaaggatgtcaaaagtaccctggaaaaatgtgaaaaggtgaagaccatggaggtgacttcagtatccatagagctggaaaagaacttcagcaattttccccgacagtactttgccctaaggaaaatccttaaacagctaattgcggatgtgaccctggaccctgagacagctcatcctaacctagtcctgtcagaggatcgtaagagcgtcaagttcgtggagacaagactccgggatctccctgacacaccaaggcgtttcaccttctacccttgcgtcctggctactgagggtttcacctcaggtcgacactactgggaggtggaggtgggcgacaagacccactgggcagtgggtgtatgccgggactccgtgagccgaaagggcgagttgactccactccctgagactggctactggcgggtgcggctatggaatggggacaaatatgcagccaccaccacaccttttacccctttgcacatcaaggtgaaacccaagcgggtaggcatattcctagactatgaggccggcacactgtctttctacaatgtcacagaccgctctcatatctacaccttcactgatacttttactgagaaactttggcccctcttctacccaggcatccgggctggacggaagaatgctgcaccacttaccatcaggcccccaacagattgggagtgacaggttgggatgtgggaatgactggggtgaggcagggtcaagtgctacgggcctccttcccgtgtcctgctggaacgtcttcgtgtccacctgggtccagtcctgaatcatcttggagaaacaccttggtttctaggatggttttgtgtggagggggaggtaggactgggctggatgagagagcacagctgtgacttcctcctaactgtcagggtggggagctggttcccagaggattgtctaccctgaagtccatcaggttttctgttgcacaaggacgggtcaggaaggaaggagaggcttttccagaaacaaaaaatctgtgagggtctgacttgctcaaaccagaggaggaaacagaaacccctgcacatctttttagggggttctttgacccaggatagtcttgcttcttgaggtagatcacaggggtctgtgtacctctgaattcatgagagatgaatgacagatgctctcatgggtctagatattgaggagtttttctgagggcagagattggacatcaacaaggctagaagggtcagggaagtgggctaaaggaacagattcctagagattaatgaagaggagggaggtttctttggtcttctattccaagggtaaggttgcgattatgggtaagattggccagaggtaggaatgtggggagaaggagaggctgaaaagaaagcagaggagaacccaggtccctgcctcagccttcagcagagttggcttattgcctgcctctataccaataagtcagtcaccttgctcctctccagaggcaaagtggaagagatcctgcaagacacatctatcctttcacagtgttcccaagggaacttggaaaggagagtcaggtattagaggaaagagaagggtatttgtatacaaagccctggccttaaagaatgttacttagtagctactcccaaattgtcagccttcttacctggccaaggtgtccaagccagaaaggaaaaaaggttatggagtctttctcaccctaaggacagggtggaagagggtggtatatagggaagggccagataggcaacttcatttggcttgtgtgcatctggcctggaactggtgttaagccaggcttttgcttgtttgttgccatccctcaccctttgccatttcccttttcagagaatgtaaatgattttcatgttaggccaaaataaacaacttatagggtacatatgttgtcataaaaggtaaaagtgatgcatgccaaaccaaactaaaccaatttggattatctgctattcgggtaatcttcacagaaatgactgagagaagaatctgcagtttactgagggcatttcagttcctcctaccacctcaacaggactttgtccagactctcctcctcttacctttgtgccttgactgtggttctttgtggcaagatactttggttggttaaaataatatggaacaaaggatccactgaagtga

SEQ ID NO: 32629 - DNA, 1003 bp, Homo sapiens
  source 1..1003: mol_type = unassigned DNA
gaagagaggaaaagtgtggaagtccacaagccgcccccgccccgccctcttcgtcgactttcagctgcaccgggaggcggcggcgcctggccagagccggggcctggagcctggactagacagcctcgccggccggggcgccagtccagcgccctgcgggcaatgggcttcagcgctcgagcacgcgcatgcgcgggcctgtatctccagaggattcctcgggtcacctggacgccagcatctcagccacctgcccctctgggtcccttcttgcccttgattccccctgctgcttctcatcgccagccctcctcctccttcttccgcaggcaccgctagacccggccgcggccgcccgccgacaccccagcttccactgacacgagcctcggcgcggcttccgcttccgattcctttcttgtctgttagaaacgtatgtcaaacgaggatacagtgtctggaactattggttctaagatataagtggaatgagcctggatcaggagaagtatgctgagctagagttgaaggaagcttctctttctaacaagagaaagcagagttaaattatggcagagacaagtctgttagaggctggggcctctgcagcctctacagctgcggctttggagaacttacaggtggaggcgagctgctctgtgtgcctggagtatctgaaggaacctgtcatcattgagtgtgggcacaacttctgcaaagcttgcatcacccgctggtgggaggacctagagagggacttcccttgtcctgtctgtcgaaagacatcccgctaccgcagtctccgacctaatcggcaactaggcagtatggtggaaattgccaagcagctccaggccgtcaagcggaagatccgggatgagagcctctgcccccaacaccatgaggccctcagccttttctgttatgaggaccaggaggctgtatgcttgatatgtgcaatttcccacacccaccgggcccacaccgttgtgccactggacga

SEQ ID NO: 32630 - DNA, 708 bp, Homo sapiens
  source 1..708: mol_type = unassigned DNA
agacatcccgctaccgcagtctccgacctaatcggcaactaggcagtatggtggaaattgccaagcagctccaggccgtcaagcggaagatccgggatgagagcctctgcccccaacaccatgaggccctcagccttttctgttatgaggaccaggaggctgtatgcttgatatgtgcaatttcccacacccaccgggcccacaccgttgtgccactggacgatgctacacaggagtacaaggaaaaactgcagaagtgtctggagcccctggaacagaagctgcaggagatcactcgctgcaagtcctctgaggagaagaagcctggtgagctcaagagactagtggaaagtcgccgacagcagatcttgagggagtttgaagagcttcataggcggctggatgaagagcagcaggtgttgctttcacgactggaagaagaggaacaggacattctgcagcgactccgagaaaatgctgctcaccttggggacaagcgccgggacctggcccacttggctgccgaggtggagggcaagtgcttacagtcaggcttcgagatgcttaaggatgtcaaaagtaccctggaaaaatgtgaaaaggtgaagaccatggaggtgacttcaactacaccttgtacttctctacatagtgagataaatgataatgtcagagggagatgaagagaggaccaggcgggaacctaga

SEQ ID NO: 32631 - DNA, 588 bp, Homo sapiens
  source 1..588: mol_type = unassigned DNA
cgccgacaccccagcttccactgacacgagcctcggcgcggcttccgcttccggcgagtattgtgtgtcgcgccgcggggcgggggcgaggggaggaggaaggagggaggcagcgctccggcggctccgcgccccgcactcccggacccgaagccgggaagatccgtcctggtgccttactgtgcatacagttctactcgtctcagattcctttcttgtctgttagaaacgtatgtcaaacgaggatacagtgtctggaactattggttctaagatataagtggaatgagcctggatcaggagaagtatgctgagctagagttgaaggaagcttctctttctaacaagagaaagcagagttaaattatggcagagacaagtctgttagaggctggggcctctgcagcctctacagctgcggctttggagaacttacaggtggaggcgagctgctctgtgtgcctggagtatctgaaggaacctgtcatcattgagtgtgggcacaacttctgcaaagcttgcatcacccgctggtgggaggacctagagagggacttcccttgtcctgtctgtcgaaagacatcccgc

SEQ ID NO: 32632 - DNA, 1824 bp, Homo sapiens
  source 1..1824: mol_type = unassigned DNA
cccagcttccactgacacgagcctcggcgcggcttccgcttccggcgagtattgtgtgtcgcgccgcggggcgggggcgaggggaggaggaaggagggaggcagcgctccggcggctccgcgccccgcactcccggacccgaagccgggaagattcctttcttgtctgttagaaacgtatgtcaaacgaggatacagtgtctggaactattggttctaagatataagtggaatgagcctggatcaggagaagtatgctgagctagagttgaaggaagcttctctttctaacaagagaaagcagagttaaattatggcagagacaagtctgttagaggctggggcctctgcagcctctacagctgcggctttggagaacttacaggtggaggcgagctgctctgtgtgcctggagtatctgaaggaacctgtcatcattgagtgtgggcacaacttctgcaaagcttgcatcacccgctggtgggaggacctagagagggacttcccttgtcctgtctgtcgaaagacatcccgctaccgcagtctccgacctaatcggcaactaggcagtatggtggaaattgccaagcagctccaggccgtcaagcggaagatccgggatgagagcctctgcccccaacaccatgaggccctcagccttttctgttatgaggaccaggaggctgtatgcttgatatgtgcaatttcccacacccaccgggcccacaccgttgtgccactggacgatgctacacaggagtacaaggaaaaactgcagaagtgtctggagcccctggaacagaagctgcaggagatcactcgctgcaagtcctctgaggagaagaagcctggtgagctcaagagactagtggaaagtcgccgacagcagatcttgagggagtttgaagagcttcataggcggctggatgaagagcagcaggtgttgctttcacgactggaagaagaggaacaggacattctgcagcgactccgagaaaatgctgctcaccttggggacaagcgccgggacctggcccacttggctgccgaggtggagggcaagtgcttacagtcaggcttcgagatgcttaagccagttctttctgccagggaggaatgtgaaaaggtgaagaccatggaggtgacttcagtatccatagagctggaaaagaacttcagcaattttccccgacagtactttgccctaaggaaaatccttaaacagctaattgcggatgtgaccctggaccctgagacagctcatcctaacctagtcctgtcagaggatcgtaagagcgtcaagttcgtggagacaagactccgggatctccctgacacaccaaggcgtttcaccttctacccttgcgtcctggctactgagggtttcacctcaggtcgacactactgggaggtggaggccgcccattgtgtccttgcccaggaccccgagaaccaggcgctggcgaggttttactgctacactgagaggaccattgcgaagcggctcgtcttgcggcgggatccctcggtgaagaggactctctgtcgaggctgctcttccctcctcgtcccgggcctcacctgcacccagcgccagagacgctgcaggggacagcgctggaccgtacagacctgcctaacatgccagcgcagccaacgcttcctcaatgatcccgggcatttactctggggagacaggcctgaggcccagctcgggagccaagcagattccaaaccactacaacccttgccaaacacagcccactccatttcagaccgccttcctgaggagaaaatgcagactcagggttccagtaaccagtga

SEQ ID NO: 32633 - DNA, 3187 bp, Homo sapiens; identical to SEQ ID NO: 32625
  source 1..3187: mol_type = unassigned DNA

SEQ ID NO: 32634 - DNA, 3535 bp, Homo sapiens; identical to SEQ ID NO: 32621
  source 1..3535: mol_type = unassigned DNA

SEQ ID NO: 32635 - DNA, 1003 bp, Homo sapiens; identical to SEQ ID NO: 32629
  source 1..1003: mol_type = unassigned DNA

SEQ ID NO: 32636 - DNA, 588 bp, Homo sapiens; identical to SEQ ID NO: 32631
  source 1..588: mol_type = unassigned DNA

SEQ ID NO: 32637 - DNA, 459 bp, Homo sapiens
  source 1..459: mol_type = unassigned DNA
caaggagtagaggaagaggaaggactaacgcagaggcactcaaggtctcactatgactgtagttgagagtcctctcccttcttccctaaccctttccccatttctctcaccacttctttgccagtctagatccgtcctggtgccttactgtgcatacagttctactcgtctcagaaacgtatgtcaaacgaggatacagtgtctggaactattggttctaagatataagtggaatgagcctggatcaggagaagtatgctgagctagagttgaaggaagcttctctttctaacaagagaaagcagagttaaattatggcagagacaagtctgttagaggctggggcctctgcagcctctacagctgcggctttggagaacttacaggtggaggcgagctgctctgtgtgcctggagtatctgaaggaacctgtcatcattgagtgtgggcacaacttct

SEQ ID NO: 32638 - DNA, 3535 bp, Homo sapiens; identical to SEQ ID NO: 32621
  source 1..3535: mol_type = unassigned DNA

SEQ ID NO: 32639 - DNA, 708 bp, Homo sapiens; identical to SEQ ID NO: 32630
  source 1..708: mol_type = unassigned DNA

SEQ ID NO: 32640 - DNA, 459 bp, Homo sapiens; identical to SEQ ID NO: 32637
  source 1..459: mol_type = unassigned DNA

SEQ ID NO: 32641 - DNA, 459 bp, Homo sapiens; identical to SEQ ID NO: 32637
  source 1..459: mol_type = unassigned DNA

SEQ ID NO: 32642 - DNA, 427 bp, Homo sapiens
  source 1..427: mol_type = unassigned DNA
ggctccgcgccccgcactcccggacccgaagccgggaagtctagatccgtcctggtgccttactgtgcatacagttctactcgtctcagattcctttcttgtctgttagaaacgtatgtcaaacgaggatacagtgtctggaactattggttctaagatataagtggaatgagcctggatcaggagaagtatgctgagctagagttgaaggaagcttctctttctaacaagagaaagcagagttaaattatggcagagacaagtctgttagaggctggggcctctgcagcctctacagctgcggctttggagaacttacaggtggaggcgagctgctctgtgtgcctggagtatctgaaggaacctgtcatcattgagtgtgggcacaacttctgcaaagcttgcatcacccgctggtgggaggacc

SEQ ID NO: 32643 - DNA, 427 bp, Homo sapiens; identical to SEQ ID NO: 32642
  source 1..427: mol_type = unassigned DNA

SEQ ID NO: 32644 - DNA, 1003 bp, Homo sapiens
  source 1..1003: mol_type = unassigned DNA
gaagagaggaaaagtgtggaagtccacaagccgcccccgccccgccctcttcgtcgactttcagctgcaccgggaggcggcggcgcctggccagagccggggcctggagcctggactagacagcctcgccggccggggcgccagtccagcgccctgcgggcaatgggcttcagcgctcgagcacgcgcatgcgcgggcctgtatctccagaggattcctcgggtcacctggacgccagcatctcagccacctgcccctctgggtcccttcttgcccttgattccccctgctgcttctcatcgccagccctcctcctccttcttccgcaggcaccactagacccggccgcggccgcccgccgacaccccagcttccactgacacgagcctcggcgcggcttccgcttccgattcctttcttgtctgttagaaacgtatgtcaaacgaggatacagtgtctggaactattggttctaagatataagtggaatgagcctggatcaggagaagtatgctgagctagagttgaaggaagcttctctttctaacaagagaaagcagagttaaattatggcagagacaagtctgttagaggctggggcctctgcagcctctacagctgcggctttggagaacttacaggtggaggcgagctgctctgtgtgcctggagtatctgaaggaacctgtcatcattgagtgtgggcacaacttctgcaaagcttgcatcacccgctggtgggaggacctagagagggacttcccttgtcctgtctgtcgaaagacatcccgctaccgcagtctccgacctaatcggcaactaggcagtatggtggaaattgccaagcagctccaggccgtcaagcggaagatccgggatgagagcctctgcccccaacaccatgaggccctcagccttttctgttatgaggaccaggaggctgtatgcttgatatgtgcaatttcccacacccaccgggctcacaccgttgtgccactggacga

SEQ ID NO: 32645 - DNA, 3187 bp, Homo sapiens; identical to SEQ ID NO: 32625
  source 1..3187: mol_type = unassigned DNA

SEQ ID NO: 32646 - DNA, 708 bp, Homo sapiens
  source 1..708: mol_type = unassigned DNA
agacatcccgctaccgcagtctccgacctaatcggcaactaggcagtatggtggaaattgccaagcagctccaggccgtcaagcggaagatccgggatgagagcctctgcccccaacaccatgaggccctcagccttttctgttatgaggaccaggaggctgtatgcttgatatgtgcaatttcccacacccaccgggcccacaccgttgtgccactggacgacgctacacaggagtacaaggaaaaactgcagaagtgtctggagcccctggaacagaagctgcaggagatcactcgctgcaagtcctctgaggagaagaagcctggtgagctcaagagactagtggaaagtcgccgacagcagatcttgagggagtttgaagagcttcataggcggctggatgaagagcagcaggtgttgctttcacgactggaagaagaggaacaggacattctgcagcgactccgagaaaatgctgctcaccttggggacaagcgccgggacctggcccacttggctgccgaggtggagggcaagtgcttacagtcaggcttcgagatgcttaaggatgtcaaaagtaccctggaaaaatgtgaaaaggtgaagaccatggaggtgacttcaactacaccttgtacttctctacatagtgagataaatgataatgtcagagggagatgaagagaggaccaggcgggaacctaga

SEQ ID NO: 32647 - DNA, 708 bp, Homo sapiens; identical to SEQ ID NO: 32630
  source 1..708: mol_type = unassigned DNA

SEQ ID NO: 32648 - DNA, 459 bp, Homo sapiens; identical to SEQ ID NO: 32637
  source 1..459: mol_type = unassigned DNA

SEQ ID NO: 32649 - DNA, 3187 bp, Homo sapiens; identical to SEQ ID NO: 32625
  source 1..3187: mol_type = unassigned DNA

SEQ ID NO: 32650 - DNA, 588 bp, Homo sapiens; identical to SEQ ID NO: 32631
  source 1..588: mol_type = unassigned DNA

SEQ ID NO: 32651 - DNA, 427 bp, Homo sapiens; identical to SEQ ID NO: 32642
  source 1..427: mol_type = unassigned DNA

SEQ ID NO: 32652 - DNA, 459 bp, Homo sapiens; identical to SEQ ID NO: 32637
  source 1..459: mol_type = unassigned DNA

SEQ ID NO: 32653 - DNA, 1013 bp, Homo sapiens
  source 1..1013: mol_type = unassigned DNA
cgccgcggggcgggggcgaggggaggaggaaggagggaggcagcgctccggcggctccgcgccccgcactcccggacccgaagccgggaagaaacgtatgtcaaacgaggatacagtgtctggaactattggttctaagatataagtggaatgagcctggatcaggagaagtatgctgagctagagttgaaggaagcttctctttctaacaagagaaagcagagttaaattatggcagagacaagtctgttagaggctggggcctctgcagcctctacagctgcggctttggagaacttacaggtggaggcgagctgctctgtgtgcctggagtatctgaaggaacctgtcatcattgagtgtgggcacaacttctgcaaagcttgcatcacccgctggtgggaggacctagagagggacttcccttgtcctgtctgtcgaaagacatcccgctaccgcagtctccgacctaatcggcaactaggcagtatggtggaaattgccaagcagctccaggccgtcaagcggaagatccgggatgagagcctctgcccccaacaccatgaggccctcagccttttctgttatgaggaccaggaggctgtatgcttgatatgtgcaatttcccacacccaccgggcccacaccgttgtgccactggacgatgctacacaggagtacaaggaaaaactgcagaagtgtctggagcccctggaacagaagctgcaggagatcactcgctgcaagtcctctgaggagaagaagcctggtgagctcaagagactagtggaaagtcgccgacagcagatcttgagggagtttgaagagcttcataggcggctggatgaagagcagcaggtgttgctttcacgactggaagaagaggaacaggacattctgcagcgactccgagaaaatgctgctcaccttggggacaagcgccgggacctggcccacttggctgccgaggtggagggcaagtgcttacagtcaggcttcgagatgcttaaggt

SEQ ID NO: 32654 - DNA, 427 bp, Homo sapiens; identical to SEQ ID NO: 32642
  source 1..427: mol_type = unassigned DNA

SEQ ID NO: 32655 - DNA, 1003 bp, Homo sapiens; identical to SEQ ID NO: 32629
  source 1..1003: mol_type = unassigned DNA

SEQ ID NO: 32656 - DNA, 3198 bp, Homo sapiens; identical to SEQ ID NO: 32626
  source 1..3198: mol_type = unassigned DNA

SEQ ID NO: 32657 - DNA, 3535 bp, Homo sapiens; identical to SEQ ID NO: 32621
  source 1..3535: mol_type = unassigned DNA

SEQ ID NO: 32658 - DNA, 1013 bp, Homo sapiens; identical to SEQ ID NO: 32653
  source 1..1013: mol_type = unassigned DNA

SEQ ID NO: 32659 - DNA, 3535 bp, Homo sapiens; identical to SEQ ID NO: 32621
  source 1..3535: mol_type = unassigned DNA

SEQ ID NO: 32660 - DNA, 427 bp, Homo sapiens; identical to SEQ ID NO: 32642
  source 1..427: mol_type = unassigned DNA

SEQ ID NO: 32661 - DNA, 427 bp, Homo sapiens; identical to SEQ ID NO: 32642
  source 1..427: mol_type = unassigned DNA

SEQ ID NO: 32662 - DNA, 708 bp, Homo sapiens; identical to SEQ ID NO: 32630
  source 1..708: mol_type = unassigned DNA

SEQ ID NO: 32663 - DNA, 3249 bp, Homo sapiens; identical to SEQ ID NO: 32627
  source 1..3249: mol_type = unassigned DNA

SEQ ID NO: 32664 - DNA, 588 bp, Homo sapiens; identical to SEQ ID NO: 32631
  source 1..588: mol_type = unassigned DNA

SEQ ID NO: 32665 - DNA, 708 bp, Homo sapiens; identical to SEQ ID NO: 32630
  source 1..708: mol_type = unassigned DNA

SEQ ID NO: 32666 - DNA, 3249 bp, Homo sapiens
  source 1..3249: mol_type = unassigned DNA
cccagcttccactgacacgagcctcggcgcggcttccgcttccggcgagtattgtgtgtcgcgccgcggggcgggggcgaggggaggaggaaggagggaggcagcgctccggcggctccgcgccccgcactcccggacccgaagccgggaagattcctttcttgtctgttagaaacgtatgtcaaacgaggatacagtgtctggaactattggttctaagatataagtggaatgagcctggatcaggagaagtatgctgagctagagttgaaggaagcttctctttctaacaagagaaagcagagttaaattatggcagagacaagtctgttagaggctggggcctctgcagcctctacagctgcggctttggagaacttacaggtggaggcgagctgctctgtgtgcctggagtatctgaaggaacctgtcatcattgagtgtgggcacaacttctgcaaagcttgcatcacccgctggtgggaggacctagagagggacttcccttgtcctgtctgtcgaaagacatcccgctaccgcagtctccgacctaatcggcaactaggcagtatggtggaaattgccaagcagctccaggccgtcaagcggaagatccgggatgagagcctctgcccccaacaccatgaggccctcagccttttctgttatgaggaccaggaggctgtatgcttgatatgtgcaatttcccacacccaccgggcccacaccgttgtgccactggacgacgctacacaggagtacaaggaaaaactgcagaagtgtctggagcccctggaacagaagctgcaggagatcactcgctgcaagtcctctgaggagaagaagcctggtgagctcaagagactagtggaaagtcgccgacagcagatcttgagggagtttgaagagcttcataggcggctggatgaagagcagcaggtgttgctttcacgactggaagaagaggaacaggacattctgcagcgactccgagaaaatgctgctcaccttggggacaagcgccgggacctggcccacttggctgccgaggtggagggcaagtgcttacagtcaggcttcgagatgcttaaggatgtcaaaagtaccctggaaaaatgtgaaaaggtgaagaccatggaggtgacttcagtatccatagagctggaaaagaacttcagcaattttccccgacagtactttgccctaaggaaaatccttaaacagctaattgcggatgtgaccctggaccccgagacagctcatcctaacctagtcctgtcagaggatcgtaagagcgtcaagttcgtggagacaagactccgggatctccctgacacaccaaggcgtttcaccttctacccttgcgtcctggctactgagggtttcacctcaggtcgacactactgggaggtggaggtgggcgacaagacccactgggcagtgggtgtatgccgggactccgtgagccgaaagggcgagttgactccactccctgagactggctactggcgggtgcggctatggaatggggacaaatatgcagccaccaccacaccttttacccctttgcacatcaaggtgaaacccaagcgggtaggcatattcctagactatgaggccggcacactgtctttctacaatgtcacagaccgctctcatatctacaccttcactgatacttttactgagaaactttggcccctcttctacccaggcatccgggctggacggaagaatgctgcaccacttaccatcaggcccccaacagattgggagtgacaggttgggatgtgggaatgactggggtgaggcagggtcaagtgctacgggcctccttcccgtgtcctgctggaacgtcttcgtgtccacctgggtccagtcctgaatcatcttggagaaacaccttggtttctaggatggttttgtgtggagggggaggtaggactgggctggatgagagagcacagctgtgacttcctcctaactgtcagggtggggagctggttcccagaggattgtctaccctgaagtccatcaggttttctgttgcacaaggacgggtcaggaaggaaggagaggcttttccagaaacaaaaaatctgtgagggtctgacttgctcaaaccagaggaggaaacagaaacccctgcacatctttttagggggttctttgacccaggatagtcttgcttcttgaggtagatcacaggggtctgtgtacctctgaattcatgagagatgaatgacagatgctctcatgggtctagatattgaggagtttttctgagggcagagattggacatcaacaaggctagaagggtcagggaagtgggctaaaggaacagattcctagagattaatgaagaggagggaggtttctttggtcttctattccaagggtaaggttgcgattatgggtaagattggccagaggtaggaatgtggggagaaggagaggctgaaaagaaagcagaggagaacccaggtccctgcctcagccttcagcagagttggcttattgcctgcctctataccaataagtcagtcaccttgctcctctccagaggcaaagtggaagagatcctgcaagacacatctatcctttcacagtgttcccaagggaacttggaaaggagagtcaggtattagaggaaagagaagggtatttgtatacaaagccctggccttaaagaatgttacttagtagctactcccaaattgtcagccttcttacctggccaaggtgtccaagccagaaaggaaaaaaggttatggagtctttctcaccctaaggacagggtggaagagggtggtatatagggaagggccagataggcaacttcatttggcttgtgtgcatctggcctggaactggtgttaagccaggcttttgcttgtttgttgccatccctcaccctttgccatttcccttttcagagaatgtaaatgattttcatgttaggccaaaataaacaacttatagggtacatatgttgtcataaaaggtaaaagtgatgcatgccaaaccaaactaaaccaatttggattatctgctattcgggtaatcttcacagaaatgactgagagaagaatctgcagtttactgagggcatttcagttcctcctaccacctcaacaggactttgtccagactctcctcctcttacctttgtgccttgactgtggttctttgtggcaagatactttggttggttaaaataatatggaacaaaggatccactgaagtga

SEQ ID NO: 32667 - DNA, 3249 bp, Homo sapiens; identical to SEQ ID NO: 32627
  source 1..3249: mol_type = unassigned DNA

SEQ ID NO: 32668 - DNA, 1013 bp, Homo sapiens; identical to SEQ ID NO: 32653
  source 1..1013: mol_type = unassigned DNA

SEQ ID NO: 32669 - DNA, 588 bp, Homo sapiens; identical to SEQ ID NO: 32631
  source 1..588: mol_type = unassigned DNA

SEQ ID NO: 32670 - DNA, 427 bp, Homo sapiens; identical to SEQ ID NO: 32642
  source 1..427: mol_type = unassigned DNA

SEQ ID NO: 32671 - DNA, 1013 bp, Homo sapiens
  source 1..1013: mol_type = unassigned DNA
cgccgcggggcgggggcgaggggaggaggaaggagggaggcagcgctccggcggctccgcgccccgcactcccggacccgaagccgggaagaaacgtatgtcaaacgaggatacagtgtctggaactattggttctaagatataagtggaatgagcctggatcaggagaagtatgctgagctagagttgaaggaagcttctctttctaacaagagaaagcagagttaaattatggcagagacaagtctgttagaggctggggcctctgcagcctctacagctgcggctttggagaacttacaggtggaggcgagctgctctgtgtgcctggagtatctgaaggaacctgtcatcattgagtgtgggcacaacttctgcaaagcttgcatcacccgctggtgggaggacctagagagggacttcccttgtcctgtctgtcgaaagacatcccgctaccgcagtctccgacctaatcggcaactaggcagtatggtggaaattgccaagcagctccaggccgtcaagcggaagatccgggatgagagcctctgcccccaacaccatgaggccctcagccttttctgttatgaggaccaggaggctgtatgcttgatatgtgcaatttcccacacccaccgggcccacaccgttgtgccactggacgacgctacacaggagtacaaggaaaaactgcagaagtgtctggagcccctggaacagaagctgcaggagatcactcgctgcaagtcctctgaggagaagaagcctggtgagctcaagagactagtggaaagtcgccgacagcagatcttgagggagtttgaagagcttcataggcggctggatgaagagcagcaggtgttgctttcacgactggaagaagaggaacaggacattctgcagcgactccgagaaaatgctgctcaccttggggacaagcgccgggacctggcccacttggctgccgaggtggagggcaagtgcttacagtcaggcttcgagatgcttaaggt

SEQ ID NO: 32672 - DNA, 3198 bp, Homo sapiens; identical to SEQ ID NO: 32626
  source 1..3198: mol_type = unassigned DNA

SEQ ID NO: 32673 - DNA, 3187 bp, Homo sapiens
  source 1..3187: mol_type = unassigned DNA
attcctttcttgtctgttagaaacgtatgtcaaacgaggatacagtgtctggaactattggttctaagatataagtggaatgagcctggatcaggagaagtatgctgagctagagttgaaggaagcttctctttctaacaagagaaagcagagttaaattatggcagagacaagtctgttagaggctggggcctctgcagcctctacagctgcggctttggagaacttacaggtggaggcgagctgctctgtgtgcctggagtatctgaaggaacctgtcatcattgagtgtgggcacaacttctgcaaagcttgcatcacccgctggtgggaggacctagagagggacttcccttgtcctgtctgtcgaaagacatcccgctaccgcagtctccgacctaatcggcaactaggcagtatggtggaaattgccaagcagctccaggccgtcaagcggaagatccgggatgagagcctctgcccccaacaccatgaggccctcagccttttctgttatgaggaccaggaggctgtatgcttgatatgtgcaatttcccacacccaccgggcccacaccgttgtgccactggacgacgctacacaggagtacaaggaaaaactgcagaagtgtctggagcccctggaacagaagctgcaggagatcactcgctgcaagtcctctgaggagaagaagcctggtgagctcaagagactagtggaaagtcgccgacagcagatcttgagggagtttgaagagcttcataggcggctggatgaagagcagcaggtgttgctttcacgactggaagaagaggaacaggacattctgcagcgactccgagaaaatgctgctcaccttggggacaagcgccgggacctggcccacttggctgccgaggtggagggcaagtgcttacagtcaggcttcgagatgcttaaggatgtcaaaagtaccctggaaaagaatattcctagaaagttcggaggctcactctcaacgatctgtccacgggatcataaggctctccttggattagtaaaagaaatcaacagatgtgaaaaggtgaagaccatggaggtgacttcagtatccatagagctggaaaagaacttcagcaattttccccgacagtactttgccctaaggaaaatccttaaacagctaattgcggatgtgaccctggaccccgagacagctcatcctaacctagtcctgtcagaggatcgtaagagcgtcaagttcgtggagacaagactccgggatctccctgacacaccaaggcgtttcaccttctacccttgcgtcctggctactgagggtttcacctcaggtcgacactactgggaggtggaggtgggcgacaagacccactgggcagtgggtgtatgccgggactccgtgagccgaaagggcgagttgactccactccctgagactggctactggcgggtgcggctatggaatggggacaaatatgcagccaccaccacaccttttacccctttgcacatcaaggtgaaacccaagcgggtaggcatattcctagactatgaggccggcacactgtctttctacaatgtcacagaccgctctcatatctacaccttcactgatacttttactgagaaactttggcccctcttctacccaggcatccgggctggacggaagaatgctgcaccacttaccatcaggcccccaacagattgggagtgacaggttgggatgtgggaatgactggggtgaggcagggtcaagtgctacgggcctccttcccgtgtcctgctggaacgtcttcgtgtccacctgggtccagtcctgaatcatcttggagaaacaccttggtttctaggatggttttgtgtggagggggaggtaggactgggctggatgagagagcacagctgtgacttcctcctaactgtcagggtggggagctggttcccagaggattgtctaccctgaagtccatcaggttttctgttgcacaaggacgggtcaggaaggaaggagaggcttttccagaaacaaaaaatctgtgagggtctgacttgctcaaaccagaggaggaaacagaaacccctgcacatctttttagggggttctttgacccaggatagtcttgcttcttgaggtagatcacaggggtctgtgtacctctgaattcatgagagatgaatgacagatgctctcatgggtctagatattgaggagtttttctgagggcagagattggacatcaacaaggctagaagggtcagggaagtgggctaaaggaacagattcctagagattaatgaagaggagggaggtttctttggtcttctattccaagggtaaggttgcgattatgggtaagattggccagaggtaggaatgtggggagaaggagaggctgaaaagaaagcagaggagaacccaggtccctgcctcagccttcagcagagttggcttattgcctgcctctataccaataagtcagtcaccttgctcctctccagaggcaaagtggaagagatcctgcaagacacatctatcctttcacagtgttcccaagggaacttggaaaggagagtcaggtattagaggaaagagaagggtatttgtatacaaagccctggccttaaagaatgttacttagtagctactcccaaattgtcagccttcttacctggccaaggtgtccaagccagaaaggaaaaaaggttatggagtctttctcaccctaaggacagggtggaagagggtggtatatagggaagggccagataggcaacttcatttggcttgtgtgcatctggcctggaactggtgttaagccaggcttttgcttgtttgttgccatccctcaccctttgccatttcccttttcagagaatgtaaatgattttcatgttaggccaaaataaacaacttatagggtacatatgttgtcataaaaggtaaaagtgatgcatgccaaaccaaactaaaccaatttggattatctgctattcgggtaatcttcacagaaatgactgagagaagaatctgcagtttactgagggcatttcagttcctcctaccacctcaacaggactttgtccagactctcctcctcttacctttgtgccttgactgtggttctttgtggcaagatactttggttggttaaaataatatggaacaaaggatccactgaagtga

SEQ ID NO: 32674 - DNA, 3198 bp, Homo sapiens; identical to SEQ ID NO: 32626
  source 1..3198: mol_type = unassigned DNA

SEQ ID NO: 32675 - DNA, 1013 bp, Homo sapiens
  source 1..1013: mol_type = unassigned DNA
cgccgcggggcgggggcgaggggaggaggaaggagggaggcagcgctccggcggctccgcgccccgcactcccggacccgaagccgggaagaaacgtatgtcaaacgaggatacagtgtctggaactattggttctaagatataagtggaatgagcctggatcaggagaagtatgctgagctagagttgaaggaagcttctctttctaacaagagaaagcagagttaaattatggcagagacaagtctgttagaggctggggcctctgcagcctctacagctgcggctttggagaacttacaggtggaggcgagctgctctgtgtgcctggagtatctgaaggaacctgtcatcattgagtgtgggcacaacttctgcaaagcttgcatcacccgctggtgggaggacctagagagggacttcccttgtcctgtctgtcgaaagacatcccgctaccgcagtctccgacctaatcggcaactaggcagtatggtggaaattgccaagcagctccaggccgtcaagcggaagatccgggatgagagcctctgcccccaacaccatgaggccctcagccttttctgttatgaggaccaggaggctgtatgcttgatatgtgcaatttcccacacccaccgggctcacaccgttgtgccactggacgatgctacacaggagtacaaggaaaaactgcagaagtgtctggagcccctggaacagaagctgcaggagatcactcgctgcaagtcctctgaggagaagaagcctggtgagctcaagagactagtggaaagtcgccgacagcagatcttgagggagtttgaagagcttcataggcggctggatgaagagcagcaggtgttgctttcacgactggaagaagaggaacaggacattctgcagcgactccgagaaaatgctgctcaccttggggacaagcgccgggacctggcccacttggctgccgaggtggagggcaagtgcttacagtcaggcttcgagatgcttaaggt

SEQ ID NO: 32676 - DNA, 588 bp, Homo sapiens; identical to SEQ ID NO: 32631
  source 1..588: mol_type = unassigned DNA

SEQ ID NO: 32677 - DNA, 1548 bp, Homo sapiens
  source 1..1548: mol_type = unassigned DNA
cccagcttccactgacacgagcctcggcgcggcttccgcttccggcgagtattgtgtgtcgcgccgcggggcgggggcgaggggaggaggaaggagggaggcagcgctccggcggctccgcgccccgcactcccggacccgaagccgggaagattcctttcttgtctgttagaaacgtatgtcaaacgaggatacagtgtctggaactattggttctaagatataagtggaatgagcctggatcaggagaagtatgctgagctagagttgaaggaagcttctctttctaacaagagaaagcagagttaaattatggcagagacaagtctgttagaggctggggcctctgcagcctctacagctgcggctttggagaacttacaggtggaggcgagctgctctgtgtgcctggagtatctgaaggaacctgtcatcattgagtgtgggcacaacttctgcaaagcttgcatcacccgctggtgggaggacctagagagggacttcccttgtcctgtctgtcgaaagacatcccgctaccgcagtctccgacctaatcggcaactaggcagtatggtggaaattgccaagcagctccaggccgtcaagcggaagatccgggatgagagcctctgcccccaacaccatgaggccctcagccttttctgttatgaggaccaggaggctgtatgcttgatatgtgcaatttcccacacccaccgggcccacaccgttgtgccactggacgatgctacacaggagtacaaggaaaaactgcagaagtgtctggagcccctggaacagaagctgcaggagatcactcgctgcaagtcctctgaggagaagaagcctggtgagctcaagagactagtggaaagtcgccgacagcagatcttgagggagtttgaagagcttcataggcggctggatgaagagcagcaggtgttgctttcacgactggaagaagaggaacaggacattctgcagcgactccgagaaaatgctgctcaccttggggacaagcgccgggacctggcccacttggctgccgaggtggagggcaagtgcttacagtcaggcttcgagatgcttaagccagttctttctgccagggaggaatgtgaaaaggtgaagaccatggaggtgacttcagtatccatagagctggaaaagaacttcagcaattttccccgacagtactttgccctaaggaaaatccttaaacagctaattgcggatgtgaccctggaccctgagacagctcatcctaacctagtcctgtcagaggatcgtaagagcgtcaagttcgtggagacaagactccgggatctccctgacacaccaaggcgtttcaccttctacccttgcgtcctggctactgagggtttcacctcaggtcgacactactgggaggtggaggtgggcgacaagacccactgggcagtgggtgtatgccgggactccgtgagccgaaagggcgggtgcggctatggaatggggacaaatatgcagccaccaccacaccttttacccctttgcacatcaaggtga

SEQ ID NO: 32678 - DNA, 3198 bp, Homo sapiens; identical to SEQ ID NO: 32626
  source 1..3198: mol_type = unassigned DNA

SEQ ID NO: 32679 - DNA, 1013 bp, Homo sapiens; identical to SEQ ID NO: 32653
  source 1..1013: mol_type = unassigned DNA

SEQ ID NO: 32680 - DNA, 459 bp, Homo sapiens; identical to SEQ ID NO: 32637
  source 1..459: mol_type = unassigned DNA

SEQ ID NO: 32681 - DNA, 1013 bp, Homo sapiens; identical to SEQ ID NO: 32653
  source 1..1013: mol_type = unassigned DNA

SEQ ID NO: 32682 - DNA, 3535 bp, Homo sapiens
  source 1..3535: mol_type = unassigned DNA
cggcagcgtcatagcggcgggcatcccatctgcacgtcacacctctttctcacctggacacgcatcccttcctaccctgccagccacgacgtttcctctttcccctctccaatgccccagccccagatctggcggaagaagatggagaacgggggtgggacagagttgtggacaacctctcaggagagggtcgcaaggtgggaccctgaacagtggtagaaacaaaatgagattgtccctgaagtttgcccttcagctgagacacaaggagtagaggaagaggaaggactaacgcagaggcactcaaggtctcactatgactgtagttgagagtcctctcccttcttccctaaccctttccccatttctctcaccacttctttgccagtctagatccgtcctggtgccttactgtgcatacagttctactcgtctcagattcctttcttgtctgttagaaacgtatgtcaaacgaggatacagtgtctggaactattggttctaagatataagtggaatgagcctggatcaggagaagtatgctgagctagagttgaaggaagcttctctttctaacaagagaaagcagagttaaattatggcagagacaagtctgttagaggctggggcctctgcagcctctacagctgcggctttggagaacttacaggtggaggcgagctgctctgtgtgcctggagtatctgaaggaacctgtcatcattgagtgtgggcacaacttctgcaaagcttgcatcacccgctggtgggaggacctagagagggacttcccttgtcctgtctgtcgaaagacatcccgctaccgcagtctccgacctaatcggcaactaggcagtatggtggaaattgccaagcagctccaggccgtcaagcggaagatccgggatgagagcctctgcccccaacaccatgaggccctcagccttttctgttatgaggaccaggaggctgtatgcttgatatgtgcaatttcccacacccaccgggcccacaccgttgtgccactggacgacgctacacaggagtacaaggaaaaactgcagaagtgtctggagcccctggaacagaagctgcaggagatcactcgctgcaagtcctctgaggagaagaagcctggtgagctcaagagactagtggaaagtcgccgacagcagatcttgagggagtttgaagagcttcataggcggctggatgaagagcagcaggtgttgctttcacgactggaagaagaggaacaggacattctgcagcgactccgagaaaatgctgctcaccttggggacaagcgccgggacctggcccacttggctgccgaggtggagggcaagtgcttacagtcaggcttcgagatgcttaaggatgtcaaaagtaccctggaaaaatgtgaaaaggtgaagaccatggaggtgacttcagtatccatagagctggaaaagaacttcagcaattttccccgacagtactttgccctaaggaaaatccttaaacagctaattgcggatgtgaccctggaccccgagacagctcatcctaacctagtcctgtcagaggatcgtaagagcgtcaagttcgtggagacaagactccgggatctccctgacacaccaaggcgtttcaccttctacccttgcgtcctggctactgagggtttcacctcaggtcgacactactgggaggtggaggtgggcgacaagacccactgggcagtgggtgtatgccgggactccgtgagccgaaagggcgagttgactccactccctgagactggctactggcgggtgcggctatggaatggggacaaatatgcagccaccaccacaccttttacccctttgcacatcaaggtgaaacccaagcgggtaggcatattcctagactatgaggccggcacactgtctttctacaatgtcacagaccgctctcatatctacaccttcactgatacttttactgagaaactttggcccctcttctacccaggcatccgggctggacggaagaatgctgcaccacttaccatcaggcccccaacagattgggagtgacaggttgggatgtgggaatgactggggtgaggcagggtcaagtgctacgggcctccttcccgtgtcctgctggaacgtcttcgtgtccacctgggtccagtcctgaatcatcttggagaaacaccttggtttctaggatggttttgtgtggagggggaggtaggactgggctggatgagagagcacagctgtgacttcctcctaactgtcagggtggggagctggttcccagaggattgtctaccctgaagtccatcaggttttctgttgcacaaggacgggtcaggaaggaaggagaggcttttccagaaacaaaaaatctgtgagggtctgacttgctcaaaccagaggaggaaacagaaacccctgcacatctttttagggggttctttgacccaggatagtcttgcttcttgaggtagatcacaggggtctgtgtacctctgaattcatgagagatgaatgacagatgctctcatgggtctagatattgaggagtttttctgagggcagagattggacatcaacaaggctagaagggtcagggaagtgggctaaaggaacagattcctagagattaatgaagaggagggaggtttctttggtcttctattccaagggtaaggttgcgattatgggtaagattggccagaggtaggaatgtggggagaaggagaggctgaaaagaaagcagaggagaacccaggtccctgcctcagccttcagcagagttggcttattgcctgcctctataccaataagtcagtcaccttgctcctctccagaggcaaagtggaagagatcctgcaagacacatctatcctttcacagtgttcccaagggaacttggaaaggagagtcaggtattagaggaaagagaagggtatttgtatacaaagccctggccttaaagaatgttacttagtagctactcccaaattgtcagccttcttacctggccaaggtgtccaagccagaaaggaaaaaaggttatggagtctttctcaccctaaggacagggtggaagagggtggtatatagggaagggccagataggcaacttcatttggcttgtgtgcatctggcctggaactggtgttaagccaggcttttgcttgtttgttgccatccctcaccctttgccatttcccttttcagagaatgtaaatgattttcatgttaggccaaaataaacaacttatagggtacatatgttgtcataaaaggtaaaagtgatgcatgccaaaccaaactaaaccaatttggattatctgctattcgggtaatcttcacagaaatgactgagagaagaatctgcagtttactgagggcatttcagttcctcctaccacctcaacaggactttgtccagactctcctcctcttacctttgtgccttgactgtggttctttgtggcaagatactttggttggttaaaataatatggaacaaaggatccactgaagtga

SEQ ID NO: 32683 - DNA, 588 bp, Homo sapiens; identical to SEQ ID NO: 32631
  source 1..588: mol_type = unassigned DNA

SEQ ID NO: 32684 - DNA, 3198 bp, Homo sapiens
  source 1..3198: mol_type = unassigned DNA
gcgaggggaggaggaaggagggaggcagcgctccggcggctccgcgccccgcactcccggacccgaagccgggaagatccgtcctggtgccttactgtgcatacagttctactcgtctcagaaacgtatgtcaaacgaggatacagtgtctggaactattggttctaagatataagtggaatgagcctggatcaggagaagtatgctgagctagagttgaaggaagcttctctttctaacaagagaaagcagagttaaattatggcagagacaagtctgttagaggctggggcctctgcagcctctacagctgcggctttggagaacttacaggtggaggcgagctgctctgtgtgcctggagtatctgaaggaacctgtcatcattgagtgtgggcacaacttctgcaaagcttgcatcacccgctggtgggaggacctagagagggacttcccttgtcctgtctgtcgaaagacatcccgctaccgcagtctccgacctaatcggcaactaggcagtatggtggaaattgccaagcagctccaggccgtcaagcggaagatccgggatgagagcctctgcccccaacaccatgaggccctcagccttttctgttatgaggaccaggaggctgtatgcttgatatgtgcaatttcccacacccaccgggcccacaccgttgtgccactggacgacgctacacaggagtacaaggaaaaactgcagaagtgtctggagcccctggaacagaagctgcaggagatcactcgctgcaagtcctctgaggagaagaagcctggtgagctcaagagactagtggaaagtcgccgacagcagatcttgagggagtttgaagagcttcataggcggctggatgaagagcagcaggtgttgctttcacgactggaagaagaggaacaggacattctgcagcgactccgagaaaatgctgctcaccttggggacaagcgccgggacctggcccacttggctgccgaggtggagggcaagtgcttacagtcaggcttcgagatgcttaaggatgtcaaaagtaccctggaaaaatgtgaaaaggtgaagaccatggaggtgacttcagtatccatagagctggaaaagaacttcagcaattttccccgacagtactttgccctaaggaaaatccttaaacagctaattgcggatgtgaccctggaccccgagacagctcatcctaacctagtcctgtcagaggatcgtaagagcgtcaagttcgtggagacaagactccgggatctccctgacacaccaaggcgtttcaccttctacccttgcgtcctggctactgagggtttcacctcaggtcgacactactgggaggtggaggtgggcgacaagacccactgggcagtgggtgtatgccgggactccgtgagccgaaagggcgagttgactccactccctgagactggctactggcgggtgcggctatggaatggggacaaatatgcagccaccaccacaccttttacccctttgcacatcaaggtgaaacccaagcgggtaggcatattcctagactatgaggccggcacactgtctttctacaatgtcacagaccgctctcatatctacaccttcactgatacttttactgagaaactttggcccctcttctacccaggcatccgggctggacggaagaatgctgcaccacttaccatcaggcccccaacagattgggagtgacaggttgggatgtgggaatgactggggtgaggcagggtcaagtgctacgggcctccttcccgtgtcctgctggaacgtcttcgtgtccacctgggtccagtcctgaatcatcttggagaaacaccttggtttctaggatggttttgtgtggagggggaggtaggactgggctggatgagagagcacagctgtgacttcctcctaactgtcagggtggggagctggttcccagaggattgtctaccctgaagtccatcaggttttctgttgcacaaggacgggtcaggaaggaaggagaggcttttccagaaacaaaaaatctgtgagggtctgacttgctcaaaccagaggaggaaacagaaacccctgcacatctttttagggggttctttgacccaggatagtcttgcttcttgaggtagatcacaggggtctgtgtacctctgaattcatgagagatgaatgacagatgctctcatgggtctagatattgaggagtttttctgagggcagagattggacatcaacaaggctagaagggtcagggaagtgggctaaaggaacagattcctagagattaatgaagaggagggaggtttctttggtcttctattccaagggtaaggttgcgattatgggtaagattggccagaggtaggaatgtggggagaaggagaggctgaaaagaaagcagaggagaacccaggtccctgcctcagccttcagcagagttggcttattgcctgcctctataccaataagtcagtcaccttgctcctctccagaggcaaagtggaagagatcctgcaagacacatctatcctttcacagtgttcccaagggaacttggaaaggagagtcaggtattagaggaaagagaagggtatttgtatacaaagccctggccttaaagaatgttacttagtagctactcccaaattgtcagccttcttacctggccaaggtgtccaagccagaaaggaaaaaaggttatggagtctttctcaccctaaggacagggtggaagagggtggtatatagggaagggccagataggcaacttcatttggcttgtgtgcatctggcctggaactggtgttaagccaggcttttgcttgtttgttgccatccctcaccctttgccatttcccttttcagagaatgtaaatgattttcatgttaggccaaaataaacaacttatagggtacatatgttgtcataaaaggtaaaagtgatgcatgccaaaccaaactaaaccaatttggattatctgctattcgggtaatcttcacagaaatgactgagagaagaatctgcagtttactgagggcatttcagttcctcctaccacctcaacaggactttgtccagactctcctcctcttacctttgtgccttgactgtggttctttgtggcaagatactttggttggttaaaataatatggaacaaaggatccactgaagtga

SEQ ID NO: 32685 - DNA, 3187 bp, Homo sapiens; identical to SEQ ID NO: 32625
  source 1..3187: mol_type = unassigned DNA

SEQ ID NO: 32686 - DNA, 3249 bp, Homo sapiens; identical to SEQ ID NO: 32627
  source 1..3249: mol_type = unassigned DNA

SEQ ID NO: 32687 - DNA, 1003 bp, Homo sapiens; identical to SEQ ID NO: 32629
  source 1..1003: mol_type = unassigned DNA

SEQ ID NO: 32688 - DNA, 1003 bp, Homo sapiens; identical to SEQ ID NO: 32629
  source 1..1003: mol_type = unassigned DNA

SEQ ID NO: 32689 - DNA, 708 bp, Homo sapiens
  source 1..708: mol_type = unassigned DNA
agacatcccgctaccgcagtctccgacctaatcggcaactaggcagtatggtggaaattgccaagcagctccaggccgtcaagcggaagatccgggatgagagcctctgcccccaacaccatgaggccctcagccttttctgttatgaggaccaggaggctgtatgcttgatatgtgcaatttcccacacccaccgggctcacaccgttgtgccactggacgatgctacacaggagtacaaggaaaaactgcagaagtgtctggagcccctggaacagaagctgcaggagatcactcgctgcaagtcctctgaggagaagaagcctggtgagctcaagagactagtggaaagtcgccgacagcagatcttgagggagtttgaagagcttcataggcggctggatgaagagcagcaggtgttgctttcacgactggaagaagaggaacaggacattctgcagcgactccgagaaaatgctgctcaccttggggacaagcgccgggacctggcccacttggctgccgaggtggagggcaagtgcttacagtcaggcttcgagatgcttaaggatgtcaaaagtaccctggaaaaatgtgaaaaggtgaagaccatggaggtgacttcaactacaccttgtacttctctacatagtgagataaatgataatgtcagagggagatgaagagaggaccaggcgggaacctaga

SEQ ID NO: 32690 - DNA, 459 bp, Homo sapiens; identical to SEQ ID NO: 32637
  source 1..459: mol_type = unassigned DNA

SEQ ID NO: 32691 - DNA, 1003 bp, Homo sapiens; identical to SEQ ID NO: 32629
  source 1..1003: mol_type = unassigned DNA

SEQ ID NO: 32692 - DNA, 3249 bp, Homo sapiens; identical to SEQ ID NO: 32627
  source 1..3249: mol_type = unassigned DNA

SEQ ID NO: 32693 - DNA, 3248 bp, Homo sapiens
  source 1..3248: mol_type = unassigned DNA
cccagcttccactgacacgagcctcggcgcggcttccgcttccggcgagtattgtgtgtcgcgccgcggggcgggggcgaggggaggaggaaggagggaggcagcgctccggcggctccgcgccccgcactcccggacccgaagccgggaagattcctttcttgtctgttagaaacgtatgtcaaacgaggatacagtgtctggaactattggttctaagatataagtggaatgagcctggatcaggagaagtatgctgagctagagttgaaggaagcttctctttctaacaagagaaagcagagttaaattatggcagagacaagtctgttagaggctggggcctctgcagcctctacagctgcggctttggagaacttacaggtggaggcgagctgctctgtgtgcctggagtatctgaaggaacctgtcatcattgagtgtgggcacaacttctgcaaagcttgcatcacccgctggtgggaggacctagagagggacttcccttgtcctgtctgtcgaaagacatcccgctaccgcagtctccgacctaatcggcaactaggcagtatggtggaaattgccaagcagctccaggccgtcaagcggaagatccgggatgagagcctctgcccccaacaccatgaggccctcagccttttctgttatgaggaccaggaggctgtatgcttgatatgtgcaatttcccacacccaccgggcccacaccgttgtgccactggacgatgctacacaggagtacaaggaaaaactgcagaagtgtctggagcccctggaacagaagctgcaggagatcactcgctgcaagtcctctgaggagaagaagcctggtgagctcaagagactagtggaaagtcgccgacagcagatcttgagggagtttgaagagcttcataggcggctggatgaagagcagcaggtgttgctttcacgactggaagaagaggaacaggacattctgcagcgactccgagaaaatgctgctcaccttggggacaagcgccgggacctggcccacttggctgccgaggtggagggcaagtgcttacagtcaggcttcgagatgcttaagccagttctttctgccagggaggaatgtgaaaaggtgaagaccatggaggtgacttcagtatccatagagctggaaaagaacttcagcaattttccccgacagtactttgccctaaggaaaatccttaaacagctaattgcggatgtgaccctggaccctgagacagctcatcctaacctagtcctgtcagaggatcgtaagagcgtcaagttcgtggagacaagactccgggatctccctgacacaccaaggcgtttcaccttctacccttgcgtcctggctactgagggtttcacctcaggtcgacactactgggaggtggaggtgggcgacaagacccactgggcagtgggtgtatgccgggactccgtgagccgaaagggcgagttgactccactccctgagactggctactggcgggtgcggctatggaatggggacaaatatgcagccaccaccacaccttttacccctttgcacatcaaggtgaaacccaagcgggtaggcatattcctagactatgaggccggcacactgtctttctacaatgtcacagaccgctctcatatctacaccttcactgatacttttactgagaaactttggcccctcttctacccaggcatccgggctggacggaagaatgctgcaccacttaccatcaggcccccaacagattgggagtgacaggttgggatgtgggaatgactggggtgaggcagggtcaagtgctacgggcctccttcccgtgtcctgctggaacgtcttcgtgtccacctgggtccagtcctgaatcatcttggagaaacaccttggtttctaggatggttttgtgtggagggggaggtaggactgggctggatgagagagcacagctgtgacttcctcctaactgtcagggtggggagctggttcccagaggattgtctaccctgaagtccatcaggttttctgttgcacaaggacgggtcaggaaggaaggagaggcttttccagaaacaaaaaatctgtgagggtctgacttgctcaaaccagaggaggaaacagaaacccctgcacatctttttagggggttctttgacccaggatagtcttgcttcttgaggtagatcacaggggtctgtgtacctctgaattcatgagagatgaatgacagatgctctcatgggtctagatattgaggagtttttctgagggcagagattggacatcaacaaggctagaagggtcagggaagtgggctaaaggaacagattcctagagattaatgaagaggagggaggtttctttggtcttctattccaagggtaaggttgcgattatgggtaagattggccagaggtaggaatgtggggagaaggagaggctgaaaagaaagcagaggagaacccaggtccctgcctcagccttcagcagagttggcttattgcctgcctctataccaataagtcagtcaccttgctcctctccagaggcaaagtggaagagatcctgcaagacacatctatcctttcacagtgttcccaagggaacttggaaaggagagtcaggtattagaggaaagagaagggtatttgtatacaaagccctggccttaaagaatgttacttagtagctactcccaaattgtcagccttcttacctggccaaggtgtccaagccagaaaggaaaaaaggttatggagtctttctcaccctaaggacagggtggaagagggtggtatatagggaagggccagataggcaacttcatttggcttgtgtgcatctggcctggaactggtgttaagccaggcttttgcttgtttgttgccatccctcaccctttgccatttcccttttcagagaatgtaaatgattttcatgttaggccaaaataaacaacttatagggtacatatgttgtcataaaaggtaaaagtgatgcatgccaaaccaaactaaaccaatttggattatctgctattcgggtaatcttcacagaaatgactgagagaagaatctgcagtttactgagggcatttcagttcctcctaccacctcaacaggactttgtccagactctcctcctcttacctttgtgccttgactgtggttctttgtggcaagatactttggttggttaaaataatatggaacaaaggatccactgaagtg

SEQ ID NO: 32694 - DNA, 3338 bp, Homo sapiens
  source 1..3338: mol_type = unassigned DNA
cccagcttccactgacacgagcctcggcgcggcttccgcttccggcgagtattgtgtgtcgcgccgcggggcgggggcgaggggaggaggaaggagggaggcagcgctccggcggctccgcgccccgcactcccggacccgaagccgggaagattcctttcttgtctgttagaaacgtatgtcaaacgaggatacagtgtctggaactattggttctaagatataagtggaatgagcctggatcaggagaagtatgctgagctagagttgaaggaagcttctctttctaacaagagaaagcagagttaaattatggcagagacaagtctgttagaggctggggcctctgcagcctctacagctgcggctttggagaacttacaggtggaggcgagctgctctgtgtgcctggagtatctgaaggaacctgtcatcattgagtgtgggcacaacttctgcaaagcttgcatcacccgctggtgggaggacctagagagggacttcccttgtcctgtctgtcgaaagacatcccgctaccgcagtctccgacctaatcggcaactaggcagtatggtggaaattgccaagcagctccaggccgtcaagcggaagatccgggatgagagcctctgcccccaacaccatgaggccctcagccttttctgttatgaggaccaggaggctgtatgcttgatatgtgcaatttcccacacccaccgggcccacaccgttgtgccactggacgatgctacacaggagtacaaggaaaaactgcagaagtgtctggagcccctggaacagaagctgcaggagatcactcgctgcaagtcctctgaggagaagaagcctggtgagctcaagagactagtggaaagtcgccgacagcagatcttgagggagtttgaagagcttcataggcggctggatgaagagcagcaggtgttgctttcacgactggaagaagaggaacaggacattctgcagcgactccgagaaaatgctgctcaccttggggacaagcgccgggacctggcccacttggctgccgaggtggagggcaagtgcttacagtcaggcttcgagatgcttaagccagttctttctgccagggaaaagaatattcctagaaagttcggaggctcactctcaacgatctgtccacgggatcataaggctctccttggattagtaaaagaaatcaacagatgtgaaaaggtgaagaccatggaggtgacttcagtatccatagagctggaaaagaacttcagcaattttccccgacagtactttgccctaaggaaaatccttaaacagctaattgcggatgtgaccctggaccctgagacagctcatcctaacctagtcctgtcagaggatcgtaagagcgtcaagttcgtggagacaagactccgggatctccctgacacaccaaggcgtttcaccttctacccttgcgtcctggctactgagggtttcacctcaggtcgacactactgggaggtggaggtgggcgacaagacccactgggcagtgggtgtatgccgggactccgtgagccgaaagggcgagttgactccactccctgagactggctactggcgggtgcggctatggaatggggacaaatatgcagccaccaccacaccttttacccctttgcacatcaaggtgaaacccaagcgggtaggcatattcctagactatgaggccggcacactgtctttctacaatgtcacagaccgctctcatatctacaccttcactgatacttttactgagaaactttggcccctcttctacccaggcatccgggctggacggaagaatgctgcaccacttaccatcaggcccccaacagattgggagtgacaggttgggatgtgggaatgactggggtgaggcagggtcaagtgctacgggcctccttcccgtgtcctgctggaacgtcttcgtgtccacctgggtccagtcctgaatcatcttggagaaacaccttggtttctaggatggttttgtgtggagggggaggtaggactgggctggatgagagagcacagctgtgacttcctcctaactgtcagggtggggagctggttcccagaggattgtctaccctgaagtccatcaggttttctgttgcacaaggacgggtcaggaaggaaggagaggcttttccagaaacaaaaaatctgtgagggtctgacttgctcaaaccagaggaggaaacagaaacccctgcacatctttttagggggttctttgacccaggatagtcttgcttcttgaggtagatcacaggggtctgtgtacctctgaattcatgagagatgaatgacagatgctctcatgggtctagatattgaggagtttttctgagggcagagattggacatcaacaaggctagaagggtcagggaagtgggctaaaggaacagattcctagagattaatgaagaggagggaggtttctttggtcttctattccaagggtaaggttgcgattatgggtaagattggccagaggtaggaatgtggggagaaggagaggctgaaaagaaagcagaggagaacccaggtccctgcctcagccttcagcagagttggcttattgcctgcctctataccaataagtcagtcaccttgctcctctccagaggcaaagtggaagagatcctgcaagacacatctatcctttcacagtgttcccaagggaacttggaaaggagagtcaggtattagaggaaagagaagggtatttgtatacaaagccctggccttaaagaatgttacttagtagctactcccaaattgtcagccttcttacctggccaaggtgtccaagccagaaaggaaaaaaggttatggagtctttctcaccctaaggacagggtggaagagggtggtatatagggaagggccagataggcaacttcatttggcttgtgtgcatctggcctggaactggtgttaagccaggcttttgcttgtttgttgccatccctcaccctttgccatttcccttttcagagaatgtaaatgattttcatgttaggccaaaataaacaacttatagggtacatatgttgtcataaaaggtaaaagtgatgcatgccaaaccaaactaaaccaatttggattatctgctattcgggtaatcttcacagaaatgactgagagaagaatctgcagtttactgagggcatttcagttcctcctaccacctcaacaggactttgtccagactctcctcctcttacctttgtgccttgactgtggttctttgtggcaagatactttggttggttaaaataatatggaacaaaggatccactgaagtg

SEQ ID NO: 32695 - DNA, 1548 bp, Homo sapiens; identical to SEQ ID NO: 32677
  source 1..1548: mol_type = unassigned DNA

SEQ ID NO: 32696 - DNA, 3338 bp, Homo sapiens; identical to SEQ ID NO: 32694
  source 1..3338: mol_type = unassigned DNA

SEQ ID NO: 32697 - DNA, 3248 bp, Homo sapiens; identical to SEQ ID NO: 32693
  source 1..3248: mol_type = unassigned DNA

SEQ ID NO: 32698 - DNA, 3338 bp, Homo sapiens; identical to SEQ ID NO: 32620
  source 1..3338: mol_type = unassigned DNA

SEQ ID NO: 32699 - DNA, 3248 bp, Homo sapiens; identical to SEQ ID NO: 32693
  source 1..3248: mol_type = unassigned DNA

SEQ ID NO: 32700 - DNA, 3248 bp, Homo sapiens
  source 1..3248: mol_type = unassigned DNA
cccagcttccactgacacgagcctcggcgcggcttccgcttccggcgagtattgtgtgtcgcgccgcggggcgggggcgaggggaggaggaaggagggaggcagcgctccggcggctccgcgccccgcactcccggacccgaagccgggaagattcctttcttgtctgttagaaacgtatgtcaaacgaggatacagtgtctggaactattggttctaagatataagtggaatgagcctggatcaggagaagtatgctgagctagagttgaaggaagcttctctttctaacaagagaaagcagagttaaattatggcagagacaagtctgttagaggctggggcctctgcagcctctacagctgcggctttggagaacttacaggtggaggcgagctgctctgtgtgcctggagtatctgaaggaacctgtcatcattgagtgtgggcacaacttctgcaaagcttgcatcacccgctggtgggaggacctagagagggacttcccttgtcctgtctgtcgaaagacatcccgctaccgcagtctccgacctaatcggcaactaggcagtatggtggaaattgccaagcagctccaggccgtcaagcggaagatccgggatgagagcctctgcccccaacaccatgaggccctcagccttttctgttatgaggaccaggaggctgtatgcttgatatgtgcaatttcccacacccaccgggcccacaccgttgtgccactggacgacgctacacaggagtacaaggaaaaactgcagaagtgtctggagcccctggaacagaagctgcaggagatcactcgctgcaagtcctctgaggagaagaagcctggtgagctcaagagactagtggaaagtcgccgacagcagatcttgagggagtttgaagagcttcataggcggctggatgaagagcagcaggtgttgctttcacgactggaagaagaggaacaggacattctgcagcgactccgagaaaatgctgctcaccttggggacaagcgccgggacctggcccacttggctgccgaggtggagggcaagtgcttacagtcaggcttcgagatgcttaagccagttctttctgccagggaggaatgtgaaaaggtgaagaccatggaggtgacttcagtatccatagagctggaaaagaacttcagcaattttccccgacagtactttgccctaaggaaaatccttaaacagctaattgcggatgtgaccctggaccccgagacagctcatcctaacctagtcctgtcagaggatcgtaagagcgtcaagttcgtggagacaagactccgggatctccctgacacaccaaggcgtttcaccttctacccttgcgtcctggctactgagggtttcacctcaggtcgacactactgggaggtggaggtgggcgacaagacccactgggcagtgggtgtatgccgggactccgtgagccgaaagggcgagttgactccactccctgagactggctactggcgggtgcggctatggaatggggacaaatatgcagccaccaccacaccttttacccctttgcacatcaaggtgaaacccaagcgggtaggcatattcctagactatgaggccggcacactgtctttctacaatgtcacagaccgctctcatatctacaccttcactgatacttttactgagaaactttggcccctcttctacccaggcatccgggctggacggaagaatgctgcaccacttaccatcaggcccccaacagattgggagtgacaggttgggatgtgggaatgactggggtgaggcagggtcaagtgctacgggcctccttcccgtgtcctgctggaacgtcttcgtgtccacctgggtccagtcctgaatcatcttggagaaacaccttggtttctaggatggttttgtgtggagggggaggtaggactgggctggatgagagagcacagctgtgacttcctcctaactgtcagggtggggagctggttcccagaggattgtctaccctgaagtccatcaggttttctgttgcacaaggacgggtcaggaaggaaggagaggcttttccagaaacaaaaaatctgtgagggtctgacttgctcaaaccagaggaggaaacagaaacccctgcacatctttttagggggttctttgacccaggatagtcttgcttcttgaggtagatcacaggggtctgtgtacctctgaattcatgagagatgaatgacagatgctctcatgggtctagatattgaggagtttttctgagggcagagattggacatcaacaaggctagaagggtcagggaagtgggctaaaggaacagattcctagagattaatgaagaggagggaggtttctttggtcttctattccaagggtaaggttgcgattatgggtaagattggccagaggtaggaatgtggggagaaggagaggctgaaaagaaagcagaggagaacccaggtccctgcctcagccttcagcagagttggcttattgcctgcctctataccaataagtcagtcaccttgctcctctccagaggcaaagtggaagagatcctgcaagacacatctatcctttcacagtgttcccaagggaacttggaaaggagagtcaggtattagaggaaagagaagggtatttgtatacaaagccctggccttaaagaatgttacttagtagctactcccaaattgtcagccttcttacctggccaaggtgtccaagccagaaaggaaaaaaggttatggagtctttctcaccctaaggacagggtggaagagggtggtatatagggaagggccagataggcaacttcatttggcttgtgtgcatctggcctggaactggtgttaagccaggcttttgcttgtttgttgccatccctcaccctttgccatttcccttttcagagaatgtaaatgattttcatgttaggccaaaataaacaacttatagggtacatatgttgtcataaaaggtaaaagtgatgcatgccaaaccaaactaaaccaatttggattatctgctattcgggtaatcttcacagaaatgactgagagaagaatctgcagtttactgagggcatttcagttcctcctaccacctcaacaggactttgtccagactctcctcctcttacctttgtgccttgactgtggttctttgtggcaagatactttggttggttaaaataatatggaacaaaggatccactgaagtg

SEQ ID NO: 32701 - DNA, 3248 bp, Homo sapiens
  source 1..3248: mol_type = unassigned DNA
cccagcttccactgacacgagcctcggcgcggcttccgcttccggcgagtattgtgtgtcgcgccgcggggcgggggcgaggggaggaggaaggagggaggcagcgctccggcggctccgcgccccgcactcccggacccgaagccgggaagattcctttcttgtctgttagaaacgtatgtcaaacgaggatacagtgtctggaactattggttctaagatataagtggaatgagcctggatcaggagaagtatgctgagctagagttgaaggaagcttctctttctaacaagagaaagcagagttaaattatggcagagacaagtctgttagaggctggggcctctgcagcctctacagctgcggctttggagaacttacaggtggaggcgagctgctctgtgtgcctggagtatctgaaggaacctgtcatcattgagtgtgggcacaacttctgcaaagcttgcatcacccgctggtgggaggacctagagagggacttcccttgtcctgtctgtcgaaagacatcccgctaccgcagtctccgacctaatcggcaactaggcagtatggtggaaattgccaagcagctccaggccgtcaagcggaagatccgggatgagagcctctgcccccaacaccatgaggccctcagccttttctgttatgaggaccaggaggctgtatgcttgatatgtgcaatttcccacacccaccgggctcacaccgttgtgccactggacgatgctacacaggagtacaaggaaaaactgcagaagtgtctggagcccctggaacagaagctgcaggagatcactcgctgcaagtcctctgaggagaagaagcctggtgagctcaagagactagtggaaagtcgccgacagcagatcttgagggagtttgaagagcttcataggcggctggatgaagagcagcaggtgttgctttcacgactggaagaagaggaacaggacattctgcagcgactccgagaaaatgctgctcaccttggggacaagcgccgggacctggcccacttggctgccgaggtggagggcaagtgcttacagtcaggcttcgagatgcttaagccagttctttctgccagggaggaatgtgaaaaggtgaagaccatggaggtgacttcagtatccatagagctggaaaagaacttcagcaattttccccgacagtactttgccctaaggaaaatccttaaacagctaattgcggatgtgaccctggaccctgagacagctcatcctaacctagtcctgtcagaggatcgtaagagcgtcaagttcgtggagacaagactccgggatctccctgacacaccaaggcgtttcaccttctacccttgcgtcctggctactgagggtttcacctcaggtcgacactactgggaggtggaggtgggcgacaagacccactgggcagtgggtgtatgccgggactccgtgagccgaaagggcgagttgactccactccctgagactggctactggcgggtgcggctatggaatggggacaaatatgcagccaccaccacaccttttacccctttgcacatcaaggtgaaacccaagcgggtaggcatattcctagactatgaggccggcacactgtctttctacaatgtcacagaccgctctcatatctacaccttcactgatacttttactgagaaactttggcccctcttctacccaggcatccgggctggacggaagaatgctgcaccacttaccatcaggcccccaacagattgggagtgacaggttgggatgtgggaatgactggggtgaggcagggtcaagtgctacgggcctccttcccgtgtcctgctggaacgtcttcgtgtccacctgggtccagtcctgaatcatcttggagaaacaccttggtttctaggatggttttgtgtggagggggaggtaggactgggctggatgagagagcacagctgtgacttcctcctaactgtcagggtggggagctggttcccagaggattgtctaccctgaagtccatcaggttttctgttgcacaaggacgggtcaggaaggaaggagaggcttttccagaaacaaaaaatctgtgagggtctgacttgctcaaaccagaggaggaaacagaaacccctgcacatctttttagggggttctttgacccaggatagtcttgcttcttgaggtagatcacaggggtctgtgtacctctgaattcatgagagatgaatgacagatgctctcatgggtctagatattgaggagtttttctgagggcagagattggacatcaacaaggctagaagggtcagggaagtgggctaaaggaacagattcctagagattaatgaagaggagggaggtttctttggtcttctattccaagggtaaggttgcgattatgggtaagattggccagaggtaggaatgtggggagaaggagaggctgaaaagaaagcagaggagaacccaggtccctgcctcagccttcagcagagttggcttattgcctgcctctataccaataagtcagtcaccttgctcctctccagaggcaaagtggaagagatcctgcaagacacatctatcctttcacagtgttcccaagggaacttggaaaggagagtcaggtattagaggaaagagaagggtatttgtatacaaagccctggccttaaagaatgttacttagtagctactcccaaattgtcagccttcttacctggccaaggtgtccaagccagaaaggaaaaaaggttatggagtctttctcaccctaaggacagggtggaagagggtggtatatagggaagggccagataggcaacttcatttggcttgtgtgcatctggcctggaactggtgttaagccaggcttttgcttgtttgttgccatccctcaccctttgccatttcccttttcagagaatgtaaatgattttcatgttaggccaaaataaacaacttatagggtacatatgttgtcataaaaggtaaaagtgatgcatgccaaaccaaactaaaccaatttggattatctgctattcgggtaatcttcacagaaatgactgagagaagaatctgcagtttactgagggcatttcagttcctcctaccacctcaacaggactttgtccagactctcctcctcttacctttgtgccttgactgtggttctttgtggcaagatactttggttggttaaaataatatggaacaaaggatccactgaagtg

SEQ ID NO: 32702 - DNA, 3338 bp, Homo sapiens; identical to SEQ ID NO: 32620
  source 1..3338: mol_type = unassigned DNA

SEQ ID NO: 32703 - DNA, 1548 bp, Homo sapiens
  source 1..1548: mol_type = unassigned DNA
cccagcttccactgacacgagcctcggcgcggcttccgcttccggcgagtattgtgtgtcgcgccgcggggcgggggcgaggggaggaggaaggagggaggcagcgctccggcggctccgcgccccgcactcccggacccgaagccgggaagattcctttcttgtctgttagaaacgtatgtcaaacgaggatacagtgtctggaactattggttctaagatataagtggaatgagcctggatcaggagaagtatgctgagctagagttgaaggaagcttctctttctaacaagagaaagcagagttaaattatggcagagacaagtctgttagaggctggggcctctgcagcctctacagctgcggctttggagaacttacaggtggaggcgagctgctctgtgtgcctggagtatctgaaggaacctgtcatcattgagtgtgggcacaacttctgcaaagcttgcatcacccgctggtgggaggacctagagagggacttcccttgtcctgtctgtcgaaagacatcccgctaccgcagtctccgacctaatcggcaactaggcagtatggtggaaattgccaagcagctccaggccgtcaagcggaagatccgggatgagagcctctgcccccaacaccatgaggccctcagccttttctgttatgaggaccaggaggctgtatgcttgatatgtgcaatttcccacacccaccgggcccacaccgttgtgccactggacgacgctacacaggagtacaaggaaaaactgcagaagtgtctggagcccctggaacagaagctgcaggagatcactcgctgcaagtcctctgaggagaagaagcctggtgagctcaagagactagtggaaagtcgccgacagcagatcttgagggagtttgaagagcttcataggcggctggatgaagagcagcaggtgttgctttcacgactggaagaagaggaacaggacattctgcagcgactccgagaaaatgctgctcaccttggggacaagcgccgggacctggcccacttggctgccgaggtggagggcaagtgcttacagtcaggcttcgagatgcttaagccagttctttctgccagggaggaatgtgaaaaggtgaagaccatggaggtgacttcagtatccatagagctggaaaagaacttcagcaattttccccgacagtactttgccctaaggaaaatccttaaacagctaattgcggatgtgaccctggaccccgagacagctcatcctaacctagtcctgtcagaggatcgtaagagcgtcaagttcgtggagacaagactccgggatctccctgacacaccaaggcgtttcaccttctacccttgcgtcctggctactgagggtttcacctcaggtcgacactactgggaggtggaggtgggcgacaagacccactgggcagtgggtgtatgccgggactccgtgagccgaaagggcgggtgcggctatggaatggggacaaatatgcagccaccaccacaccttttacccctttgcacatcaaggtga

SEQ ID NO: 32704 - DNA, 3338 bp, Homo sapiens; identical to SEQ ID NO: 32694
  source 1..3338: mol_type = unassigned DNA

SEQ ID NO: 32705 - DNA, 1548 bp, Homo sapiens; identical to SEQ ID NO: 32677
  source 1..1548: mol_type = unassigned DNA

SEQ ID NO: 32706 - DNA, 1548 bp, Homo sapiens; identical to SEQ ID NO: 32677
  source 1..1548: mol_type = unassigned DNA

SEQ ID NO: 32707 - DNA, 3338 bp, Homo sapiens; identical to SEQ ID NO: 32620
  source 1..3338: mol_type = unassigned DNA

SEQ ID NO: 32708 - DNA, 3338 bp, Homo sapiens
  source 1..3338: mol_type = unassigned DNA
cccagcttccactgacacgagcctcggcgcggcttccgcttccggcgagtattgtgtgtcgcgccgcggggcgggggcgaggggaggaggaaggagggaggcagcgctccggcggctccgcgccccgcactcccggacccgaagccgggaagattcctttcttgtctgttagaaacgtatgtcaaacgaggatacagtgtctggaactattggttctaagatataagtggaatgagcctggatcaggagaagtatgctgagctagagttgaaggaagcttctctttctaacaagagaaagcagagttaaattatggcagagacaagtctgttagaggctggggcctctgcagcctctacagctgcggctttggagaacttacaggtggaggcgagctgctctgtgtgcctggagtatctgaaggaacctgtcatcattgagtgtgggcacaacttctgcaaagcttgcatcacccgctggtgggaggacctagagagggacttcccttgtcctgtctgtcgaaagacatcccgctaccgcagtctccgacctaatcggcaactaggcagtatggtggaaattgccaagcagctccaggccgtcaagcggaagatccgggatgagagcctctgcccccaacaccatgaggccctcagccttttctgttatgaggaccaggaggctgtatgcttgatatgtgcaatttcccacacccaccgggctcacaccgttgtgccactggacgatgctacacaggagtacaaggaaaaactgcagaagtgtctggagcccctggaacagaagctgcaggagatcactcgctgcaagtcctctgaggagaagaagcctggtgagctcaagagactagtggaaagtcgccgacagcagatcttgagggagtttgaagagcttcataggcggctggatgaagagcagcaggtgttgctttcacgactggaagaagaggaacaggacattctgcagcgactccgagaaaatgctgctcaccttggggacaagcgccgggacctggcccacttggctgccgaggtggagggcaagtgcttacagtcaggcttcgagatgcttaagccagttctttctgccagggaaaagaatattcctagaaagttcggaggctcactctcaacgatctgtccacgggatcataaggctctccttggattagtaaaagaaatcaacagatgtgaaaaggtgaagaccatggaggtgacttcagtatccatagagctggaaaagaacttcagcaattttccccgacagtactttgccctaaggaaaatccttaaacagctaattgcggatgtgaccctggaccctgagacagctcatcctaacctagtcctgtcagaggatcgtaagagcgtcaagttcgtggagacaagactccgggatctccctgacacaccaaggcgtttcaccttctacccttgcgtcctggctactgagggtttcacctcaggtcgacactactgggaggtggaggtgggcgacaagacccactgggcagtgggtgtatgccgggactccgtgagccgaaagggcgagttgactccactccctgagactggctactggcgggtgcggctatggaatggggacaaatatgcagccaccaccacaccttttacccctttgcacatcaaggtgaaacccaagcgggtaggcatattcctagactatgaggccggcacactgtctttctacaatgtcacagaccgctctcatatctacaccttcactgatacttttactgagaaactttggcccctcttctacccaggcatccgggctggacggaagaatgctgcaccacttaccatcaggcccccaacagattgggagtgacaggttgggatgtgggaatgactggggtgaggcagggtcaagtgctacgggcctccttcccgtgtcctgctggaacgtcttcgtgtccacctgggtccagtcctgaatcatcttggagaaacaccttggtttctaggatggttttgtgtggagggggaggtaggactgggctggatgagagagcacagctgtgacttcctcctaactgtcagggtggggagctggttcccagaggattgtctaccctgaagtccatcaggttttctgttgcacaaggacgggtcaggaaggaaggagaggcttttccagaaacaaaaaatctgtgagggtctgacttgctcaaaccagaggaggaaacagaaacccctgcacatctttttagggggttctttgacccaggatagtcttgcttcttgaggtagatcacaggggtctgtgtacctctgaattcatgagagatgaatgacagatgctctcatgggtctagatattgaggagtttttctgagggcagagattggacatcaacaaggctagaagggtcagggaagtgggctaaaggaacagattcctagagattaatgaagaggagggaggtttctttggtcttctattccaagggtaaggttgcgattatgggtaagattggccagaggtaggaatgtggggagaaggagaggctgaaaagaaagcagaggagaacccaggtccctgcctcagccttcagcagagttggcttattgcctgcctctataccaataagtcagtcaccttgctcctctccagaggcaaagtggaagagatcctgcaagacacatctatcctttcacagtgttcccaagggaacttggaaaggagagtcaggtattagaggaaagagaagggtatttgtatacaaagccctggccttaaagaatgttacttagtagctactcccaaattgtcagccttcttacctggccaaggtgtccaagccagaaaggaaaaaaggttatggagtctttctcaccctaaggacagggtggaagagggtggtatatagggaagggccagataggcaacttcatttggcttgtgtgcatctggcctggaactggtgttaagccaggcttttgcttgtttgttgccatccctcaccctttgccatttcccttttcagagaatgtaaatgattttcatgttaggccaaaataaacaacttatagggtacatatgttgtcataaaaggtaaaagtgatgcatgccaaaccaaactaaaccaatttggattatctgctattcgggtaatcttcacagaaatgactgagagaagaatctgcagtttactgagggcatttcagttcctcctaccacctcaacaggactttgtccagactctcctcctcttacctttgtgccttgactgtggttctttgtggcaagatactttggttggttaaaataatatggaacaaaggatccactgaagtg

SEQ ID NO: 32709 - DNA, 3338 bp, Homo sapiens; identical to SEQ ID NO: 32694
  source 1..3338: mol_type = unassigned DNA

SEQ ID NO: 32710 - DNA, 3338 bp, Homo sapiens
  source 1..3338: mol_type = unassigned DNA
cccagcttccactgacacgagcctcggcgcggcttccgcttccggcgagtattgtgtgtcgcgccgcggggcgggggcgaggggaggaggaaggagggaggcagcgctccggcggctccgcgccccgcactcccggacccgaagccgggaagattcctttcttgtctgttagaaacgtatgtcaaacgaggatacagtgtctggaactattggttctaagatataagtggaatgagcctggatcaggagaagtatgctgagctagagttgaaggaagcttctctttctaacaagagaaagcagagttaaattatggcagagacaagtctgttagaggctggggcctctgcagcctctacagctgcggctttggagaacttacaggtggaggcgagctgctctgtgtgcctggagtatctgaaggaacctgtcatcattgagtgtgggcacaacttctgcaaagcttgcatcacccgctggtgggaggacctagagagggacttcccttgtcctgtctgtcgaaagacatcccgctaccgcagtctccgacctaatcggcaactaggcagtatggtggaaattgccaagcagctccaggccgtcaagcggaagatccgggatgagagcctctgcccccaacaccatgaggccctcagccttttctgttatgaggaccaggaggctgtatgcttgatatgtgcaatttcccacacccaccgggctcacaccgttgtgccactggacgatgctacacaggagtacaaggaaaaactgcagaagtgtctggagcccctggaacagaagctgcaggagatcactcgctgcaagtcctctgaggagaagaagcctggtgagctcaagagactagtggaaagtcgccgacagcagatcttgagggagtttgaagagcttcataggcggctggatgaagagcagcaggtgttgctttcacgactggaagaagaggaacaggacattctgcagcgactccgagaaaatgctgctcaccttggggacaagcgccgggacctggcccacttggctgccgaggtggagggcaagtgcttacagtcaggcttcgagatgcttaaggatgtcaaaagtaccctggaaaagaatattcctagaaagttcggaggctcactctcaacgatctgtccacgggatcataaggctctccttggattagtaaaagaaatcaacagatgtgaaaaggtgaagaccatggaggtgacttcagtatccatagagctggaaaagaacttcagcaattttccccgacagtactttgccctaaggaaaatccttaaacagctaattgcggatgtgaccctggaccctgagacagctcatcctaacctagtcctgtcagaggatcgtaagagcgtcaagttcgtggagacaagactccgggatctccctgacacaccaaggcgtttcaccttctacccttgcgtcctggctactgagggtttcacctcaggtcgacactactgggaggtggaggtgggcgacaagacccactgggcagtgggtgtatgccgggactccgtgagccgaaagggcgagttgactccactccctgagactggctactggcgggtgcggctatggaatggggacaaatatgcagccaccaccacaccttttacccctttgcacatcaaggtgaaacccaagcgggtaggcatattcctagactatgaggccggcacactgtctttctacaatgtcacagaccgctctcatatctacaccttcactgatacttttactgagaaactttggcccctcttctacccaggcatccgggctggacggaagaatgctgcaccacttaccatcaggcccccaacagattgggagtgacaggttgggatgtgggaatgactggggtgaggcagggtcaagtgctacgggcctccttcccgtgtcctgctggaacgtcttcgtgtccacctgggtccagtcctgaatcatcttggagaaacaccttggtttctaggatggttttgtgtggagggggaggtaggactgggctggatgagagagcacagctgtgacttcctcctaactgtcagggtggggagctggttcccagaggattgtctaccctgaagtccatcaggttttctgttgcacaaggacgggtcaggaaggaaggagaggcttttccagaaacaaaaaatctgtgagggtctgacttgctcaaaccagaggaggaaacagaaacccctgcacatctttttagggggttctttgacccaggatagtcttgcttcttgaggtagatcacaggggtctgtgtacctctgaattcatgagagatgaatgacagatgctctcatgggtctagatattgaggagtttttctgagggcagagattggacatcaacaaggctagaagggtcagggaagtgggctaaaggaacagattcctagagattaatgaagaggagggaggtttctttggtcttctattccaagggtaaggttgcgattatgggtaagattggccagaggtaggaatgtggggagaaggagaggctgaaaagaaagcagaggagaacccaggtccctgcctcagccttcagcagagttggcttattgcctgcctctataccaataagtcagtcaccttgctcctctccagaggcaaagtggaagagatcctgcaagacacatctatcctttcacagtgttcccaagggaacttggaaaggagagtcaggtattagaggaaagagaagggtatttgtatacaaagccctggccttaaagaatgttacttagtagctactcccaaattgtcagccttcttacctggccaaggtgtccaagccagaaaggaaaaaaggttatggagtctttctcaccctaaggacagggtggaagagggtggtatatagggaagggccagataggcaacttcatttggcttgtgtgcatctggcctggaactggtgttaagccaggcttttgcttgtttgttgccatccctcaccctttgccatttcccttttcagagaatgtaaatgattttcatgttaggccaaaataaacaacttatagggtacatatgttgtcataaaaggtaaaagtgatgcatgccaaaccaaactaaaccaatttggattatctgctattcgggtaatcttcacagaaatgactgagagaagaatctgcagtttactgagggcatttcagttcctcctaccacctcaacaggactttgtccagactctcctcctcttacctttgtgccttgactgtggttctttgtggcaagatactttggttggttaaaataatatggaacaaaggatccactgaagtg

SEQ ID NO: 32711 - DNA, 3338 bp, Homo sapiens; identical to SEQ ID NO: 32694
  source 1..3338: mol_type = unassigned DNA

SEQ ID NO: 32712 - DNA, 1824 bp, Homo sapiens
  source 1..1824: mol_type = unassigned DNA
cccagcttccactgacacgagcctcggcgcggcttccgcttccggcgagtattgtgtgtcgcgccgcggggcgggggcgaggggaggaggaaggagggaggcagcgctccggcggctccgcgccccgcactcccggacccgaagccgggaagattcctttcttgtctgttagaaacgtatgtcaaacgaggatacagtgtctggaactattggttctaagatataagtggaatgagcctggatcaggagaagtatgctgagctagagttgaaggaagcttctctttctaacaagagaaagcagagttaaattatggcagagacaagtctgttagaggctggggcctctgcagcctctacagctgcggctttggagaacttacaggtggaggcgagctgctctgtgtgcctggagtatctgaaggaacctgtcatcattgagtgtgggcacaacttctgcaaagcttgcatcacccgctggtgggaggacctagagagggacttcccttgtcctgtctgtcgaaagacatcccgctaccgcagtctccgacctaatcggcaactaggcagtatggtggaaattgccaagcagctccaggccgtcaagcggaagatccgggatgagagcctctgcccccaacaccatgaggccctcagccttttctgttatgaggaccaggaggctgtatgcttgatatgtgcaatttcccacacccaccgggcccacaccgttgtgccactggacgatgctacacaggagtacaaggaaaaactgcagaagtgtctggagcccctggaacagaagctgcaggagatcactcgctgcaagtcctctgaggagaagaagcctggtgagctcaagagactagtggaaagtcgccgacagcagatcttgagggagtttgaagagcttcataggcggctggatgaagagcagcaggtgttgctttcacgactggaagaagaggaacaggacattctgcagcgactccgagaaaatgctgctcaccttggggacaagcgccgggacctggcccacttggctgccgaggtggagggcaagtgcttacagtcaggcttcgagatgcttaagccagttctttctgccagggaggaatgtgaaaaggtgaagaccatggaggtgacttcagtatccatagagctggaaaagaacttcagcaattttccccgacagtactttgccctaaggaaaatccttaaacagctaattgcggatgtgaccctggaccctgagacagctcatcctaacctagtcctgtcagaggatcgtaagagcgtcaagttcgtggagacaagactccgggatctccctgacacaccaaggcgtttcaccttctacccttgcgtcctggctactgagggtttcacctcaggtcgacactactgggaggtggaggccgcccattgtgtccttgcccaggaccccgagaaccaggcgctggcgaggttttactgctacactgagaggaccattgcgaagcggctcgtcttgcggcgggatccctcggtgaagaggactctctgtcgaggctgctcttccctcctcgtcccgggcctcacctgcacccaccgccagagacgctgcaggggacagcgctggaccgtacagacctgcctaacatgccagcgcagccaacgcttcctcaatgatcccgggcatttactctggggagacaggcctgaggcccagctcgggagccaagcagattccaaaccactacaacccttgccaaacacagcccactccatttcagaccgccttcctgaggagaaaatgcagactcagggttccagtaaccagtga

SEQ ID NO: 32713 - DNA, 1824 bp, Homo sapiens
  source 1..1824: mol_type = unassigned DNA
cccagcttccactgacacgagcctcggcgcggcttccgcttccggcgagtattgtgtgtcgcgccgcggggcgggggcgaggggaggaggaaggagggaggcagcgctccggcggctccgcgccccgcactcccggacccgaagccgggaagattcctttcttgtctgttagaaacgtatgtcaaacgaggatacagtgtctggaactattggttctaagatataagtggaatgagcctggatcaggagaagtatgctgagctagagttgaaggaagcttctctttctaacaagagaaagcagagttaaattatggcagagacaagtctgttagaggctggggcctctgcagcctctacagctgcggctttggagaacttacaggtggaggcgagctgctctgtgtgcctggagtatctgaaggaacctgtcatcattgagtgtgggcacaacttctgcaaagcttgcatcacccgctggtgggaggacctagagagggacttcccttgtcctgtctgtcgaaagacatcccgctaccgcagtctccgacctaatcggcaactaggcagtatggtggaaattgccaagcagctccaggccgtcaagcggaagatccgggatgagagcctctgcccccaacaccatgaggccctcagccttttctgttatgaggaccaggaggctgtatgcttgatatgtgcaatttcccacacccaccgggctcacaccgttgtgccactggacgatgctacacaggagtacaaggaaaaactgcagaagtgtctggagcccctggaacagaagctgcaggagatcactcgctgcaagtcctctgaggagaagaagcctggtgagctcaagagactagtggaaagtcgccgacagcagatcttgagggagtttgaagagcttcataggcggctggatgaagagcagcaggtgttgctttcacgactggaagaagaggaacaggacattctgcagcgactccgagaaaatgctgctcaccttggggacaagcgccgggacctggcccacttggctgccgaggtggagggcaagtgcttacagtcaggcttcgagatgcttaagccagttctttctgccagggaggaatgtgaaaaggtgaagaccatggaggtgacttcagtatccatagagctggaaaagaacttcagcaattttccccgacagtactttgccctaaggaaaatccttaaacagctaattgcggatgtgaccctggaccctgagacagctcatcctaacctagtcctgtcagaggatcgtaagagcgtcaagttcgtggagacaagactccgggatctccctgacacaccaaggcgtttcaccttctacccttgcgtcctggctactgagggtttcacctcaggtcgacactactgggaggtggaggccgcccattgtgtccttgcccaggaccccgagaaccaggcgctggcgaggttttactgctacactgagaggaccattgcgaagcggctcgtcttgcggcgggatccctcggtgaagaggactctctgtcgaggctgctcttccctcctcgtcccgggcctcacctgcacccaccgccagagacgctgcaggggacagcgctggaccgtacagacctgcctaacatgccagcgcagccaacgcttcctcaatgatcccgggcatttactctggggagacaggcctgaggcccagctcgggagccaagcagattccaaaccactacaacccttgccaaacacagcccactccatttcagaccgccttcctgaggagaaaatgcagactcagggttccagtaaccagtga

SEQ ID NO: 32714 - DNA, 1548 bp, Homo sapiens
  source 1..1548: mol_type = unassigned DNA
cccagcttccactgacacgagcctcggcgcggcttccgcttccggcgagtattgtgtgtcgcgccgcggggcgggggcgaggggaggaggaaggagggaggcagcgctccggcggctccgcgccccgcactcccggacccgaagccgggaagattcctttcttgtctgttagaaacgtatgtcaaacgaggatacagtgtctggaactattggttctaagatataagtggaatgagcctggatcaggagaagtatgctgagctagagttgaaggaagcttctctttctaacaagagaaagcagagttaaattatggcagagacaagtctgttagaggctggggcctctgcagcctctacagctgcggctttggagaacttacaggtggaggcgagctgctctgtgtgcctggagtatctgaaggaacctgtcatcattgagtgtgggcacaacttctgcaaagcttgcatcacccgctggtgggaggacctagagagggacttcccttgtcctgtctgtcgaaagacatcccgctaccgcagtctccgacctaatcggcaactaggcagtatggtggaaattgccaagcagctccaggccgtcaagcggaagatccgggatgagagcctctgcccccaacaccatgaggccctcagccttttctgttatgaggaccaggaggctgtatgcttgatatgtgcaatttcccacacccaccgggctcacaccgttgtgccactggacgatgctacacaggagtacaaggaaaaactgcagaagtgtctggagcccctggaacagaagctgcaggagatcactcgctgcaagtcctctgaggagaagaagcctggtgagctcaagagactagtggaaagtcgccgacagcagatcttgagggagtttgaagagcttcataggcggctggatgaagagcagcaggtgttgctttcacgactggaagaagaggaacaggacattctgcagcgactccgagaaaatgctgctcaccttggggacaagcgccgggacctggcccacttggctgccgaggtggagggcaagtgcttacagtcaggcttcgagatgcttaagccagttctttctgccagggaggaatgtgaaaaggtgaagaccatggaggtgacttcagtatccatagagctggaaaagaacttcagcaattttccccgacagtactttgccctaaggaaaatccttaaacagctaattgcggatgtgaccctggaccctgagacagctcatcctaacctagtcctgtcagaggatcgtaagagcgtcaagttcgtggagacaagactccgggatctccctgacacaccaaggcgtttcaccttctacccttgcgtcctggctactgagggtttcacctcaggtcgacactactgggaggtggaggtgggcgacaagacccactgggcagtgggtgtatgccgggactccgtgagccgaaagggcgggtgcggctatggaatggggacaaatatgcagccaccaccacaccttttacccctttgcacatcaaggtga

SEQ ID NO: 32715 - DNA, 1824 bp, Homo sapiens; identical to SEQ ID NO: 32712
  source 1..1824: mol_type = unassigned DNA

SEQ ID NO: 32716 - DNA, 3338 bp, Homo sapiens
  source 1..3338: mol_type = unassigned DNA
cccagcttccactgacacgagcctcggcgcggcttccgcttccggcgagtattgtgtgtcgcgccgcggggcgggggcgaggggaggaggaaggagggaggcagcgctccggcggctccgcgccccgcactcccggacccgaagccgggaagattcctttcttgtctgttagaaacgtatgtcaaacgaggatacagtgtctggaactattggttctaagatataagtggaatgagcctggatcaggagaagtatgctgagctagagttgaaggaagcttctctttctaacaagagaaagcagagttaaattatggcagagacaagtctgttagaggctggggcctctgcagcctctacagctgcggctttggagaacttacaggtggaggcgagctgctctgtgtgcctggagtatctgaaggaacctgtcatcattgagtgtgggcacaacttctgcaaagcttgcatcacccgctggtgggaggacctagagagggacttcccttgtcctgtctgtcgaaagacatcccgctaccgcagtctccgacctaatcggcaactaggcagtatggtggaaattgccaagcagctccaggccgtcaagcggaagatccgggatgagagcctctgcccccaacaccatgaggccctcagccttttctgttatgaggaccaggaggctgtatgcttgatatgtgcaatttcccacacccaccgggcccacaccgttgtgccactggacgacgctacacaggagtacaaggaaaaactgcagaagtgtctggagcccctggaacagaagctgcaggagatcactcgctgcaagtcctctgaggagaagaagcctggtgagctcaagagactagtggaaagtcgccgacagcagatcttgagggagtttgaagagcttcataggcggctggatgaagagcagcaggtgttgctttcacgactggaagaagaggaacaggacattctgcagcgactccgagaaaatgctgctcaccttggggacaagcgccgggacctggcccacttggctgccgaggtggagggcaagtgcttacagtcaggcttcgagatgcttaagccagttctttctgccagggaaaagaatattcctagaaagttcggaggctcactctcaacgatctgtccacgggatcataaggctctccttggattagtaaaagaaatcaacagatgtgaaaaggtgaagaccatggaggtgacttcagtatccatagagctggaaaagaacttcagcaattttccccgacagtactttgccctaaggaaaatccttaaacagctaattgcggatgtgaccctggaccccgagacagctcatcctaacctagtcctgtcagaggatcgtaagagcgtcaagttcgtggagacaagactccgggatctccctgacacaccaaggcgtttcaccttctacccttgcgtcctggctactgagggtttcacctcaggtcgacactactgggaggtggaggtgggcgacaagacccactgggcagtgggtgtatgccgggactccgtgagccgaaagggcgagttgactccactccctgagactggctactggcgggtgcggctatggaatggggacaaatatgcagccaccaccacaccttttacccctttgcacatcaaggtgaaacccaagcgggtaggcatattcctagactatgaggccggcacactgtctttctacaatgtcacagaccgctctcatatctacaccttcactgatacttttactgagaaactttggcccctcttctacccaggcatccgggctggacggaagaatgctgcaccacttaccatcaggcccccaacagattgggagtgacaggttgggatgtgggaatgactggggtgaggcagggtcaagtgctacgggcctccttcccgtgtcctgctggaacgtcttcgtgtccacctgggtccagtcctgaatcatcttggagaaacaccttggtttctaggatggttttgtgtggagggggaggtaggactgggctggatgagagagcacagctgtgacttcctcctaactgtcagggtggggagctggttcccagaggattgtctaccctgaagtccatcaggttttctgttgcacaaggacgggtcaggaaggaaggagaggcttttccagaaacaaaaaatctgtgagggtctgacttgctcaaaccagaggaggaaacagaaacccctgcacatctttttagggggttctttgacccaggatagtcttgcttcttgaggtagatcacaggggtctgtgtacctctgaattcatgagagatgaatgacagatgctctcatgggtctagatattgaggagtttttctgagggcagagattggacatcaacaaggctagaagggtcagggaagtgggctaaaggaacagattcctagagattaatgaagaggagggaggtttctttggtcttctattccaagggtaaggttgcgattatgggtaagattggccagaggtaggaatgtggggagaaggagaggctgaaaagaaagcagaggagaacccaggtccctgcctcagccttcagcagagttggcttattgcctgcctctataccaataagtcagtcaccttgctcctctccagaggcaaagtggaagagatcctgcaagacacatctatcctttcacagtgttcccaagggaacttggaaaggagagtcaggtattagaggaaagagaagggtatttgtatacaaagccctggccttaaagaatgttacttagtagctactcccaaattgtcagccttcttacctggccaaggtgtccaagccagaaaggaaaaaaggttatggagtctttctcaccctaaggacagggtggaagagggtggtatatagggaagggccagataggcaacttcatttggcttgtgtgcatctggcctggaactggtgttaagccaggcttttgcttgtttgttgccatccctcaccctttgccatttcccttttcagagaatgtaaatgattttcatgttaggccaaaataaacaacttatagggtacatatgttgtcataaaaggtaaaagtgatgcatgccaaaccaaactaaaccaatttggattatctgctattcgggtaatcttcacagaaatgactgagagaagaatctgcagtttactgagggcatttcagttcctcctaccacctcaacaggactttgtccagactctcctcctcttacctttgtgccttgactgtggttctttgtggcaagatactttggttggttaaaataatatggaacaaaggatccactgaagtg

SEQ ID NO: 32717 - DNA, 1824 bp, Homo sapiens
  source 1..1824: mol_type = unassigned DNA
cccagcttccactgacacgagcctcggcgcggcttccgcttccggcgagtattgtgtgtcgcgccgcggggcgggggcgaggggaggaggaaggagggaggcagcgctccggcggctccgcgccccgcactcccggacccgaagccgggaagattcctttcttgtctgttagaaacgtatgtcaaacgaggatacagtgtctggaactattggttctaagatataagtggaatgagcctggatcaggagaagtatgctgagctagagttgaaggaagcttctctttctaacaagagaaagcagagttaaattatggcagagacaagtctgttagaggctggggcctctgcagcctctacagctgcggctttggagaacttacaggtggaggcgagctgctctgtgtgcctggagtatctgaaggaacctgtcatcattgagtgtgggcacaacttctgcaaagcttgcatcacccgctggtgggaggacctagagagggacttcccttgtcctgtctgtcgaaagacatcccgctaccgcagtctccgacctaatcggcaactaggcagtatggtggaaattgccaagcagctccaggccgtcaagcggaagatccgggatgagagcctctgcccccaacaccatgaggccctcagccttttctgttatgaggaccaggaggctgtatgcttgatatgtgcaatttcccacacccaccgggcccacaccgttgtgccactggacgacgctacacaggagtacaaggaaaaactgcagaagtgtctggagcccctggaacagaagctgcaggagatcactcgctgcaagtcctctgaggagaagaagcctggtgagctcaagagactagtggaaagtcgccgacagcagatcttgagggagtttgaagagcttcataggcggctggatgaagagcagcaggtgttgctttcacgactggaagaagaggaacaggacattctgcagcgactccgagaaaatgctgctcaccttggggacaagcgccgggacctggcccacttggctgccgaggtggagggcaagtgcttacagtcaggcttcgagatgcttaagccagttctttctgccagggaggaatgtgaaaaggtgaagaccatggaggtgacttcagtatccatagagctggaaaagaacttcagcaattttccccgacagtactttgccctaaggaaaatccttaaacagctaattgcggatgtgaccctggaccccgagacagctcatcctaacctagtcctgtcagaggatcgtaagagcgtcaagttcgtggagacaagactccgggatctccctgacacaccaaggcgtttcaccttctacccttgcgtcctggctactgagggtttcacctcaggtcgacactactgggaggtggaggccgcccattgtgtccttgcccaggaccccgagaaccaggcgctggcgaggttttactgctacactgagaggaccattgcgaagcggctcgtcttgcggcgggatccctcggtgaagaggactctctgtcgaggctgctcttccctcctcgtcccgggcctcacctgcacccagcgccagagacgctgcaggggacagcgctggaccgtacagacctgcctaacatgccagcgcagccaacgcttcctcaatgatcccgggcatttactctggggagacaggcctgaggcccagctcgggagccaagcagattccaaaccactacaacccttgccaaacacagcccactccatttcagaccgccttcctgaggagaaaatgcagacgaagggttccagtaaccagtga

SEQ ID NO: 32718 - DNA, 1548 bp, Homo sapiens; identical to SEQ ID NO: 32677
  source 1..1548: mol_type = unassigned DNA

SEQ ID NO: 32719 - DNA, 1824 bp, Homo sapiens
  source 1..1824: mol_type = unassigned DNA
cccagcttccactgacacgagcctcggcgcggcttccgcttccggcgagtattgtgtgtcgcgccgcggggcgggggcgaggggaggaggaaggagggaggcagcgctccggcggctccgcgccccgcactcccggacccgaagccgggaagattcctttcttgtctgttagaaacgtatgtcaaacgaggatacagtgtctggaactattggttctaagatataagtggaatgagcctggatcaggagaagtatgctgagctagagttgaaggaagcttctctttctaacaagagaaagcagagttaaattatggcagagacaagtctgttagaggctggggcctctgcagcctctacagctgcggctttggagaacttacaggtggaggcgagctgctctgtgtgcctggagtatctgaaggaacctgtcatcattgagtgtgggcacaacttctgcaaagcttgcatcacccgctggtgggaggacctagagagggacttcccttgtcctgtctgtcgaaagacatcccgctaccgcagtctccgacctaatcggcaactaggcagtatggtggaaattgccaagcagctccaggccgtcaagcggaagatccgggatgagagcctctgcccccaacaccatgaggccctcagccttttctgttatgaggaccaggaggctgtatgcttgatatgtgcaatttcccacacccaccgggcccacaccgttgtgccactggacgatgctacacaggagtacaaggaaaaactgcagaagtgtctggagcccctggaacagaagctgcaggagatcactcgctgcaagtcctctgaggagaagaagcctggtgagctcaagagactagtggaaagtcgccgacagcagatcttgagggagtttgaagagcttcataggcggctggatgaagagcagcaggtgttgctttcacgactggaagaagaggaacaggacattctgcagcgactccgagaaaatgctgctcaccttggggacaagcgccgggacctggcccacttggctgccgaggtggagggcaagtgcttacagtcaggcttcgagatgcttaagccagttctttctgccagggaggaatgtgaaaaggtgaagaccatggaggtgacttcagtatccatagagctggaaaagaacttcagcaattttccccgacagtactttgccctaaggaaaatccttaaacagctaattgcggatgtgaccctggaccctgagacagctcatcctaacctagtcctgtcagaggatcgtaagagcgtcaagttcgtggagacaagactccgggatctccctgacacaccaaggcgtttcaccttctacccttgcgtcctggctactgagggtttcacctcaggtcgacactactgggaggtggaggccgcccattgtgtccttgcccaggaccccgagaaccaggcgctggcgaggttttactgctacactgagaggaccattgcgaagcggctcgtcttgcggcgagatccctcggtgaagaggactctctgtcgaggctgctcttccctcctcgtcccgggcctcacctgcacccagcgccagagacgctgcaggggacagcgctggaccgtacagacctgcctaacatgccagcgcagccaacgcttcctcaatgatcccgggcatttactctggggagacaggcctgaggcccagctcgggagccaagcagattccaaaccactacaacccttgccaaacacagcccactccatttcagaccgccttcctgaggagaaaatgcagactcagggttccagtaaccagtga

SEQ ID NO: 32720 - DNA, 3338 bp, Homo sapiens
  source 1..3338: mol_type = unassigned DNA
cccagcttccactgacacgagcctcggcgcggcttccgcttccggcgagtattgtgtgtcgcgccgcggggcgggggcgaggggaggaggaaggagggaggcagcgctccggcggctccgcgccccgcactcccggacccgaagccgggaagattcctttcttgtctgttagaaacgtatgtcaaacgaggatacagtgtctggaactattggttctaagatataagtggaatgagcctggatcaggagaagtatgctgagctagagttgaaggaagcttctctttctaacaagagaaagcagagttaaattatggcagagacaagtctgttagaggctggggcctctgcagcctctacagctgcggctttggagaacttacaggtggaggcgagctgctctgtgtgcctggagtatctgaaggaacctgtcatcattgagtgtgggcacaacttctgcaaagcttgcatcacccgctggtgggaggacctagagagggacttcccttgtcctgtctgtcgaaagacatcccgctaccgcagtctccgacctaatcggcaactaggcagtatggtggaaattgccaagcagctccaggccgtcaagcggaagatccgggatgagagcctctgcccccaacaccatgaggccctcagccttttctgttatgaggaccaggaggctgtatgcttgatatgtgcaatttcccacacccaccgggcccacaccgttgtgccactggacgacgctacacaggagtacaaggaaaaactgcagaagtgtctggagcccctggaacagaagctgcaggagatcactcgctgcaagtcctctgaggagaagaagcctggtgagctcaagagactagtggaaagtcgccgacagcagatcttgagggagtttgaagagcttcataggcggctggatgaagagcagcaggtgttgctttcacgactggaagaagaggaacaggacattctgcagcgactccgagaaaatgctgctcaccttggggacaagcgccgggacctggcccacttggctgccgaggtggagggcaagtgcttacagtcaggcttcgagatgcttaaggatgtcaaaagtaccctggaaaagaatattcctagaaagttcggaggctcactctcaacgatctgtccacgggatcataaggctctccttggattagtaaaagaaatcaacagatgtgaaaaggtgaagaccatggaggtgacttcagtatccatagagctggaaaagaacttcagcaattttccccgacagtactttgccctaaggaaaatccttaaacagctaattgcggatgtgaccctggaccccgagacagctcatcctaacctagtcctgtcagaggatcgtaagagcgtcaagttcgtggagacaagactccgggatctccctgacacaccaaggcgtttcaccttctacccttgcgtcctggctactgagggtttcacctcaggtcgacactactgggaggtggaggtgggcgacaagacccactgggcagtgggtgtatgccgggactccgtgagccgaaagggcgagttgactccactccctgagactggctactggcgggtgcggctatggaatggggacaaatatgcagccaccaccacaccttttacccctttgcacatcaaggtgaaacccaagcgggtaggcatattcctagactatgaggccggcacactgtctttctacaatgtcacagaccgctctcatatctacaccttcactgatacttttactgagaaactttggcccctcttctacccaggcatccgggctggacggaagaatgctgcaccacttaccatcaggcccccaacagattgggagtgacaggttgggatgtgggaatgactggggtgaggcagggtcaagtgctacgggcctccttcccgtgtcctgctggaacgtcttcgtgtccacctgggtccagtcctgaatcatcttggagaaacaccttggtttctaggatggttttgtgtggagggggaggtaggactgggctggatgagagagcacagctgtgacttcctcctaactgtcagggtggggagctggttcccagaggattgtctaccctgaagtccatcaggttttctgttgcacaaggacgggtcaggaaggaaggagaggcttttccagaaacaaaaaatctgtgagggtctgacttgctcaaaccagaggaggaaacagaaacccctgcacatctttttagggggttctttgacccaggatagtcttgcttcttgaggtagatcacaggggtctgtgtacctctgaattcatgagagatgaatgacagatgctctcatgggtctagatattgaggagtttttctgagggcagagattggacatcaacaaggctagaagggtcagggaagtgggctaaaggaacagattcctagagattaatgaagaggagggaggtttctttggtcttctattccaagggtaaggttgcgattatgggtaagattggccagaggtaggaatgtggggagaaggagaggctgaaaagaaagcagaggagaacccaggtccctgcctcagccttcagcagagttggcttattgcctgcctctataccaataagtcagtcaccttgctcctctccagaggcaaagtggaagagatcctgcaagacacatctatcctttcacagtgttcccaagggaacttggaaaggagagtcaggtattagaggaaagagaagggtatttgtatacaaagccctggccttaaagaatgttacttagtagctactcccaaattgtcagccttcttacctggccaaggtgtccaagccagaaaggaaaaaaggttatggagtctttctcaccctaaggacagggtggaagagggtggtatatagggaagggccagataggcaacttcatttggcttgtgtgcatctggcctggaactggtgttaagccaggcttttgcttgtttgttgccatccctcaccctttgccatttcccttttcagagaatgtaaatgattttcatgttaggccaaaataaacaacttatagggtacatatgttgtcataaaaggtaaaagtgatgcatgccaaaccaaactaaaccaatttggattatctgctattcgggtaatcttcacagaaatgactgagagaagaatctgcagtttactgagggcatttcagttcctcctaccacctcaacaggactttgtccagactctcctcctcttacctttgtgccttgactgtggttctttgtggcaagatactttggttggttaaaataatatggaacaaaggatccactgaagtg

SEQ ID NO: 32721 - DNA, 3338 bp, Homo sapiens; identical to SEQ ID NO: 32620
  source 1..3338: mol_type = unassigned DNA

SEQ ID NO: 32722 - DNA, 3248 bp, Homo sapiens; identical to SEQ ID NO: 32693
  source 1..3248: mol_type = unassigned DNA

SEQ ID NO: 32723 - DNA, 3248 bp, Homo sapiens; identical to SEQ ID NO: 32693
  source 1..3248: mol_type = unassigned DNA

SEQ ID NO: 32724 - DNA, 1824 bp, Homo sapiens; identical to SEQ ID NO: 32632
  source 1..1824: mol_type = unassigned DNA

SEQ ID NO: 32725 - DNA, 3637 bp, Homo sapiens
  source 1..3637: mol_type = unassigned DNA
atcggctgtggggagtaccggctgcagtcggctgtgccgggagggtaggatggcgtctggccgatgcggtgatagcaccgaaagcagacggccgccaggcgctccccctaccccccgaagtttctccccagcggcgggggatgggggtaggcggttcctctgttctttctgcgttccccgcggcctcttaccacagagacgcgggcctccaccgtcctagccctcccgccctgttctctagtgcggactagagcgtctcctcgccatttcctgtcgccctggggccccgcggggaaaaagggggagtagcaggacagcggagggaagtcgcgagcttaggtggtgtgtagacgccggaagtgttgggaaggaggccggaagctaggggcggggccaggaagtgaggaggggcgggggtttatgaggagtccaagggagcattggggcagacttgtactcagagccacctgagggacttggcggtggcgcccagcactgtcccctcccctcgtagagacacggttgtcgtttgggagtagggaacactgtgttggggtgggttgtcggcaggacatctctctggctgctcttggggcgaggtgtggaggggcagggctgggggtggagccgggtcgccagggcgtcggtagggaagacccccgcccctcgcccccccaccgaacctctacactggctggctggacactaagatggctgccgttgccatgacacccaaccctgtgcagacccttcaggaggaggcggtgtgcgccatctgcctcgattacttcacggaccccgtgtccatcggctgcgggcacaacttctgccgagtttgtgtaacccagttgtggggtggggaggatgaggaggacagagatgagttagatcgggaggaggaggaggaggacggagaggaggaggaagtggaggctgtgggggctggcgcggggtgggacacccccatgcgggatgaagactacgagggtgacatggaggaggaggtcgaggaggaagaagagggtgtgttctggaccagtggcatgagcaggtccagctgggacaacatggactatgtgtgggaggaggaggacgaggaggaagacctggactactacttgggggacatggaggaggaggacctgaggggggaggatgaggaggacgaggaggaagtgctggaggaggttgaggaagaggatctagaccccgtcaccccactgcccccgcctccagcccctcggaggtgcttcacatgccctcagtgccgaaagagctttcctcggcggagcttccgccccaacctgcagctggccaatatggtccaggtgattcggcagatgcacccaacccctggtcgagggagccgcgtgaccgatcagggcatctgtcccaaacaccaagaagccctgaagctcttctgcgaggtagacgaagaggccatctgtgtggtgtgccgagaatccaggagccacaaacagcacagcgtggtgccattggaggaggtggtgcaggagtacaaggccaaactgcaggggcacgtggaaccactgaggaagcacctggaggcagtgcagaagatgaaagccaaggaggagaggcgagtgacagaactgaagagccagatgaagtcagagctggcagcggtggcctcggagtttgggcgactgacacggtttctggctgaagagcaggcagggctggaacggcgtctcagagagatgcatgaagcccagctggggcgtgcgggagccgcggctagtcgccttgcagaacaggccgcccagctcagccgcctgctggcagaggcccaggagcggagccagcaggggggtctccggctgctccaggacatcaaggagactttcaataggtgtgaagaggtacagctgcagcccccagaggtctggtcccctgacccgtgccaaccccatagccatgacttcctgacagatgccatcgtgaggaaaatgagccggatgttctgtcaggctgcgagagtggacctgacgctggaccctgacacggctcacccggccctgatgctgtcccctgaccgccggggggtccgcctggcagagcggcggcaggaggttgctgaccatcccaagcgcttctcggccgactgctgcgtactgggggcccagggcttccgctccggccggcactactgggaggtagaggtgggcgggcggcggggctgggcggtgggtgctgcccgtgaatcaacccatcataaggaaaaggtgggccctgggggttcctccgtgggcagcggggatgccagctcctcgcgccatcaccatcgccgccgccggctccacctgccccagcagcccctgctccagcgggaagtgtggtgcgtgggcaccaacggcaaacgctatcaggcccagagctccacagaacagacgctgctgagccccagtgagaaaccaaggcgctttggtgtgtacctggactatgaagctgggcgcctgggcttctacaacgcagagactctagcccacgtgcacaccttctcggctgccttcctgggcgagcgtgtctttcctttcttccgggtgctctccaagggcacccgcatcaagctctgcccttgattatcctgccacccgcaggggcccctctgtcagcacttggggggtgggtggtggagggtggcccgtaagtttgagggctcaaaggctcttcccactgcttgttactgtgttgcttcccactcccccttgaccccaggcccctgcttctccctctaggagcctaaagaaccctcctggcctccagctcagccttctctcacctactatgtctgtccaacaggtctgcatgggtccctgataatgagaacagctgcctggtcttctctcccagtctgcctagcccagccctgggactggaatttgagtaggggatgaggggaaattgtaatttcattccttaacttccttttccccacccctgctcttcaacctctttatcagttctgaggctggagggtttgggcaaggcaacatccccattccaattccattttctgatgcagattttagctgagggatttggaagccatttggggaggcaggctgggccaaagggtagagctgggtaataaatgtctattctcctggggaggagggattctaaactttccttccgtcctcaatttctacctccatagaccggccagaatttagcttcacttgagagagatctggaatggtcgccatgattgaaaccacgcaccattacatcatcattacattaattacatcaacataaattatttcttcccccttcccttttccagcactcaaccaaggagcaaagctcatcccaccccacacccctcccaggtctgctcactgccaggctcctctcccctttgttcagtggagctggcttttctcccagcccctttccatgcctttcactccatttggcaagctctgagggggagcctggggacgggtttgggtccccaggaggagagccttgggtataatctatttttctaggagcctcttgccttgtcacttgcagctttcgccctctgctttgatggctgaggtgaactcatgttctttgggaaaagggaaggcgtgctgtggaaataaaatgtttatttgcttctctt

SEQ ID NO: 32726 - DNA, 2696 bp, Homo sapiens
  source 1..2696: mol_type = unassigned DNA
atcggctgtggggagtaccggctgcagtcggctgtgccgggagggtaggatggcgtctggccgatgcggtgatagcaccgaaagcagacggccgccaggcgctccccctaccccccgaagtttctccccagcggcgggggatgggggtaggcggttcctctgttctttctgcgttccccgcggcctcttaccacagagacgcgggcctccaccgtcctagccctcccgccctgttctctagtgcggactagagcgtctcctcgccatttcctgtcgccctggggccccgcggggaaaaagggggagtagcaggacagcggagggaagtcgcgagcttaggtggtgtgtagacgccggaagtgttgggaaggaggccggaagctaggggcggggccaggaagtgaggaggggcgggggtttatgaggagtccaagggagcattggggcagacttgtactcagagccacctgagggacttggcggtggcgcccagcactgtcccctcccctcgtagagacacggttgtcgtttgggagtagggaacactgtgttggggtgggttgtcggcaggacatctctctggctgctcttggggcgaggtgtggaggggcagggctgggggtggagccgggtcgccagggcgtcggtagggaagacccccgcccctcgcccccccaccgaacctctacactggctggctggacactaagatggctgccgttgccatgacacccaaccctgtgcagacccttcaggaggaggcggtgtgcgccatctgcctcgattacttcacggaccccgtgtccatcggctgcgggcacaacttctgccgagtttgtgtaacccagttgtggggtggggaggatgaggaggacagagatgagttagatcgggaggaggaggaggaggacggagaggaggaggaagtggaggctgtgggggctggcgcggggtgggacacccccatgcgggatgaagactacgagggtgacatggaggaggaggtcgaggaggaagaagagggtgtgttctggaccagtggcatgagcaggtccagctgggacaacatggactatgtgtgggaggaggaggacgaggaggaagacctggactactacttgggggacatggaggaggaggacctgaggggggaggatgaggaggacgaggaggaagtgctggaggaggttgaggaagaggatctagaccccgtcaccccactgcccccgcctccagcccctcggaggtgcttcacatgccctcagtgccgaaagagctttcctcggcggagcttccgccccaacctgcagctggccaatatggtccaggtgattcggcagatgcacccaacccctggtcgagggagccgcgtgaccgatcagggcatctgtcccaaacaccaagaagccctgaagctcttctgcgaggtagacgaagaggccatctgtgtggtgtgccgagaatccaggagccacaaacagcacagcgtggtgccattggaggaggtggtgcaggagtacaaggccaaactgcaggggcacgtggaaccactgaggaagcacctggaggcagtgcagaagatgaaagccaaggaggagaggcgagtgacagaactgaagagccagatgaagtcagagctggcagcggtggcctcggagtttgggcgactgacacggtttctggctgaagagcaggcagggctggaacggcgtctcagagagatgcatgaagcccagctggggcgtgcgggagccgcggctagtcgccttgcagaacaggccgcccagctcagccgcctgctggcagaggcccaggagcggagccagcaggggggtctccggctgctccaggacatcaaggagactttcaataggtgtgaagaggtacagctgcagcccccagaggtctggtcccctgacccgtgccaaccccatagccatgacttcctgacagatgccatcgtgaggaaaatgagccggatgttctgtcaggctgcgagagtggacctgacgctggaccctgacacggctcacccggccctgatgctgtcccctgaccgccggggggtccgcctggcagagcggcggcaggaggttgctgaccatcccaagcgcttctcggccgactgctgcgtactgggggcccagggcttccgctccggccggcactactgggaggagcctaaagaaccctcctggcctccagctcagccttctctcacctactatgtctgtccaacagaccggccagaatttagcttcacttgagagagatctggaatggtcgccatgattgaaaccacgcaccattacatcatcattacattaattacatcaacataaattatttcttcccccttcccttttccagcactcaaccaaggagcaaagctcatcccaccccacacccctcccaggtctgctcactgccaggctcctctcccctttgttcagtggagctggcttttctcccagcccctttccatgcctttcactccatttggcaagctctgagggggagcctggggacgggtttgggtccccaggaggagagccttgggtataatctatttttctaggagcctcttgccttgtcacttgcagctttcgccctctgctttgatggctgaggtgaactcatgttctttgggaaaagggaaggcgtgctgtggaaataaaatgtttatttgcttctct

SEQ ID NO: 32727 - DNA, 450 bp, Homo sapiens
  source 1..450: mol_type = unassigned DNA
cttcaggaggaggcggtgtgcgccatctgcctcgattacttcacggaccccgtgtccatcggctgcgggcacaacttctgccgagtttgtgtaacccagttgtggggacggagaggaggaggaagtggaggctaccccgtcaccccactgcccccgcctccagcccctcggaggtgcttcacatgccctcagtgccgaaagagctttcctcggcggagcttccgccccaacctgcagctggccaatatggtccaggtgattcggcagatgcacccaacccctggtcgagggagccgcgtgaccgatcagggcatctgtcccaaacaccaagaagccctgaagctcttctgcgaggtagacgaagaggccatctgtgtggtgtgccgagaatccaggagccacaaacagcacagcgtggtgccattggaggaggtggtgcaggagtacaag

SEQ ID NO: 32728 - DNA, 2512 bp, Homo sapiens
  source 1..2512: mol_type = unassigned DNA
accggctgcagtcggctgtgccgggagggtaggatggcgtctggccgatgcggtgatagcaccgaaagcagacggccgccaggcgctccccctaccccccgaagtttctccccagcggcgggggatgggggtaggcggttcctctgttctttctgcgttccccgcggcctcttaccacagagacgcgggcctccaccgtcctagccctcccgccctgttctctagtgcggactagagcgtctcctcgccatttcctgtcgccctggggccccgcggggaaaaagggggagtagcaggacagcggagggaagtcgcgagcttaggtggtgtgtagacgccggaagtgttgggaaggaggccggaagctaggggcggggccaggaagtgaggaggggcgggggtttatgaggagtccaagggagcattggggcagacttgtactcagagccacctgagggacttggcggtggcgcccagcactgtcccctcccctcgtagagacacggttgtcgtttgggagtagggaacactgtgttggggtgggttgtcggcaggacatctctctggctgctcttggggcgaggtgtggaggggcagggctgggggtggagccgggtcgccagggcgtcggtagggaagacccccgcccctcgcccccccaccgaacctctacactggctggctggacactaagatggctgccgttgccatgacacccaaccctgtgcagacccttcaggaggaggcggtgtgcgccatctgcctcgattacttcacggaccccgtgtccatcggctgcgggcacaacttctgccgagtttgtgtaacccagttgtggggtggggaggatgaggaggacagagatgagttagatcgggaggaggaggaggaggacggagaggaggaggaagtggaggctgtgggggctggcgcggggtgggacacccccatgcgggatgaagactacgagggtgacatggaggaggaggtcgaggaggaagaagagggtgtgttctggaccagtggcatgagcaggtccagctgggacaacatggactatgtgtgggaggaggaggacgaggaggaagacctggactactacttgggggacatggaggaggaggacctgaggggggaggatgaggaggacgaggaggaagtgctggaggaggttgaggaagaggatctagaccccgtcaccccactgcccccgcctccagcccctcggaggtgcttcacatgccctcagtgccgaaagagctttcctcggcggagcttccgccccaacctgcagctggccaatatggtccaggtgattcggcagatgcacccaacccctggtcgagggagccgcgtgaccgatcagggcatctgtcccaaacaccaagaagccctgaagctcttctgcgaggtagacgaagaggccatctgtgtggtgtgccgagaatccaggagccacaaacagcacagcgtggtgccattggaggaggtggtgcaggagtacaaggccaaactgcaggggcacgtggaaccactgaggaagcacctggaggcagtgcagaagatgaaagccaaggaggagaggcgagtgacagaactgaagagccagatgaagtcagagctggcagcggtggcctcggagtttgggcgactgacacggtttctggctgaagagcaggcagggctggaacggcgtctcagagagatgcatgaagcccagctggggcgtgcgggagccgcggctagtcgccttgcagaacaggccgcccagctcagccgcctgctggcagaggcccaggagcggagccagcaggggggtctccggctgctccagcaagacatcaaggagactttcaataggtatgccatcgtgaggaaaatgagccggatgttctgtcaggctgcgagagtggacctgacgctggaccctgacacggctcacccggccctgatgctgtcccctgaccgccggggggtccgcctggcagagcggcggcaggaggttgctgaccatcccaagcgcttctcggccgactgctgcgtactgggggcccagggcttccgctccggccggcactactgggaggtagaggtgggcgggcggcggggctgggcggtgggtgctgcccgtgaatcaacccatcataaggaaaaggtgggccctgggggttcctccgtgggcagcggggatgccagctcctcgcgccatcaccatcgccgccgccggctccacctgccccagcagcccctgctccagcgggaagtgtggtgcgtgggcaccaacggcaaacgctatcaggcccagagctccacagaacagacgctgctgagccccagtgagaaaccaaggcgctttggtgtgtacctggactatgaagctgggcgcctgggcttctacaacgcagagactctagcccacgtgcacaccttctcggctgccttcctgggcgagcgtgtctttcctttcttccgggtgctctccaagggcacccgcatcaagctctgcccttga

SEQ ID NO: 32729 - DNA, 3182 bp, Homo sapiens
  source 1..3182: mol_type = unassigned DNA
ggaggctgagcgggcggcgcgacgcgggggccgacgggggcgccgggtggccgcgccggaagtgccttgcgcggcagaggaagcgcagggacagagcggagcaggccgagccggcggaaagggtctttgctgctgcgcccgggcaggggctgccgcggccccaggtcccgcttcgagacgcggcgcggtccaggcgggaggcgactccctaggaagggacccggggcgggaggaggaagtgaggccgcgcggaaggaaggcggcgagccccggggccccgaggccttggccgcgtcacagcacccacatggcctctggagtgggcgcggccttcgaggaactgcctcacgacggcacgtgtgacgagtgcgagcccgacgaggctccgggggccgaggaagtgtgccgagaatgcggcttctgctactgccgccgccatgccgaggcgcacaggcagaagttcctcagtcaccatctggccgaatacgtccacggctcccaggcctggaccccgccagctgacggagagggggcggggaaggaagaagcggaggtcaaggtggagcaggagagggagatagaaagcgaggcaggggaagagagtgagtcggaggaagagagcgagtcagaggaagagagcgagacagaggaagagagtgaggatgagagcgatgaggagagtgaagaagacagcgaggaagaaatggaggatgagcaagaaagcgaggccgaagaagacaaccaagaagaaggggaatccgaggcggagggagaaactgaggcagaaagtgaatttgacccagaaatagaaatggaagcagagagagtggccaagaggaagtgtccggaccatgggcttgatttgagtacctattgccaggaagataggcagctcatctgtgtcctgtgtccagtcattggggctcaccagggccaccaactctccaccctagacgaagcctttgaagaattaagaagcaaagactcaggtggactgaaggccgctatgatcgaattggtggaaaggttgaagttcaagagctcagaccctaaagtaactcgggaccaaatgaagatgtttatacagcaggaatttaagaaagttcagaaagtgattgctgatgaggagcagaaggcccttcatctagtggacatccaagaggcaatggccacagctcatgtgactgagatactggcagacatccaatcccacatggataggttgatgactcagatggcccaagccaaggaacaacttgatacctctaatgaatcagctgagccaaaggcagagggcgatgaggaaggacccagtggtgccagtgaagaagaggacacatgaaggcttgctacccccagtggaaaatcatcccctccccttgtgtgtatgtgacagcgtgtatgtaacggcttctgatttctgtgaaagctgctcagcaacaaacgtacttccaccagatgtgtccccagatccacagcaggcacatatctctccaagggatgaccagttttatgcttactgtgtgcttctcatcccctggttgtggtaggtcaaggaaaagagcccctttgatccaccaggagcaattaagaaaggtccttcaggtaatccctcaatggctgctttgaacttactcaggaaagccagcccccataatattgtattaccaaacagtatcgctttgttaggaaggatctggaataatcttgaagggaagtcagagttttctccctgcctattaacaaaaacccaattttgttcatattgaagcatgaaataaatgagagcaaggtagggccaaattaactcttgtggacagtccctaaaagtccagttctacatttgtgaaaattgtggtgccatgaattaagatggatgactggaaaaaggtgttggagaaagagttaaagatgaggaagagatatttttagtatatgaagttatccaggacttgatattcataattcagtgctgtggaaatgaaaaaaatgattgaagaggtggaacggaaatgaccttagggggaaaaaaaaggaccaaagaagtctgattaaaagttgaaatcagtatttctgaattcaaattgcttgaatttccaaaatagtcagtaaaggatctaatagaaccagaattatttgggtgaattctgcaggttttatgggcttgtcacaacgtgaagggctggaatgtatattaccaaatgggaatttccattgtaggtttttgctagtcccacccccattttagcctaatttggcttaaacgcagtatggggagaattgttcccattccatgtgttctgaattcagctcatctcccagcatatagatatatcctcctttaactccgaccagaacccttcttcctgtggcactccccacccatagaccttcagatcatctcccacaccctggatctcactctcctcttagtaacagagacactcctgaggttggacttccttgcttttctctacttccaaatcacaatttcttacaaccaagctttgtgctcccgagtaagcagggatgtactaggggaatgtaaaactgcaaacttaaaaacctgcatcttcttgaagcatcagttttacttaccaaatggtttagagtcataagatgacctatttttatataaaagttatattatagaataaaatgttcatacgcatagactgttaagataaaaaaataggaatcttgcaaggtaattcttatttgcaagtgggttatgtgttcactctcctctacctttatggtattttggtgttcacttacgaagcatacaactagaaccatatccaagcagactctgggttgctgttaacccagggcctagacttctagtgcctctgaggcagaaccaaaggagcctgcactgggggaaatcccttttcctgcctgcctgtctgcctgtgacctgtgtacgtattacaggctttaggaccagctgattgttatgcttgcaggatggttttgaaacagaaacaatacttgtttactgtaggaatcctatttatattatttttcagtcctgtgaatgctgtgaaaagatttattcctttgaggccaggaagctcccaggcatatatgcttctaggttaggattgtcctgactcactaaagatgccaggatattggggctgaggggagtttgaggtgttaaaaaaaaaaaaaaaaaa

SEQ ID NO: 32730 - DNA, 3515 bp, Homo sapiens
  source 1..3515: mol_type = unassigned DNA
gggccgaggcgcgggagaggcggtggacaccgagaagcccgccggcggcttgcaattccctcacccggcgcgcgcctttcgcagagggaaggagcaagagggcccctacctcatcgtgcgcgggtggggtcggcgcttgtcgcgtgtggcgcgcagtggggcgggcggcgggaggggggtggcagtggagggagcgagaggtgcaggggtgactttgttggcagcaggactagctggagagctagacctggaagcgcatccggggaggacttgcggggcagaggagggcgtgggcgtgtctggtgtgggatgcagtggaaaggagggggccctcctgagtagatctgtgggtgattccttcgaggacgcctcgtcttcccgtctgcccttttatttgtcagcgagggagtccccatggtctctgttcaagttctggagactttctctttgggtgggcttaatcacctgctactaaatcgtagaactgcccagggccctttctaatattggtcacaaacgtgaggagtatgtcagaaaacagaaaaccgctgctgggctttgtaagcaaactcactagtgggactgcacttgggaactcaggcaagactcactgccccctgtgcttggggcttttcaaagcccccaggctcttgccttgtttgcatacagtttgcaccacgtgtctggagcagctggagcccttctcagtagtggacatccgagggggagactctgacacaagctctgaggggtcaatattccaggaactcaagccacgaagtctgcagtcgcagatcggcatcctttgtcctgtatgtgatgctcaggtggacctgcccatgggtggagtgaaggctttaaccatagaccacctggccgtgaatgatgtgatgctggagagcctacgtggggaaggccagggcctggtgtgtgacctgtgcaacgacagggaagtagagaagaggtgtcagacctgcaaagccaacctctgccacttctgctgccaggctcataggcggcagaagaaaacgacttaccacaccatggtggacctaaaagacttgaaaggctacagccggattgggaagcccatcctgtgtcctgttcaccctgcagaggaactgaggctgttctgtgagttctgtgaccggcccgtgtgccaggattgtgtggtgggggagcatcgggaacacccctgtgacttcaccagcaatgtcatccacaagcatggggactctgtgtgggagctcctcaaaggtactcagccccacgtggaggccctggaggaagccctggctcagatccacataataaacagtgccctccagaagcgagtggaggcagtggcagctgatgtccggacattctcggagggctacattaaggccattgaggagcatcgggacaagctgctgaagcagctggaagacatacgggcccagaaggaaaattccctgcagctgcagaaggcccagctggaacagttactggcagacatgcggactggagtggagttcaccgagcacttgctgaccagcggctcagacttggagatcctcatcaccaagagggtggtggtagaacggctcaggaagctgaacaaagttcaatatagcacccgtcctggagtaaatgataagatacgcttctgtcctcaggagaaagcaggccagtgccgtggctatgaaatttatggtacgattaataccaaagaggttgatccagccaaatgtgtcctacaaggagaagacctccacagagcccgggagaaacagacggcctctttcaccctgctttgtaaggatgccgcaggagaaatcatgggcaggggaggagacaacgttcaagttgccgttgtccctaaagataagaaagacagcccagtcagaacaatggtccaggataacaaggatgggacatactacatttcctacacccccaaggaacctggcgtctatactgtgtgggtctgcatcaaagaacagcatgtgcagggctcgccattcactgtgatggtgaggagaaagcaccgcccacactcaggcgtgtttcactgctgcaccttctgctccagcgggggccagaaaaccgctcgctgcgcctgtggaggcaccatgccaggtgggtacctaggctgtggccatggacacaaaggccacccaggtcatccccactggtcatgctgtggaaaatttaatgagaaatctgaatgcacatggacaggtgggcagagcgcaccgaggagtctacttaggactgtggctctctgatgggtttgtgctcagccttttaaagctgcaggcagcaccacttgagatttccagaggacccagaccttcgttcattctaaagagactgatagaattaaaaacaaagtgccttatcttgcactggagttcaagtgctcttttgttagttattcactgattgtacttgtggatggttgagcacaaaaaaccacctctacatttctcttaaaggtaggttggcaacgttctttttctaccacaggatactccttttcattttgtacagtatggaggtatctattccattggcactgaagggtctaggtagtttagttcctttctgatataaccctttttttttcttttttttttttttttaaagacagagtctcactctgtcacccaggctggagtgcagtggcatgatctcggctcactgcaacctctgcctcccggttcaaatgattctcgtgccttggtgtcccgagtagctgggattacaggttcccccccaccttcccccacacccagctaatttttgtgtttttagtagagacggggtttcaccatgttggccaggctggtctcaaactcctgacctcgtgatccacctgcctcggcctcccaaagtgctggggttacaagcatgagccaccacacctggcctattatgacctttttcatttttctctgagctacacattatttagatatttcccctagagattagaaacctcctttcatcctgtccactttttgttagcatactttcattggatttactggtacatgttttgtgatcatgataatgtgatcttgttttggtggtgtccccctactccgtctctatgccatgacagccttctgccccaaagcctggaagattactctttggtcaagggcatacaaatagaaagttaataaaggggaatggtgttgaaatagaacctcatacatttattacagttctacttatacagaaaatctagacaccttcatccttctcacagctctgttttttagtagagtagtctttagagtagtcttcactgttatctatatacctagaaagttaactgggagctttgactcttactgtgccttcactcatagtgtgccttcttagctgctggagaatttggggagaggatgtacacagcactggtgcctcagccctgccaaggtcttcactgtatatattttgtgtgttcttctgaaactcttgatttcttatatggcaataaactcagcatgtattaaatataa

SEQ ID NO: 32731 - DNA, 2415 bp, Homo sapiens
  source 1..2415: mol_type = unassigned DNA
gttacacaggactgtggaatcccgggtgacattcaactccttaggtcatctgcactccccccggaccggaaaacaaagccttcccgagcccgacaaggagggtggcgctccctggcccggccgaagtaagccctccattcgacacctcggctccacggtctcccgaaccggtccccgtaacgcgagcctgagatgccctcacccccgaaaaatacccaaagtcggggagccgcgggagtgcttgtacccagcacgctaggcctgagggacctgtgagctacagtaagcgcctgaggacagaggggagcctcgcagcctcaaacccgcgtggaggagaaacgtctggcgcccccgagcggccgagacctcgggagcccgaaaaacgtctcccactcccagcgcagagccaactgacagtgccatccaccaatgggagaacccagtctgcgttcgtgggacgagtccgagggcagaaagaaggccgtcccggcgccaaatcagcgtggctttttaagaggtcctgaggcctctctggtcaccacagagagagggacagtccctgtgaaacggtgacgctgactacactatgccgctcgctccgagccttggccttttcctcccgccgcactctaagcccttcggccgccccgcccacggccttgtcaggtcccgccccccgcgtgagtggactggcgaagatgtggaatttccaaaacttattggatgcttagtggcgtcactctggagggcggcggggcccggagcggcgagggccgccgctctcggacggaactcaagccacgaagtctgcagtcgcagatcggcatcctttgtcctgtatgtgatgctcaggtggacctgcccatgggtggagtgaaggctttaaccatagaccacctggccgtgaatgatgtgatgctggagagcctacgtggggaaggccagggcctggtgtgtgacctgtgcaacgacagggaagtagagaagaggtgtcagacctgcaaagccaacctctgccacttctgctgccaggctcataggcggcagaagaaaacgacttaccacaccatggtggacctaaaagacttgaaaggctacagccggattgggaagcccatcctgtgtcctgttcaccctgcagaggaactgaggctgttctgtgagttctgtgaccggcccgtgtgccaggattgtgtggtgggggagcatcgggaacacccctgtgacttcaccagcaatgtcatccacaagcatggggactctgtgtgggagctcctcaaaggtactcagccccacgtggaggccctggaggaagccctggctcagatccacataataaacagtgccctccagaagcgagtggaggcagtggcagctgatgtccggacattctcggagggctacattaaggccattgaggagcatcgggacaagctgctgaagcagctggaagacatacgggcccagaaggaaaattccctgcagctgcagaaggcccagctggaacagttactggcagacatgcggactggagtggagttcaccgagcacttgctgaccagcggctcagacttggagatcctcatcaccaagagggtggtggtagaacggctcaggaagctgaacaaagttcaatatagcacccgtcctggagtaaatgataagatacgcttctgtcctcaggagaaagcaggccagtgccgtggctatgaaatttatggtacgattaataccaaagaggttgatccagccaaatgtgtcctacaaggagaagacctccacagagcccgggagaaacagacggcctctttcaccctgctttgtaaggatgccgcaggagaaatcatgggcaggggaggagacaacgttcaagttgccgttgtccctaaagataagaaagacagcccagtcagaacaatggtccaggataacaaggatgggacatactacatttcctacacccccaaggaacctggcgtctatactgtgtgggtctgcatcaaagaacagcatgtgcagggctcgccattcactgtgatggtgaggagaaagcaccgcccacactcaggcgtgtttcactgctgcaccttctgctccagcgggggccagaaaaccgctcgctgcgcctgtggaggcaccatgccaggtgggtacctaggctgtggccatggacacaaaggccacccaggtcatccccactggtcatgctgtggaaaatttaatgagaaatctgaatgcacatggacaggtgggcagagcgcaccgaggagtctacttaggactgtggctctctgatgggtttgtgctcagccttttaaagctgcaggcagcaccacttgagatttccagaggacccagaccttcgttcattctaaagagactgatagaattaaaaacaaagtgccttatcttgca

SEQ ID NO: 32732 - DNA, 3495 bp, Homo sapiens
  source 1..3495: mol_type = unassigned DNA
ggtgtgaggaggggccagagcccgcgggcgtcccgggccgaggcgcgggagaggcggtggacaccgagaagcccgccggcggcttgcaattccctcacccggcgcgcgcctttcgcagagggaaggagcaagagggcccctacctcatcgtgcgcgggtggggtcggcgcttgtcgcgtgtggcgcgcagtggggcgggcggcgggaggggggtggcagtggagggagcgagaggtgcaggggtgactttgttggcagcaggactagctggagagctagacctggaagcgcatccggggaggacttgcggggcagaggagggcgtgggcgtgtctggtgtgggatgcagtggaaaggagggggccctcctgagtagatctgtgggtgattccttcgaggacgcctcgtcttcccgtctgcccttttatttgtcagcgagggagtccccatggtctctgttcaagttctggagactttctctttgggtgggcttaatcacctgctactaaatcgtagaactgcccagggccctttctaatattggtcacaaacgtgaggagtatgtcagaaaacagaaaaccgctgctgggctttgtaagcaaactcactagtgggactgcacttgggaactcaggcaagactcactgccccctgtgcttggggcttttcaaagcccccaggctcttgccttgtttgcatacagtttgcaccacgtgtctggagcagctggagcccttctcagtagtggacatccgagggggagactctgacacaagctctgaggggtcaatattccaggaactcaagccacgaagtctgcagtcgcagatcggcatcctttgtcctgtatgtgatgctcaggtggacctgcccatgggtggagtgaaggctttaaccatagaccacctggccgtgaatgatgtgatgctggagagcctacgtggggaaggccagggcctggtgtgtgacctgtgcaacgacagggaagtagagaagaggtgtcagacctgcaaagccaacctctgccacttctgctgccaggctcataggcggcagaagaaaacgacttaccacaccatggtggacctaaaagacttgaaaggctacagccggattgggaagcccatcctgtgtcctgttcaccctgcagaggaactgaggctgttctgtgagttctgtgaccggcccgtgtgccaggattgtgtggtgggggagcatcgggaacacccctgtgacttcaccagcaatgtcatccacaagcatggggactctgtgtgggagctcctcaaaggtactcagccccacgtggaggccctggaggaagccctggctcagatccacataataaacagtgccctccagaagcgagtggaggcagtggcagctgatgtccggacattctcggagggctacattaaggccattgaggagcatcgggacaagctgctgaagcagctggaagacatacgggcccagaaggaaaattccctgcagctgcagaaggcccagctggaacagttactggcagacatgcggactggagtggagttcaccgagcacttgctgaccagcggctcagacttggagatcctcatcaccaagagggtggtggtagaacggctcaggaagctgaacaaagttcaatatagcacccgtcctggagtaaatgataagatacgcttctgtcctcaggagaaagcaggccagtgccgtggctatgaaatttatgacctccacagagcccgggagaaacagacggcctctttcaccctgctttgtaaggatgccgcaggagaaatcatgggcaggggaggagacaacgttcaagttgccgttgtccctaaagataagaaagacagcccagtcagaacaatggtccaggataacaaggatgggacatactacatttcctacacccccaaggaacctggcgtctatactgtgtgggtctgcatcaaagaacagcatgtgcagggctcgccattcactgtgatggtgaggagaaagcaccgcccacactcaggcgtgtttcactgctgcaccttctgctccagcgggggccagaaaaccgctcgctgcgcctgtggaggcaccatgccaggtgggtacctaggctgtggccatggacacaaaggccacccaggtcatccccactggtcatgctgtggaaaatttaatgagaaatctgaatgcacatggacaggtgggcagagcgcaccgaggagtctacttaggactgtggctctctgatgggtttgtgctcagccttttaaagctgcaggcagcaccacttgagatttccagaggacccagaccttcgttcattctaaagagactgatagaattaaaaacaaagtgccttatcttgcactggagttcaagtgctcttttgttagttattcactgattgtacttgtggatggttgagcacaaaaaaccacctctacatttctcttaaaggtaggttggcaacgttctttttctaccacaggatactccttttcattttgtacagtatggaggtatctattccattggcactgaagggtctaggtagtttagttcctttctgatataaccctttttttttcttttttttttttttttaaagacagagtctcactctgtcacccaggctggagtgcagtggcatgatctcggctcactgcaacctctgcctcccggttcaaatgattctcgtgccttggtgtcccgagtagctgggattacaggttcccccccaccttcccccacacccagctaatttttgtgtttttagtagagacggggtttcaccatgttggccaggctggtctcaaactcctgacctcgtgatccacctgcctcggcctcccaaagtgctggggttacaagcatgagccaccacacctggcctattatgacctttttcatttttctctgagctacacattatttagatatttcccctagagattagaaacctcctttcatcctgtccactttttgttagcatactttcattggatttactggtacatgttttgtgatcatgataatgtgatcttgttttggtggtgtccccctactccgtctctatgccatgacagccttctgccccaaagcctggaagattactctttggtcaagggcatacaaatagaaagttaataaaggggaatggtgttgaaatagaacctcatacatttattacagttctacttatacagaaaatctagacaccttcatccttctcacagctctgttttttagtagagtagtctttagagtagtcttcactgttatctatatacctagaaagttaactgggagctttgactcttactgtgccttcactcatagtgtgccttcttagctgctggagaatttggggagaggatgtacacagcactggtgcctcagccctgccaaggtcttcactgtatatattttgtgtgttcttctgaaactcttgatttcttatatggcaataaactcagcatgtattaaatataa

SEQ ID NO: 32733 - DNA, 2261 bp, Homo sapiens
  source 1..2261: mol_type = unassigned DNA
ggcggcgccctgggcggccgcggagtcatggacggcagtggacccttcagctgccccatctgcctagagccactccgggagccggtgacgctgccctgcggccacaacttctgtctcgcctgcctgggcgcgctctggccgcatcgtggcgcgagtggagccggcggacccggaggcgcggcccgctgcccgctgtgccaggagcccttccccgacggccttcagctccgcaagaaccacacgctgtccgagctgctgcagctccgccagggctcgggccccgggtccggccccggcccggcccctgccctggccccggagccctcggcacccagcgcgctgcccagtgtcccggagccgtcggccccctgcgctcccgagccgtggcccgcgggcgaagagccagtgcgctgcgacgcgtgccccgagggcgcggccctgcccgccgcgctgtcctgcctctcctgcctcgcctccttttgccccgcgcacctgggcccgcacgagcgcagccccgccctccgcggacaccgcctggtgccgccgctgcgccggctagaggagagcctgtgcccgcgccacctacggccgctcgagcgctactgccgcgcggagcgcgtgtgtctgtgcgaggcctgcgccgcacaggagcaccgcggccacgagctggtgccgctggagcaggagcgcgcgcttcaggaggctgagcagtccaaagtcctgagcgccgtggaggaccgcatggacgagctgggtgctggcattgcacagtccaggcgcacagtggccctcatcaagagtgcagccgtagcagagcgggagagggtgagccggctgtttgcagatgctgcggccgccctgcagggcttccagacccaggtgctgggcttcatcgaggagggggaagctgccatgctaggccgctcccagggtgacctgcggcgacaggaggaacagcgcagccgcctgagccgagcccgccagaatctcagccaggtccctgaagctgactcagtcagcttcctgcaggagctgctggcactaaggctggccctggaggatgggtgtggccctgggcctggacccccgagggagctcagcttcaccaaatcatcccaagctgtccgtgcagtgagagacatgctggccgtggcctgcgtcaaccagtgggagcagctgagggggccgggtggcaacgaggatgggccacagaagctggactcggaagctgatgctgagccccaagacctcgagagtacgaacctcttggagagtgaagctcccagggactatttcctcaagtttgcctatattgtggatttggacagcgacacagcagacaagttcctgcagctgtttggaaccaaaggtgtcaagagggtgctgtgtcctatcaactaccccttgtcgcccacccgcttcacccattgtgagcaggtgctgggcgagggtgccctggaccgaggcacctactactgggaggtggagattatcgagggctgggtcagcatgggggtcatggccgaagacttctccccacaagagccctacgaccgcggccggctgggccgcaacgcccactcctgctgcctgcagtggaatggacgcagcttctccgtctggtttcatgggctggaggctcccctgccccaccccttctcgcccacggttggggtctgcctggaatacgctgaccgtgccttggccttctatgctgtacgggacggcaagatgagcctcctgcggaggctgaaggcctcccggccccgccggggtggcatcccggcctcccccattgaccccttccagagccgcctggacagtcactttgcggggctcttcacccacagactcaagcctgccttcttcctggagagtgtggacgcccacttgcagatcgggcccctcaagaagtcctgcatatccgtgctgaagaggaggtgatgccgggcacgggcgctcctgctgccgtctctgctccaggaagctgcctcctctgggccctctccttcgtctgggaaggcaccagcatgagtcccacacacccagccttctcatttctagaggcttccacctttttatacactcagccttccctctcccaggcaggaggacccccagaccctgttcccctgcagacctcacttctgggagacagagctacagctgggacagctccaagctaccctaacccctcctttcccaggtttctagaatagtgtctggcatgtagtagatgctcaataaacacttgttgaatg

SEQ ID NO: 32734 - DNA, 3399 bp, Homo sapiens
  source 1..3399: mol_type = unassigned DNA
agtttatctttcactttcctgccctgagtgtgagcaagaatttcctgcggttcctctaggaaaattcctttgtgcagatcaggcccgtggattggtgagtgaatcctaaccacgtcttccctggcctgtcttcactcttctccccagaatcaccacttctgcactggtgtctgaaggtgtattgagtgattttgtggagggcagaagtaggaagtctttgggacaaaactgtatttaccttgggatctgtgaacaagaggaacctcagcagccaggacaggcaggagcagtggaatagctactatggcttctggaatcctggttaatgtaaaggaggaggtgacctgccccatctgcctggaactcctgacacaacccctgagcctggactgcggccacagcttctgccaagcatgcctcactgcaaaccacaagaagtccatgctagacaaaggagagagtagctgccctgtgtgccggatcagttaccagcctgagaacatacggcctaatcggcatgtagccaacatagtggagaagctcagggaggtcaagttgagcccagaggggcagaaagttgatcattgtgcacgccatggagagaaacttctactcttctgtcaggaggacgggaaggtcatttgctggctttgtgagcggtctcaggagcaccgtggtcaccacacgttcctcacagaggaggttgcccgggagtaccaagtgaagctccaggcagctctggagatgctgaggcagaagcagcaggaagctgaagagttagaagctgacatcagagaagagaaagcttcctggaagactcaaatacagtatgacaaaaccaacgtcttggcagattttgagcaactgagagacatcctggactgggaggagagcaatgagctgcaaaacctggagaaggaggaggaagacattctgaaaagccttacgaactctgaaactgagatggtgcagcagacccagtccctgagagagctcatctcagatctggagcatcggctgcaggggtcagtgatggagctgcttcagaaagtaagtgggaagattcttaggacggagaacgtgaccttgaagaagccagaaacttttccaaaaaatcaaaggagagtgtttcgagctcctgatctgaaaggaatgctagaagtgtttagagagctgacagatgtccgacgctactgggttgatgtgacagtggctccaaacaacatttcatgtgctgtcatttctgaagataagagacaagtgagctctccgaaaccacagataatatatggggcacgagggacaagataccagacatttgtgaatttcaattattgtactggcatcctgggctctcaaagtatcacatcagggaaacattactgggaggtagacgtgtccaagaaaactgcttggatcctgggggtatgtgctggcttccaacctgatgcaatgtgtaatattgaaaaaaatgaaaattatcaacctaaatacggctactgggttatagggttagaggaaggagttaaatgtagtgctttccaggatagttccttccatactccttctgttcctttcattgtgcccctctctgtgattatttgtcctgatcgtgttggagttttcctagactatgaggcttgcactgtctcattcttcaatatcacaaaccatggatttctcatctataagttttctcactgttctttttctcagcctgtatttccatatttaaatcctagaaaatgtggagtccccatgactctgtgctcaccaagctcttgaaccttcttacacactcagccccttctgtacagcacctcttgtccaggtgcatctcatacacctgaactcatttgcatcattttaaccatcttttccttgctgtctcccttctttctatttgaacgtccttcactcatcagtaaaatgtaataattgccttgtgccatattgtccccaatattttattgacatttgatagcaatttttttcatcattttccgtactcctaaggaaaactgacctatacctcataaaatgagaccgctatttaggtattacttctgccagatatttatcacccaattgcctctgacactgactaagaagatgaagaaaagcttttcaacagcctttctatatcatcgtgtgataattgttcaccaatgaatgagtccttagccctgtgtcagtttaccctcgatgcccttatttgtgagttaaagagaaaatatcataaatggtatactcttaagtatagaggttttgtatctagaggatctcagttcaactcctgtctctccatataccagcagtgtaactgtgaataacatacttaaatggctgtgcttatttccttttcttttcttttttctttttttttttttttgagatgaagttttgctcttgttccccaggctggagtgcaatggcacgatctcggttcactgcaacctccacctctcagattcaagcaattctcctgcctcagcctcccaagtagctgggattacaggtgcccaccaccacccctggctaaatttgtattttcagtagagacggggtttccccatgttggttaggctcgtctagaacctctgacctcaggtgatccacccgcctcggcctcccaaagtgctgggattacaggcgtgagccacggcgcccagcctgtgcttattttcttaaaataatttttgtattaaaaacttcacattaaataagtgctaatgttttattgcatagtagggtgactagagttaacaataacctattgcatatattttgaaatagctagaagagaggattttgaaagttctcaacacaaagaaatgacacatatttgaggtgatggatatgctaattaccctggttcggttattacgcaatgtatacatgtatcaaaacatcacactgtaccacataaatatgtatatttattatttgtcaattaaaagcaaaataaaacaaaaaaccttcatctaatactttggatcattgtgaaaaaataaattcctgaagtataaagcatctatctaagtgtcttgatctaataagtacttgttctacaaattattgaaaaacataaactctgttaatgtctcatggaacaggttgtgccttcagggaaactaggattggatttactaaattctcattttttagatctcagatactactgtcaaaatgacttcaattctgccttctatatataatacacacatatatttaggattttattgtaattctagtgttgctacatattagtctttatcaaacaaactgaattatgtgggaatcagtttattaattgtaaaaaataattataataaaattagctgatgtagttttttaaaagttaaacgagttttttgaatagcttcactcatttctagc

SEQ ID NO: 32735 - DNA, 2290 bp, Homo sapiens
  source 1..2290: mol_type = unassigned DNA
atttccttctagaagccaggagcaaaggacagacctctctctggtataaggaggaagagattgagaagaggaattctccagagtctattaactatactacatcaacgcctccaagatactatggtacccatcccaggggaagtggggctacaagaacagtataaatatctcctattggcataataaatggtgtaccccaagaatatgccaagggatgttttgtagagattttgagactaaggagatttggaaattgtgtggctattagcagtttcattcataatgaaatttataatcccttaaaaaacttggaggaagataattgcaggaagaacaccttgaataagcagaactcagctgtgagatcaggagcaagaggagcacattggaagaatttcgaaaaagggcaccttttctaatttttaatacttggctgggttaatctgaaactatgtcagaagaagtggcatgataacaagatcctgagactcaagagaaaagggagattgagtgggaatgcctctagttcccacggctcctcctgtgaacagcacagctacacggcccggctgattcattcagagggcgggactcaccaggccctacgtggagaaatgccattggcccatagtttatctttcactttcctgccctgagtgtgagcaagaatttcctgcggttcctctaggaaaattcctttgtgcagatcaggcccgtggattgggatctgtgaacaagaggaacctcagcagccaggacaggcaggagcagtggaatagctactatggcttctggaatcctggttaatgtaaaggaggaggtgacctgccccatctgcctggaactcctgacacaacccctgagcctggactgcggccacagcttctgccaagcatgcctcactgcaaaccacaagaagtccatgctagacaaaggagagagtagctgccctgtgtgccggatcagttaccagcctgagaacatacggcctaatcggcatgtagccaacatagtggagaagctcagggaggtcaagttgagcccagaggggcagaaagttgatcattgtgcacgccatggagagaaacttctactcttctgtcaggaggacgggaaggtcatttgctggctttgtgagcggtctcaggagcaccgtggtcaccacacgttcctcacagaggaggttgcccgggagtaccaagtgaagctccaggcagctctggagatgctgaggcagaagcagcaggaagctgaagagttagaagctgacatcagagaagagaaagcttcctggaagactcaaatacagtatgacaaaaccaacgtcttggcagattttgagcaactgagagacatcctggactgggaggagagcaatgagctgcaaaacctggagaaggaggaggaagacattctgaaaagccttacgaactctgaaactgagatggtgcagcagacccagtccctgagagagctcatctcagatctggagcatcggctgcaggggtcagtgatggagctgcttcagggtgtggatggcgtcataaaaaggacggagaacgtgaccttgaagaagccagaaacttttccaaaaaatcaaaggagagtgtttcgagctcctgatctgaaaggaatgctagaagtgtttagagagctgacagatgtccgacgctactggggctggagtgcaatggcacgatctcggttcactgcaacctccacctctcagattcaagcaattctcctgcctcagcctcccaagtagctgggattacaggtgcccaccaccacccctggctaaatttgtattttcagtagagacggggtttccccatgttggttaggctcgtctagaacctctgacctcaggtgatccacccgcctcggcctcccaaagtgctgggattacaggcgtgagccacggcgcccagcctgtgcttattttcttaaaataatttttgtattaaaaacttcacattaaataagtgctaatgttttattgcatagtagggtgactagagttaacaataacctattgcatatattttgaaatagctagaagagaggattttgaaagttctcaacacaaagaaatgacacatatttgaggtgatggatatgctaattaccctggttcggttattacgcaatgtatacatgtatcaaaacatcacactgtaccacataaatatgtatatttattatttgtcaattaaaagcaaaataaaacaaaaaaccttcatctaatactttggatcattgtgaaaaaataaattcctgaagtataaag

SEQ ID NO: 32736 - DNA, 2991 bp, Homo sapiens
  source 1..2991: mol_type = unassigned DNA
gcggttcctctaggaaaattcctttgtgcagatcaggcccgtggattggtgagtgaatcctaaccacgtcttccctggcctgtcttcactcttctccccagaatcaccacttctgcactggtgtctgaaggtgtattgagtgattttgtggagggcagaagtaggaagtctttgggacaaaactgtatttaccttgggatctgtgaacaagaggaacctcagcagccaggacaggcaggagcagtggaatagctactatggcttctggaatcctggttaatgtaaaggaggaggtgacctgccccatctgcctggaactcctgacacaacccctgagcctggactgcggccacagcttctgccaagcatgcctcactgcaaaccacaagaagtccatgctagacaaaggagagagtagctgccctgtgtgccggatcagttaccagcctgagaacatacggcctaatcggcatgtagccaacatagtggagaagctcagggaggtcaagttgagcccagaggggcagaaagttgatcattgtgcacgccatggagagaaacttctactcttctgtcaggaggacgggaaggtcatttgctggctttgtgagcggtctcaggagcaccgtggtcaccacacgttcctcacagaggaggttgcccgggagtaccaagtgaagctccaggcagctctggagatgctgaggcagaagcagcaggaagctgaagagttagaagctgacatcagagaagagaaagcttcctggaagactcaaatacagtatgacaaaaccaacgtcttggcagattttgagcaactgagagacatcctggactgggaggagagcaatgagctgcaaaacctggagaaggaggaggaagacattctgaaaagccttacgaactctgaaactgagatggtgcagcagacccagtccctgagagagctcatctcagatctggagcatcggctgcaggggtcagtgatggagctgcttcagggtgtggatggcgtcataaaaaggacggagaacgtgaccttgaagaagccagaaacttttccaaaaaatcaaaggagagtgtttcgagctcctgatctgaaaggaatgctagaagtgtttagagagctgacagatgtccgacgctactgggttgatgtgacagtggctccaaacaacatttcatgtgctgtcatttctgaagataagagacaagtgagctctccgaaaccacagataatatatggggcacgagggacaagataccagacatttgtgaatttcaattattgtactggcatcctgggctctcaaagtatcacatcagggaaacattactgggaggtagacgtgtccaagaaaactgcttggatcctgggggtatgtgctggcttccaacctgatgcaatgtgtaatattgaaaaaaatgaaaattatcaacctaaatacggctactgggttatagggttagaggaaggagttaaatgtagtgctttccaggatagttccttccatactccttctgttcctttcattgtgcccctctctgtgattatttgtcctgatcgtgttggagttttcctagactatgaggcttgcactgtctcattcttcaatatcacaaaccatggatttctcatctataagttttctcactgttctttttctcagcctgtatttccatatttaaatcctagaaaatgtggagtccccatgactctgtgctcaccaagctcttgaaccttcttacacactcagccccttctgtacagcacctcttgtccaggtgcatctcatacacctgaactcatttgcatcattttaaccatcttttccttgctgtctcccttctttctatttgaacgtccttcactcatcagtaaaatgtaataattgccttgtgccatattgtccccaatattttattgacatttgatagcaatttttttcatcattttccgtactcctaaggaaaactgacctatacctcataaaatgagaccgctatttaggtattacttctgccagatatttatcacccaattgcctctgacactgactaagaagatgaagaaaagcttttcaacagcctttctatatcatcgtgtgataattgttcaccaatgaatgagtccttagccctgtgtcagtttaccctcgatgcccttatttgtgagttaaagagaaaatatcataaatggtatactcttaagtatagaggttttgtatctagaggatctcagttcaactcctgtctctccatataccagcagtgtaactgtgaataacatacttaaatggctgtgcttatttccttttcttttcttttttctttttttttttttttgagatgaagttttgctcttgttccccaggctggagtgcaatggcacgatctcggttcactgcaacctccacctctcagattcaagcaattctcctgcctcagcctcccaagtagctgggattacaggtgcccaccaccacccctggctaaatttgtattttcagtagagacggggtttccccatgttggttaggctcgtctagaacctctgacctcaggtgatccacccgcctcggcctcccaaagtgctgggattacaggcgtgagccacggcgcccagcctgtgcttattttcttaaaataatttttgtattaaaaacttcacattaaataagtgctaatgttttattgcatagtagggtgactagagttaacaataacctattgcatatattttgaaatagctagaagagaggattttgaaagttctcaacacaaagaaatgacacatatttgaggtgatggatatgctaattaccctggttcggttattacgcaatgtatacatgtatcaaaacatcacactgtaccacataaatatgtatatttattatttgtcaattaaaagcaaaataaaacaaaaaaccttcatctaatactttggatcattgtgaaaaaataaattcctgaagtataaagcatcta

SEQ ID NO: 32737 - DNA, 3170 bp, Homo sapiens
  source 1..3170: mol_type = unassigned DNA
ctttgtgcagatcaggcccgtggattggtgagtgaatcctaaccacgtcttccctggcctgtcttcactcttctccccagaatcaccacttctgcactggtgtctgaaggtgtattgagtgattttgtggagggcagaagtaggaagtctttgggacaaaactgtatttaccttgggatctgtgaacaagaggaacctcagcagccaggacaggcaggagcagtggaatagctactatggcttctggaatcctggttaatgtaaaggaggaggtgacctgccccatctgcctggaactcctgacacaacccctgagcctggactgcggccacagcttctgccaagcatgcctcactgcaaaccacaagaagtccatgctagacaaaggagagagtagctgccctgtgtgccggatcagttaccagcctgagaacatacggcctaatcggcatgtagccaacatagtggagaagctcagggaggtcaagttgagcccagaggggcagaaagttgatcattgtgcacgccatggagagaaacttctactcttctgtcaggaggacgggaaggtcatttgctggctttgtgagcggtctcaggagcaccgtggtcaccacacgttcctcacagaggaggttgcccgggagtaccaagtgaagctccaggcagctctggagatgctgaggcagaagcagcaggaagctgaagagttagaagctgacatcagagaagagaaagcttcctggaagactcaaatacagtatgacaaaaccaacgtcttggcagattttgagcaactgagagacatcctggactgggaggagagcaatgagctgcaaaacctggagaaggaggaggaagacattctgaaaagccttacgaactctgaaactgagatggtgcagcagacccagtccctgagagagctcatctcagatctggagcatcggctgcaggggtcagtgatggagctgcttcagggtgtggatggcgtcataaaaaggacggagaacgtgaccttgaagaagccagaaacttttccaaaaaatcaaaggagagtgtttcgagctcctgatctgaaaggaatgctagaagtgtttagagagctgacagatgtccgacgctactggggtaaggagaagtcacattatcataagccaccctgcggcttatcattattattatctttatcttttagaattttatgttctctattaggctcatgttttaagatttatgattctccttccaagacacacataacttacccctccttataacttctaaacaaggttcctcccagttttctctcaagtctttatcaagatttctctcatatcacaaataaagttacattatatcccttagctgacctgttaatttttctacagttgatgtgacagtggctccaaacaacatttcatgtgctgtcatttctgaagataagagacaagtgagctctccgaaaccacagataatatatggggcacgagggacaagataccagacatttgtgaatttcaattattgtactggcatcctgggctctcaaagtatcacatcagggaaacattactgggaggtagacgtgtccaagaaaactgcttggatcctgggggtatgtgctggcttccaacctgatgcaatgtgtaatattgaaaaaaatgaaaattatcaacctaaatacggctactgggttatagggttagaggaaggagttaaatgtagtgctttccaggatagttccttccatactccttctgttcctttcattgtgcccctctctgtgattatttgtcctgatcgtgttggagttttcctagactatgaggcttgcactgtctcattcttcaatatcacaaaccatggatttctcatctataagttttctcactgttctttttctcagcctgtatttccatatttaaatcctagaaaatgtggagtccccatgactctgtgctcaccaagctcttgaaccttcttacacactcagccccttctgtacagcacctcttgtccaggtgcatctcatacacctgaactcatttgcatcattttaaccatcttttccttgctgtctcccttctttctatttgaacgtccttcactcatcagtaaaatgtaataattgccttgtgccatattgtccccaatattttattgacatttgatagcaatttttttcatcattttccgtactcctaaggaaaactgacctatacctcataaaatgagaccgctatttaggtattacttctgccagatatttatcacccaattgcctctgacactgactaagaagatgaagaaaagcttttcaacagcctttctatatcatcgtgtgataattgttcaccaatgaatgagtccttagccctgtgtcagtttaccctcgatgcccttatttgtgagttaaagagaaaatatcataaatggtatactcttaagtatagaggttttgtatctagaggatctcagttcaactcctgtctctccatataccagcagtgtaactgtgaataacatacttaaatggctgtgcttatttccttttcttttcttttttctttttttttttttttgagatgaagttttgctcttgttccccaggctggagtgcaatggcacgatctcggttcactgcaacctccacctctcagattcaagcaattctcctgcctcagcctcccaagtagctgggattacaggtgcccaccaccacccctggctaaatttgtattttcagtagagacggggtttccccatgttggttaggctcgtctagaacctctgacctcaggtgatccacccgcctcggcctcccaaagtgctgggattacaggcgtgagccacggcgcccagcctgtgcttattttcttaaaataatttttgtattaaaaacttcacattaaataagtgctaatgttttattgcatagtagggtgactagagttaacaataacctattgcatatattttgaaatagctagaagagaggattttgaaagttctcaacacaaagaaatgacacatatttgaggtgatggatatgctaattaccctggttcggttattacgcaatgtatacatgtatcaaaacatcacactgtaccacataaatatgtatatttattatttgtcaattaaaagcaaaataaaacaaaaaa

SEQ ID NO: 32738 - DNA, 1287 bp, Homo sapiens
  source 1..1287: mol_type = unassigned DNA
agtttatctttcactttcctgccctgagtgtgagcaagaatttcctgcggttcctctaggaaaattcctttgtgcagatcaggcccgtggattggtgagtgaatcctaaccacgtcttccctggcctgtcttcactcttctccccagaatcaccacttctgcactggtgtctgaaggtgtattgagtgattttgtggagggcagaagtaggaagtctttgggacaaaactgtatttaccttgggatctgtgaacaagaggaacctcagcagccaggacaggcaggagcagtggaatagctactatggcttctggaatcctggttaatgtaaaggaggaggtgacctgccccatctgcctggaactcctgacacaacccctgagcctggactgcggccacagcttctgccaagcatgcctcactgcaaaccacaagaagtccatgctagacaaaggagagagtagctgccctgtgtgccggatcagttaccagcctgagaacatacggcctaatcggcatgtagccaacatagtggagaagctcagggaggtcaagttgagcccagaggggcagaaagttgatcattgtgcacgccatggagagaaacttctactcttctgtcaggaggacgggaaggtcatttgctggctttgtgagcggtctcaggagcaccgtggtcaccacacgttcctcacagaggaggttgcccgggagtaccaagtgaagctccaggcagctctggagatgctgaggcagaagcagcaggaagctgaagagttagaagctgacatcagagaagagaaagcttcctggaagactcaaatacagtatgacaaaaccaacgtcttggcagattttgagcaactgagagacatcctggactgggaggagagcaatgagctgcaaaacctggagaaggaggaggaagacattctgaaaagccttacgaactctgaaactgagatggtgcagcagacccagtccctgagagagctcatctcagatctggagcatcggctgcaggggtcagtgatggagctgcttcaggctggagtgcagtgtttaattcttaggacggagaacgtgaccttgaagaagccagaaacttttccaaaaaatcaaaggagagtgtttcgagctcctgatctgaaaggaatgctagaagtgtttagagagctgacagatgtccgacgctactggggctggagtgcaatggcacgatctcggttcactgcaacctccacctctcagattcaagcaattctcctgcctcagcctcccaagtag

SEQ ID NO: 32739 - DNA, 2029 bp, Homo sapiens
  source 1..2029: mol_type = unassigned DNA
agtttatctttcactttcctgccctgagtgtgagcaagaatttcctgcggttcctctaggaaaattcctttgtgcagatcaggcccgtggattgggatctgtgaacaagaggaacctcagcagccaggacaggcaggagcagtggaatagctactatggcttctggaatcctggttaatgtaaaggaggaggtgacctgccccatctgcctggaactcctgacacaacccctgagcctggactgcggccacagcttctgccaagcatgcctcactgcaaaccacaagaagtccatgctagacaaaggagagagtagctgccctgtgtgccggatcagttaccagcctgagaacatacggcctaatcggcatgtagccaacatagtggagaagctcagggaggtcaagttgagcccagaggggcagaaagttgatcattgtgcacgccatggagagaaacttctactcttctgtcaggaggacgggaaggtcatttgctggctttgtgagcggtctcaggagcaccgtggtcaccacacgttcctcacagaggaggttgcccgggagtaccaagtgaagctccaggcagctctggagatgctgaggcagaagcagcaggaagctgaagagttagaagctgacatcagagaagagaaagcttcctggaagactcaaatacagtatgacaaaaccaacgtcttggcagattttgagcaactgagagacatcctggactgggaggagagcaatgagctgcaaaacctggagaaggaggaggaagacattctgaaaagccttacgaactctgaaactgagatggtgcagcagacccagtccctgagagagctcatctcagatctggagcatcggctgcaggggtcagtgatggagctgcttcagggtgtggatggcgtcataaaaaggacggagaacgtgaccttgaagaagccagaaacttttccaaaaaatcaaaggagagtgtttcgagctcctgatctgaaaggaatgctagaagtgtttagagagctgacagatgtccgacgctactggggctggagtgcaatggcacgatctcggttcactgcaacctccacctctcagattcaagcaattctcctgcctcagcctcccaagtagctgggattacaggtgcccaccaccacccctggctaaatttgtattttcagtagagacggggtttccccatgttggttaggctcgtctagaacctctgacctcaggtgatccacccgcctcggcctcccaaagtgctgggattacaggcgtgagccacggcgcccagcctgtgcttattttcttaaaataatttttgtattaaaaacttcacattaaataagtgctaatgttttattgcatagtagggtgactagagttaacaataacctattgcatatattttgaaatagctagaagagaggattttgaaagttctcaacacaaagaaatgacacatatttgaggtgatggatatgctaattaccctggttcggttattacgcaatgtatacatgtatcaaaacatcacactgtaccacataaatatgtatatttattatttgtcaattaaaagcaaaataaaacaaaaaaccttcatctaatactttggatcattgtgaaaaaataaattcctgaagtataaagcatctatctaagtgtcttgatctaataagtacttgttctacaaattattgaaaaacataaactctgttaatgtctcatggaacaggttgtgccttcagggaaactaggattggatttactaaattctcattttttagatctcagatactactgtcaaaatgacttcaattctgccttctatatataatacacacatatatttaggattttattgtaattctagtgttgctacatattagtctttatcaaacaaactgaattatgtgggaatcagtttattaattgtaaaaaataattataataaaattagctgatgtagttttttaaaagttaaacgagttttttgaatagcttcactcatttctagc

SEQ ID NO: 32740 - DNA, 1054 bp, Homo sapiens
  source 1..1054: mol_type = unassigned DNA
tccgttctgctggaacacaaacgcgcttctcagtttctctggaggaacttggttggcgaagagcttggcgcttcttgtaaaccttgtcccgctggacaaagacttgtgaaggaacacggagtgccaccaggactccgtggccctccccgcctctctctcctttttcccttcatggcggtgaagctgtggacgcttctcttcaggaggtgagctccagatgagacgccacatcccagcggagtcccggaagggtcaccccgcaggtctaaggcccgcctgttctgtgccgtgacctgtgctaccgaagtcatctgttgctgtagggaggccagggactcagccgatgcctcaatggccaactgcagggatctgtgaacaagaggaacctcagcagccaggacaggcaggagcagtggaatagctactatggcttctggaatcctggttaatgtaaaggaggaggtgacctgccccatctgcctggaactcctgacacaacccctgagcctggactgcggccacagcttctgccaagcatgcctcactgcaaaccacaagaagtccatgctagacaaaggagagagtagctgccctgtgtgccggatcagttaccagcctgagaacatacggcctaatcggcatgtagccaacatagtggagaagctcagggaggtcaagttgagcccagaggggcagaaagttgatcattgtgcacgccatggagagaaacttctactcttctgtcaggaggacgggaaggtcatttgctggctttgtgagcggtctcaggagcaccgtggtcaccacacgttcctcacagaggaggttgcccgggagtaccaagtgaagctccaggcagctctggagatgctgaggcagaagcagcaggaagctgaagagttagaagctgacatcagagaagagaaagcttcctggaagactcaaatacagtatgacaaaaccaacgtcttggcagattttgagcaactgagagacatcctggactgggaggagagcaatgagctgcaaaacctggagaaggaggaggaagaca

SEQ ID NO: 32741 - DNA, 607 bp, Homo sapiens
  source 1..607: mol_type = unassigned DNA
cctttgtgcagatcaggcccgtggattggtgagtgaatcctaaccacgtcttccctggcctgtcttcactcttctccccagaatcaccacttctgcactggtgtctgaaggtgtattgagtgattttgtggagggcagaagtaggaagtctttgggacaaaactgtatttaccttgaatgaagccgcggacgcttgcagtgagtgttacagttcttaaaggcggcatgtccggagtttcttccttctgatgttcggatgtgttcagagtttcttctttctggtgggttcgtggtctcgctggctcaggagggaagctgcagaccttcgcgggatctgtgaacaagaggaacctcagcagccaggacaggcaggagcagtggaatagctactatggcttctggaatcctggttaatgtaaaggaggaggtgacctgccccatctgcctggaactcctgacacaacccctgagcctggactgcggccacagcttctgccaagcatgcctcactgcaaaccacaagaagtccatgctagacaaaggagagagtagctgccctgtgtgccggatcagttaccagcctgagaacatacggcctaatcggcat

SEQ ID NO: 32742 - DNA, 2759 bp, Homo sapiens
  source 1..2759: mol_type = unassigned DNA
gtgaacaagaggaacctcagcagccaggacaggcaggagcagtggaatagctactatggcttctggaatcctggttaatgtaaaggaggaggtgacctgccccatctgcctggaactcctgacacaacccctgagcctggactgcggccacagcttctgccaagcatgcctcactgcaaaccacaagaagtccatgctagacaaaggagagagtagctgccctgtgtgccggatcagttaccagcctgagaacatacggcctaatcggcatgtagccaacatagtggagaagctcagggaggtcaagttgagcccagaggggcagaaagttgatcattgtgcacgccatggagagaaacttctactcttctgtcaggaggacgggaaggtcatttgctggctttgtgagcggtctcaggagcaccgtggtcaccacacgttcctcacagaggaggttgcccgggagtaccaagtgaagctccaggcagctctggagatgctgaggcagaagcagcaggaagctgaagagttagaagctgacatcagagaagagaaagcttcctggaagactcaaatacagtatgacaaaaccaacgtcttggcagattttgagcaactgagagacatcctggactgggaggagagcaatgagctgcaaaacctggagaaggaggaggaagacattctgaaaagccttacgaactctgaaactgagatggtgcagcagacccagtccctgagagagctcatctcagatctggagcatcggctgcaggggtcagtgatggagctgcttcaggacggagaacgtgaccttgaagaagccagaaacttttccaaaaaatcaaaggagagtgtttcgagctcctgatctgaaaggaatgctagaagtgtttagagagctgacagatgtccgacgctactgggttgatgtgacagtggctccaaacaacatttcatgtgctgtcatttctgaagataagagacaagtgagctctccgaaaccacagataatatatggggcacgagggacaagataccagacatttgtgaatttcaattattgtactggcatcctgggctctcaaagtatcacatcagggaaacattactgggaggtagacgtgtccaagaaaactgcttggatcctgggggtatgtgctggcttccaacctgatgcaatgtgtaatattgaaaaaaatgaaaattatcaacctaaatacggctactgggttatagggttagaggaaggagttaaatgtagtgctttccaggatagttccttccatactccttctgttcctttcattgtgcccctctctgtgattatttgtcctgatcgtgttggagttttcctagactatgaggcttgcactgtctcattcttcaatatcacaaaccatggatttctcatctataagttttctcactgttctttttctcagcctgtatttccatatttaaatcctagaaaatgtggagtccccatgactctgtgctcaccaagctcttgaaccttcttacacactcagccccttctgtacagcacctcttgtccaggtgcatctcatacacctgaactcatttgcatcattttaaccatcttttccttgctgtctcccttctttctatttgaacgtccttcactcatcagtaaaatgtaataattgccttgtgccatattgtccccaatattttattgacatttgatagcaatttttttcatcattttccgtactcctaaggaaaactgacctatacctcataaaatgagaccgctatttaggtattacttctgccagatatttatcacccaattgcctctgacactgactaagaagatgaagaaaagcttttcaacagcctttctatatcatcgtgtgataattgttcaccaatgaatgagtccttagccctgtgtcagtttaccctcgatgcccttatttgtgagttaaagagaaaatatcataaatggtatactcttaagtatagaggttttgtatctagaggatctcagttcaactcctgtctctccatataccagcagtgtaactgtgaataacatacttaaatggctgtgcttatttccttttcttttcttttttctttttttttttttttgagatgaagttttgctcttgttccccaggctggagtgcaatggcacgatctcggttcactgcaacctccacctctcagattcaagcaattctcctgcctcagcctcccaagtagctgggattacaggtgcccaccaccacccctggctaaatttgtattttcagtagagacggggtttccccatgttggttaggctcgtctagaacctctgacctcaggtgatccacccgcctcggcctcccaaagtgctgggattacaggcgtgagccacggcgcccagcctgtgcttattttcttaaaataatttttgtattaaaaacttcacattaaataagtgctaatgttttattgcatagtagggtgactagagttaacaataacctattgcatatattttgaaatagctagaagagaggattttgaaagttctcaacacaaagaaatgacacatatttgaggtgatggatatgctaattaccctggttcggttattacgcaatgtatacatgtatcaaaacatcacactgtaccacataaatatgtatatttattatttgtcaattaaaagcaaaataaaacaaaaaaccttcatctaatactttggatcattgtgaaaaaataaattcctgaagtataaa

SEQ ID NO: 32743 - DNA, 2047 bp, Homo sapiens
  source 1..2047: mol_type = unassigned DNA
agagcatgatggggcacgcgcggtagcgcgaggcggggcatgtaaccatagcgtgcgggtcatgatgaggcacggacgtggggggttaggtggggcacgtaattggagctcgcggggcaggatggggcatctaactggagcgacagagagcacgatggggcacttacaggggccggaggctggcccgggcagtgagtgtggatggcttggcaggtgagcctgctggagctggaggactggcttcagtgtcccatctgcctggaggtcttcaaggagcccctgatgctgcagtgtggccactcttactgcaagggctgcctggtttccctgtcctgccacctggatgccgagctgcgctgccccgtgtgccggcaggcggtggacggcagcagctccctgcccaacgtctccctggccagggtgatcgaagccctgaggctccctggggacccggagcccaaggtctgcgtgcaccaccggaacccgctcagccttttctgcgagaaggaccaggagctcatctgtggcctctgcggtctgctgggctcccaccaacaccacccggtcacgcccgtctccaccgtctacagccgcatgaaggaggagctcgcagccctcatctctgagctgaagcaggagcagaaaaaggtggatgagctcatcgccaaactggtgaacaaccggacccgaatcgtcaatgagtcggatgtcttcagctgggtgatccgccgcgagttccaggagctgcaccacctggtggatgaggagaaggcccgctgcctggaggggatagggggtcacacccgtggcctggtggcctccctggacatgcagctggagcaggcccagggaacccgggagcggctggcccaagccgagtgtgtgctggaacagttcggcaatgaggaccaccacaagttcatccggaagttccactccatggcctccagagcagagatgccgcaggcccggcccttagaaggcgcattcagccccatctccttcaagccaggcctccaccaggctgacatcaagctgaccgtgtggaaaaggctcttccggaaagttttgccagccccggagcctctcaagttggaccctgccactgcccacccactcctggagctctccaagggcaacacggtggtgcagtgcgggcttctggcccagcggcgagccagccagcctgagcgcttcgactacagcacctgcgtcctggccagccgcggcttctcctgcggccgccactactgggaggtggtggtgggcagcaagagcgactggcgcctgggggtcatcaagggcacagccagccgtaagggcaagctgaacaggtcccccgagcacggcgtgtggctgatcggcctgaaggagggccgggtgtacgaagcctttgcctgcccccgggtacccctgcccgtggccggccacccccaccgcatcgggctctacctgcactatgagcagggcgaactcaccttcttcgatgccgaccgccccgatgacctgcggccgctctacaccttccaggccgacttccagggcaagctctaccccatcctggacacctgctggcacgagaggggcagcaactcgctgcccatggtgctgcccccgcccagcgggcctggccccctcagccccgagcagcccaccaagctgtagggccgcccggagtcctgccggcccacaggcccatcccggcggggcaccggggactcgcgggcttctgctgggtcccgcctgaggtgatatcgtcactgtttaggaaggtcttcaggcctgtgtgtccctggaacatgtaatgatagggaacaggaccccagtccctttcccctcagccaagggtgtatttgtaaacttcggcccccaggccttggcagccagggacacactgaaatccccatggttcctgccacttgctaaccatgctatctgcgcagacgcttccgagggcagaaatagtcccatgtataccttttccatattactgtgaactttcaactactatcaaggataataaatttgacattatttctttctcttt

SEQ ID NO: 32744 - DNA, 1599 bp, Homo sapiens
  source 1..1599: mol_type = unassigned DNA
tttcccacttctgactctgtgcctgctgttccctgctgggaagaaggaaagccagtgatgctggcttgaggctgtagtgggaggcccagcggattgtgagaagccagcccgggcagtgagtgtggatggcttggcaggtgagcctgctggagctggaggactggcttcagtgtcccatctgcctggaggtcttcaaggagcccctgatgctgcagtgtggccactcttactgcaagggctgcctggtttccctgtcctgccacctggatgccgagctgcgctgccccgtgtgccggcaggcggtggacggcagcagctccctgcccaacgtctccctggccagggtgatcgaagccctgaggctccctggggacccggagcccaaggtctgcgtgcaccaccggaacccgctcagccttttctgcgagaaggaccaggagctcatctgtggcctctgcggtctgctgggctcccaccaacaccacccggtcacgcccgtctccaccgtctacagccgcatgaaggaggagctcgcagccctcatctctgagctgaagcaggagcagaaaaaggtggatgagctcatcgccaaactggtgaacaaccggacccgaatcgtcaatgagtcggatgtcttcagctgggtgatccgccgcgagttccaggagctgcaccacctggtggatgaggagaaggcccgctgcctggaggggatagggggtcacacccgtggcctggtggcctccctggacatgcagctggagcaggcccagggaacccgggagcggctggcccaagccgagtgtgtgctggaacagttcggcaatgaggaccaccacaagttcatccggaagttccactccatggcctccagagcagagatgccgcaggcccggcccttagaaggcgcattcagccccatctccttcaagccaggcctccaccaggctgacatcaagctgaccgtgtggaaaaggctcttccggaaagttttgccagccccggagcctctcaagttggaccctgccactgcccacccactcctggagctctccaagggcaacacggtggtgcagtgcgggcttctggcccagcggcgagccagccagcctgagcgcttcgactacagcacctgcgtcctggccagccgcggcttctcctgcggccgccactactgggaggtggtggtgggcagcaagagcgactggcgcctgggggtcatcaagggcacagccagccgtaagggcaagctgaacaggtcccccgagcacggcgtgtggctgatcggcctgaaggagggccgggtgtacgaagcctttgcctgcccccgggtacccctgcccgtggccggccacccccaccgcatcgggctctacctgcactatgagcagggcgaactcaccttcttcgatgccgaccgccccgatgacctgcggccgctctacaccttccaggccgacttccagggcaagctctaccccatcctggacacctgctggcacgagaggggcagcaactcgctgcccatggtgctgcccccgcccagcgggcctggccccctcagccccgagcagcccaccaagctgtagggccgcccgg

SEQ ID NO: 32745 - DNA, 3217 bp, Homo sapiens
  source 1..3217: mol_type = unassigned DNA
ctgagtctttcggcctgggtggaggacgcggctgcttcaagtccttggctctgatccaggccacagattccaggattctacaggcaggaaacatcttagaaatcagggttgggcaggcaggagccaggagagtagctacaatgacttcaccagtactggtggacatacgagaagaggtgacctgccctatctgcctggagctcctaacagaacccctgagcatagactgtggccacagcttctgccaagcctgcatcacaccaaatggcagggaatcagtgattggtcaagaaggggaaagaagctgccctgtgtgccagaccagctaccagccagggaacctgcggcctaatcggcatctggccaacatagtgaggcggctcagagaggtagtgttgggccctgggaagcagctgaaagcagttctttgtgcagaccatggagaaaaactgcagctcttctgtcaggaggatgggaaggtcatttgctggctttgtgagcggtctcaggagcaccgtggtcaccacacgttcctcgtggaggaggttgcccaggagtaccaggagaagtttcaggagtctctaaagaagctgaagaacgaggagcaggaagctgagaagctaacagcttttatcagagagaagaaaacatcctggaagaatcagatggagcctgagagatgcaggatccagacagagtttaatcagctgcgaaatatcctagacagagtggagcaacgggagctgaaaaagctggaacaggaagagaagaaggggctacgaattatagaagaggctgagaatgatctggtccaccagacccagtcgctgcgagagctcatctcggatctggagcgtcgatgtcaggggtcaacaatggagctgctgcaggatgtgagtgatgtcacagaaaggagtgagttctggaccctgaggaagccagaagctctccctacaaagctgagaagtatgttccgagccccagatctgaaaaggatgctgcgagtgtgtagagagctgacagatgtccaaagctactgggttgacgtgaccctgaatccacacacagctaatttaaatcttgtcctggctaaaaaccggagacaagtgaggtttgtgggagctaaagtatctggaccttcctgtctggaaaagcattatgactgtagtgtcctgggctcccagcacttctcctctggtaagcattactgggaggtagatgtggccaagaagactgcctggatcctgggggtatgcagcaattcactgggacctacattctctttcaaccattttgctcaaaatcacagtgcttactccaggtatcagcctcagagtggatactgggtgattgggttacagcataaccatgaatatagggcctatgaggattcttccccttccctgcttctctccatgacagtgccccctcgccgtgttggggttttcttagattatgaggctggtactgtctccttttataatgtcacaaaccatggcttccccatctacactttctctaaatattactttcccactactctttgtccatattttaatccttgcaactgtgtaattcctatgaccctgcgtcgtccaagctcttgaatattcttctgttcccacccacttctgataagtaccctgaggcttatcagcatgtgattctcccttctgatcttctgtttttctgtgttctcaattcttttgttgttttttggtttttgaatcttttttgagatggaatctcgctctgtcgcccaggctggagtgcactggcgcaatctcggctcactgcaacctctgcctcctgggttcaagcgaacctcctgcctcagcatcccaagtagctgggattacaggcacccaccaccatgcccaactaatttttgtatttttatagagatagggtttcaccgtgttggccaggctgatctcgaactcctgaccgcaagtgatccacccgcctcggtctcccaaagtgctgggattacagatgtgagccgccgcgcccagacagttctttcgttttaaacagttactcagtactaggatgcacccagtggtgagagtaagcatctttgactgatgacaggtcttgaggtggatagggggcgctttcagtattttgccattaagcatagtatttgatgcaggttttttttgattgatgcaggggatcaaatttaggaagttctgatctgttaatttactacaagtttttgtataaaatgaaaactcgtattctacctatgtcttttctgtaaattattgagacaattgtgtatcatttttgttctgttaatgtggcttagtacattgatttacttcaatttgttaccacaacttgctgaaatacaccattattatttgttgtatgcaatactggatttattttgataacgtattgtttagattttgttctcatctatgttaatgaaagaaattggcctgtatttttacattcttgtaatatctttgccaggttctataaaatgcaataataagcaaataaattactttgtttttgtataagtatgtataggattgagctctaaaaccaaaccattataatgataatttgggtagcttcaaactcaaattgaagagagtcttcactacaatcttcactacaacctttggccttcctctctacatttaagagtagcaatagaacaataaaaaaaaatacgtctttcaaattaattgcagtaaaaacaaaagagtagtggggagagaaaaacaatccaatacatatttttctctcagaatagaaagaaaacacaaagagaaaatatgaacaatataaagcacttaaaggaagaggatgatttcttccagcttttccacactctctttatgcgcaggaacaaacagctgttgagtgagctgctatgactttggtagagaggtgcaatatgttttttgaaccagctataaaagaaattaagaggtacatgtgagggtagaaacaaatatcaaggatgagaatggcactggctgtcccatatggtatccaggagccaccaatgtctgttgagtacttcatacatgcctagtctgaattgagatgtgctcaatgtataaaatatataccagatttcaaatacctacttcaaaaaataatgtaaaatatctcactaataacttttcctttgtgtattgcaatgataatatgttggctctattggattaaataaagtatgttattcatttta

SEQ ID NO: 32746 - DNA, 3403 bp, Homo sapiens
  source 1..3403: mol_type = unassigned DNA
gccttccgcaaactcctgacctgtgggtccgtccgttcaacggccaaaggctggcggaggagggatcccctgcctttctcggaacggaacggagcagagtcgtgcgtggttgagtttagataaaagccgagtgagcgcgctctgttccttaagattagtttaaggtgccttggattgctctgaagagctttgaccacctgatattgcttacatctggaacttcttggcttctcattccccagatgtgcgggtcagagaggattctacaggcaggaaacatcttagaaatcagggttgggcaggcaggagccaggagagtagctacaatgacttcaccagtactggtggacatacgagaagaggtgacctgccctatctgcctggagctcctaacagaacccctgagcatagactgtggccacagcttctgccaagcctgcatcacaccaaatggcagggaatcagtgattggtcaagaaggggaaagaagctgccctgtgtgccagaccagctaccagccagggaacctgcggcctaatcggcatctggccaacatagtgaggcggctcagagaggtagtgttgggccctgggaagcagctgaaagcagttctttgtgcagaccatggagaaaaactgcagctcttctgtcaggaggatgggaaggtcatttgctggctttgtgagcggtctcaggagcaccgtggtcaccacacgttcctcgtggaggaggttgcccaggagtaccaggagaagtttcaggagtctctaaagaagctgaagaacgaggagcaggaagctgagaagctaacagcttttatcagagagaagaaaacatcctggaagaatcagatggagcctgagagatgcaggatccagacagagtttaatcagctgcgaaatatcctagacagagtggagcaacgggagctgaaaaagctggaacaggaagagaagaaggggctacgaattatagaagaggctgagaatgatctggtccaccagacccagtcgctgcgagagctcatctcggatctggagcgtcgatgtcaggggtcaacaatggagctgctgcaggatgtgagtgatgtcacagaaaggagtgagttctggaccctgaggaagccagaagctctccctacaaagctgagaagtatgttccgagccccagatctgaaaaggatgctgcgagtgtgtagagagctgacagatgtccaaagctactgggttgacgtgaccctgaatccacacacagctaatttaaatcttgtcctggctaaaaaccggagacaagtgaggtttgtgggagctaaagtatctggaccttcctgtctggaaaagcattatgactgtagtgtcctgggctcccagcacttctcctctggtaagcattactgggaggtagatgtggccaagaagactgcctggatcctgggggtatgcagcaattcactgggacctacattctctttcaaccattttgctcaaaatcacagtgcttactccaggtatcagcctcagagtggatactgggtgattgggttacagcataaccatgaatatagggcctatgaggattcttccccttccctgcttctctccatgacagtgccccctcgccgtgttggggttttcttagattatgaggctggtactgtctccttttataatgtcacaaaccatggcttccccatctacactttctctaaatattactttcccactactctttgtccatattttaatccttgcaactgtgtaattcctatgaccctgcgtcgtccaagctcttgaatattcttctgttcccacccacttctgataagtaccctgaggcttatcagcatgtgattctcccttctgatcttctgtttttctgtgttctcaattcttttgttgttttttggtttttgaatcttttttgagatggaatctcgctctgtcgcccaggctggagtgcactggcgcaatctcggctcactgcaacctctgcctcctgggttcaagcgaacctcctgcctcagcatcccaagtagctgggattacaggcacccaccaccatgcccaactaatttttgtatttttatagagatagggtttcaccgtgttggccaggctgatctcgaactcctgaccgcaagtgatccacccgcctcggtctcccaaagtgctgggattacagatgtgagccgccgcgcccagacagttctttcgttttaaacagttactcagtactaggatgcacccagtggtgagagtaagcatctttgactgatgacaggtcttgaggtggatagggggcgctttcagtattttgccattaagcatagtatttgatgcaggttttttttgattgatgcaggggatcaaatttaggaagttctgatctgttaatttactacaagtttttgtataaaatgaaaactcgtattctacctatgtcttttctgtaaattattgagacaattgtgtatcatttttgttctgttaatgtggcttagtacattgatttacttcaatttgttaccacaacttgctgaaatacaccattattatttgttgtatgcaatactggatttattttgataacgtattgtttagattttgttctcatctatgttaatgaaagaaattggcctgtatttttacattcttgtaatatctttgccaggttctataaaatgcaataataagcaaataaattactttgtttttgtataagtatgtataggattgagctctaaaaccaaaccattataatgataatttgggtagcttcaaactcaaattgaagagagtcttcactacaatcttcactacaacctttggccttcctctctacatttaagagtagcaatagaacaataaaaaaaaatacgtctttcaaattaattgcagtaaaaacaaaagagtagtggggagagaaaaacaatccaatacatatttttctctcagaatagaaagaaaacacaaagagaaaatatgaacaatataaagcacttaaaggaagaggatgatttcttccagcttttccacactctctttatgcgcaggaacaaacagctgttgagtgagctgctatgactttggtagagaggtgcaatatgttttttgaaccagctataaaagaaattaagaggtacatgtgagggtagaaacaaatatcaaggatgagaatggcactggctgtcccatatggtatccaggagccaccaatgtctgttgagtacttcatacatgcctagtctgaattgagatgtgctcaatgtataaaatatataccagatttcaaatacctacttcaaaaaataatgtaaaatatctcactaataacttttcctttgtgtattgcaatgataatatgttggctctattggattaaataaagtatgttattcatttta

SEQ ID NO: 32747 - DNA, 2590 bp, Homo sapiens
  source 1..2590: mol_type = unassigned DNA
ggaggacgcggctgcttcaagtccttggctctgatccaggccacagattccaggattctacaggcaggaaacatcttagaaatcagggttgggcaggcaggagccaggagagtagctacaatgacttcaccagtactggtggacatacgagaagaggtgacctgccctatctgcctggagctcctaacagaacccctgagcatagactgtggccacagcttctgccaagcctgcatcacaccaaatggcagggaatcagtgattggtcaagaaggggaaagaagctgccctgtgtgccagaccagctaccagccagggaacctgcggcctaatcggcatctggccaacatagtgaggcggctcagagaggaggatgggaaggtcatttgctggctttgtgagcggtctcaggagcaccgtggtcaccacacgttcctcgtggaggaggttgcccaggagtaccaggagaagtttcaggagtctctaaagaagctgaagaacgaggagcaggaagctgagaagctaacagcttttatcagagagaagaaaacatcctggaagaatcagatggagcctgagagatgcaggatccagacagagtttaatcagctgcgaaatatcctagacagagtggagcaacgggagctgaaaaagctggaacaggaagagaagaaggggctacgaattatagaagaggctgagaatgatctggtccaccagacccagtcgctgcgagagctcatctcggatctggagcgtcgatgtcaggggtcaacaatggagctgctgcaggatgtgagtgatgtcacagaaaggagtgagttctggaccctgaggaagccagaagctctccctacaaagctgagaagtatgttccgagccccagatctgaaaaggatgctgcgagtgtgtagagagctgacagatgtccaaagctactgggttgacgtgaccctgaatccacacacagctaatttaaatcttgtcctggctaaaaaccggagacaagtgaggtttgtgggagctaaagtatctggaccttcctgtctggaaaagcattatgactgtagtgtcctgggctcccagcacttctcctctggtaagcattactgggaggtagatgtggccaagaagactgcctggatcctgggggtatgcagcaattcactgggacctacattctctttcaaccattttgctcaaaatcacagtgcttactccaggtatcagcctcagagtggatactgggtgattgggttacagcataaccatgaatatagggcctatgaggattcttccccttccctgcttctctccatgacagtgccccctcgccgtgttggggttttcttagattatgaggctggtactgtctccttttataatgtcacaaaccatggcttccccatctacactttctctaaatattactttcccactactctttgtccatattttaatccttgcaactgtgtaattcctatgaccctgcgtcgtccaagctcttgaatattcttctgttcccacccacttctgataagtaccctgaggcttatcagcatgtgattctcccttctgatcttctgtttttctgtgttctcaattcttttgttgttttttggtttttgaatcttttttgagatggaatctcgctctgtcgcccaggctggagtgcactggcgcaatctcggctcactgcaacctctgcctcctgggttcaagcgaacctcctgcctcagcatcccaagtagctgggattacaggcacccaccaccatgcccaactaatttttgtatttttatagagatagggtttcaccgtgttggccaggctgatctcgaactcctgaccgcaagtgatccacccgcctcggtctcccaaagtgctgggattacagatgtgagccgccgcgcccagacagttctttcgttttaaacagttactcagtactaggatgcacccagtggtgagagtaagcatctttgactgatgacaggtcttgaggtggatagggggcgctttcagtattttgccattaagcatagtatttgatgcaggttttttttgattgatgcaggggatcaaatttaggaagttctgatctgttaatttactacaagtttttgtataaaatgaaaactcgtattctacctatgtcttttctgtaaattattgagacaattgtgtatcatttttgttctgttaatgtggcttagtacattgatttacttcaatttgttaccacaacttgctgaaatacaccattattatttgttgtatgcaatactggatttattttgataacgtattgtttagattttgttctcatctatgttaatgaaagaaattggcctgtatttttacattcttgtaatatctttgccaggttctataaaatgcaataataagcaaataaattactttgtttttgtataagtatgtataggattgagctctaaaaccaaaccattataatgataatttgggtagcttcaaactcaaattgaagagagtcttcactacaatcttcactacaacctttggccttcctctctacatttaagagtagcaatagaacaataaaaaaaaa

SEQ ID NO: 32748 - DNA, 2949 bp, Homo sapiens
  source 1..2949: mol_type = unassigned DNA
ggagcagagtcgtgcgtggttgagtttagataaaagccgagtgagcgcgctctgttccttaagattagtttaaggtgccttggattgctctgaagagctttgaccacctgatattgcttacatctggaacttcttggcttctcattccccagatgtgcgggtcagagagaccatggagaaaaactgcagctcttctgtcaggaggatgggaaggtcatttgctggcttgtgagcggtctcaggagcaccgtggtcaccacacgttcctcgtggaggaggttgcccaggagtaccaggagaagtttcaggagtctctaaagaagctgaagaacgaggagcaggaagctgagaagctaacagcttttatcagagagaagaaaacatcctggaagaatcagatggagcctgagagatgcaggatccagacagagtttaatcagctgcgaaatatcctagacagagtggagcaacgggagctgaaaaagctggaacaggaagagaagaaggggctacgaattatagaagaggctgagaatgatctggtccaccagacccagtcgctgcgagagctcatctcggatctggagcgtcgatgtcaggggtcaacaatggagctgctgcaggatgtgagtgatgtcacagaaaggagtgagttctggaccctgaggaagccagaagctctccctacaaagctgagaagtatgttccgagccccagatctgaaaaggatgctgcgagtgtgtagagagctgacagatgtccaaagctactgggttgacgtgaccctgaatccacacacagctaatttaaatcttgtcctggctaaaaaccggagacaagtgaggtttgtgggagctaaagtatctggaccttcctgtctggaaaagcattatgactgtagtgtcctgggctcccagcacttctcctctggtaagcattactgggaggtagatgtggccaagaagactgcctggatcctgggggtatgcagcaattcactgggacctacattctctttcaaccattttgctcaaaatcacagtgcttactccaggtatcagcctcagagtggatactgggtgattgggttacagcataaccatgaatatagggcctatgaggattcttccccttccctgcttctctccatgacagtgccccctcgccgtgttggggttttcttagattatgaggctggtactgtctccttttataatgtcacaaaccatggcttccccatctacactttctctaaatattactttcccactactctttgtccatattttaatccttgcaactgtgtaattcctatgaccctgcgtcgtccaagctcttgaatattcttctgttcccacccacttctgataagtaccctgaggcttatcagcatgtgattctcccttctgatcttctgtttttctgtgttctcaattcttttgttgttttttggtttttgaatcttttttgagatggaatctcgctctgtcgcccaggctggagtgcactggcgcaatctcggctcactgcaacctctgcctcctgggttcaagcgaacctcctgcctcagcatcccaagtagctgggattacaggcacccaccaccatgcccaactaatttttgtatttttatagagatagggtttcaccgtgttggccaggctgatctcgaactcctgaccgcaagtgatccacccgcctcggtctcccaaagtgctgggattacagatgtgagccgccgcgcccagacagttctttcgttttaaacagttactcagtactaggatgcacccagtggtgagagtaagcatctttgactgatgacaggtcttgaggtggatagggggcgctttcagtattttgccattaagcatagtatttgatgcaggttttttttgattgatgcaggggatcaaatttaggaagttctgatctgttaatttactacaagtttttgtataaaatgaaaactcgtattctacctatgtcttttctgtaaattattgagacaattgtgtatcatttttgttctgttaatgtggcttagtacattgatttacttcaatttgttaccacaacttgctgaaatacaccattattatttgttgtatgcaatactggatttattttgataacgtattgtttagattttgttctcatctatgttaatgaaagaaattggcctgtatttttacattcttgtaatatctttgccaggttctataaaatgcaataataagcaaataaattactttgtttttgtataagtatgtataggattgagctctaaaaccaaaccattataatgataatttgggtagcttcaaactcaaattgaagagagtcttcactacaatcttcactacaacctttggccttcctctctacatttaagagtagcaatagaacaataaaaaaaaatacgtctttcaaattaattgcagtaaaaacaaaagagtagtggggagagaaaaacaatccaatacatatttttctctcagaatagaaagaaaacacaaagagaaaatatgaacaatataaagcacttaaaggaagaggatgatttcttccagcttttccacactctctttatgcgcaggaacaaacagctgttgagtgagctgctatgactttggtagagaggtgcaatatgttttttgaaccagctataaaagaaattaagaggtacatgtgagggtagaaacaaatatcaaggatgagaatggcactggctgtcccatatggtatccaggagccaccaatgtctgttgagtacttcatacatgcctagtctgaattgagatgtgctcaatgtataaaatatataccagatttcaaatacctacttcaaaaaataatgtaaaatatctcactaataacttttcctttgtgtattgcaatgataatatgttggctctattggattaaataaagtatgttattcatttt

SEQ ID NO: 32749 - DNA, 2951 bp, Homo sapiens
  source 1..2951: mol_type = unassigned DNA
ggagcagagtcgtgcgtggttgagtttagataaaagccgagtgagcgcgctctgttccttaagattagtttaaggtgccttggattgctctgaagagctttgaccacctgatattgcttacatctggaacttcttggcttctcattccccagatgtgcgggtcagagagaccatggagaaaaactgcagctcttctgtcaggaggatgggaaggtcatttgctggctttgtgagcggtctcaggagcaccgtggtcaccacacgttcctcgtggaggaggttgcccaggagtaccaggagaagtttcaggagtctctaaagaagctgaagaacgaggagcaggaagctgagaagctaacagcttttatcagagagaagaaaacatcctggaagaatcagatggagcctgagagatgcaggatccagacagagtttaatcagctgcgaaatatcctagacagagtggagcaacgggagctgaaaaagctggaacaggaagagaagaaggggctacgaattatagaagaggctgagaatgatctggtccaccagacccagtcgctgcgagagctcatctcggatctggagcgtcgatgtcaggggtcaacaatggagctgctgcaggatgtgagtgatgtcacagaaaggagtgagttctggaccctgaggaagccagaagctctccctacaaagctgagaagtatgttccgagccccagatctgaaaaggatgctgcgagtgtgtagagagctgacagatgtccaaagctactgggttgacgtgaccctgaatccacacacagctaatttaaatcttgtcctggctaaaaaccggagacaagtgaggtttgtgggagctaaagtatctggaccttcctgtctggaaaagcattatgactgtagtgtcctgggctcccagcacttctcctctggtaagcattactgggaggtagatgtggccaagaagactgcctggatcctgggggtatgcagcaattcactgggacctacattctctttcaaccattttgctcaaaatcacagtgcttactccaggtatcagcctcagagtggatactgggtgattgggttacagcataaccatgaatatagggcctatgaggattcttccccttccctgcttctctccatgacagtgccccctcgccgtgttggggttttcttagattatgaggctggtactgtctccttttataatgtcacaaaccatggcttccccatctacactttctctaaatattactttcccactactctttgtccatattttaatccttgcaactgtgtaattcctatgaccctgcgtcgtccaagctcttgaatattcttctgttcccacccacttctgataagtaccctgaggcttatcagcatgtgattctcccttctgatcttctgtttttctgtgttctcaattcttttgttgttttttggtttttgaatcttttttgagatggaatctcgctctgtcgcccaggctggagtgcactggcgcaatctcggctcactgcaacctctgcctcctgggttcaagcgaacctcctgcctcagcatcccaagtagctgggattacaggcacccaccaccatgcccaactaatttttgtatttttatagagatagggtttcaccgtgttggccaggctgatctcgaactcctgaccgcaagtgatccacccgcctcggtctcccaaagtgctgggattacagatgtgagccgccgcgcccagacagttctttcgttttaaacagttactcagtactaggatgcacccagtggtgagagtaagcatctttgactgatgacaggtcttgaggtggatagggggcgctttcagtattttgccattaagcatagtatttgatgcaggttttttttgattgatgcaggggatcaaatttaggaagttctgatctgttaatttactacaagtttttgtataaaatgaaaactcgtattctacctatgtcttttctgtaaattattgagacaattgtgtatcatttttgttctgttaatgtggcttagtacattgatttacttcaatttgttaccacaacttgctgaaatacaccattattatttgttgtatgcaatactggatttattttgataacgtattgtttagattttgttctcatctatgttaatgaaagaaattggcctgtatttttacattcttgtaatatctttgccaggttctataaaatgcaataataagcaaataaattactttgtttttgtataagtatgtataggattgagctctaaaaccaaaccattataatgataatttgggtagcttcaaactcaaattgaagagagtcttcactacaatcttcactacaacctttggccttcctctctacatttaagagtagcaatagaacaataaaaaaaaatacgtctttcaaattaattgcagtaaaaacaaaagagtagtggggagagaaaaacaatccaatacatatttttctctcagaatagaaagaaaacacaaagagaaaatatgaacaatataaagcacttaaaggaagaggatgatttcttccagcttttccacactctctttatgcgcaggaacaaacagctgttgagtgagctgctatgactttggtagagaggtgcaatatgttttttgaaccagctataaaagaaattaagaggtacatgtgagggtagaaacaaatatcaaggatgagaatggcactggctgtcccatatggtatccaggagccaccaatgtctgttgagtacttcatacatgcctagtctgaattgagatgtgctcaatgtataaaatatataccagatttcaaatacctacttcaaaaaataatgtaaaatatctcactaataacttttcctttgtgtattgcaatgataatatgttggctctattggattaaataaagtatgttattcatttta

SEQ ID NO: 32750 - DNA, 1398 bp, Homo sapiens
  source 1..1398: mol_type = unassigned DNA
aagattagtttaaggtgccttggattgctctgaagagctttgaccacctgatattgcttacatctggaacttcttggcttctcattccccagatgtgcgggtcagagaggagaagtttcaggagtctctaaagaagctgaagaacgaggagcaggaagctgagaagctaacagcttttatcagagagaagaaaacatcctggaagaatcagatggagcctgagagatgcaggatccagacagagtttaatcagctgcgaaatatcctagacagagtggagcaacgggagctgaaaaagctggaacaggaagagaagaaggggctacgaattatagaagaggctgagaatgatctggtccaccagacccagtcgctgcgagagctcatctcggatctggagcgtcgatgtcaggggtcaacaatggagctgctgcaggatgtgagtgatgtcacagaaaggagtgagttctggaccctgaggaagccagaagctctccctacaaagctgagaagtatgttccgagccccagatctgaaaaggatgctgcgagtgtgtagagagctgacagatgtccaaagctactgggttgacgtgaccctgaatccacacacagctaatttaaatcttgtcctggctaaaaaccggagacaagtgaggtttgtgggagctaaagtatctggaccttcctgtctggaaaagcattatgactgtagtgtcctgggctcccagcacttctcctctggtaagcattactgggaggtagatgtggccaagaagactgcctggatcctgggggtatgcagcaattcactgggacctacattctctttcaaccattttgctcaaaatcacagtgcttactccaggtatcagcctcagagtggatactgggtgattgggttacagcataaccatgaatatagggcctatgaggattcttccccttccctgcttctctccatgacagtgccccctcgccgtgttggggttttcttagattatgaggctggtactgtctccttttataatgtcacaaaccatggcttccccatctacactttctctaaatattactttcccactactctttgtccatattttaatccttgcaactgtgtaattcctatgaccctgcgtcgtccaagctcttgaatattcttctgttcccacccacttctgataagtaccctgaggcttatcagcatgtgattctcccttctgatcttctgtttttctgtgttctcaattcttttgttgttttttggtttttgaatcttttttgagatggaatctcgctctgtcgcccaggctggagtgcactggcgcaatctcggctcactgcaacctctgcctcctgggttcaagcgaacctcctgcctcagcatcccaagtagctg

SEQ ID NO: 32751 - DNA, 1767 bp, Homo sapiens
  source 1..1767: mol_type = unassigned DNA
gtctttcggcctgggtggaggacgcggctgcttcaagtccttggctctgatccaggccacagattccagaccatggagaaaaactgcagctcttctgtcaggaggatgggaaggtcatttgctggctttgtgagcggtctcaggagcaccgtggtcaccacacgttcctcgtggaggaggttgcccaggagtaccaggagaagtttcaggagtctctaaagaagctgaagaacgaggagcaggaagctgagaagctaacagcttttatcagagagaagaaaacatcctggaaggcaagggagactttttctgaagatgtcctggggcaggaatcatggcaggtcataggagctgagggcaaaggagtccttgtcctgtctgtcctctgatgccatgactagaagagcttccctttgcctggtcctccactatattccttccaaacagggggaggagaggagaatcagatggagcctgagagatgcaggatccagacagagtttaatcagctgcgaaatatcctagacagagtggagcaacgggagctgaaaaagctggaacaggaagagaagaaggggctacgaattatagaagaggctgagaatgatctggtccaccagacccagtcgctgcgagagctcatctcggatctggagcgtcgatgtcaggggtcaacaatggagctgctgcaggatgtgagtgatgtcacagaaaggagtgagttctggaccctgaggaagccagaagctctccctacaaagctgagaagtatgttccgagccccagatctgaaaaggatgctgcgagtgtgtagagagctgacagatgtccaaagctactgggttgacgtgaccctgaatccacacacagctaatttaaatcttgtcctggctaaaaaccggagacaagtgaggtttgtgggagctaaagtatctggaccttcctgtctggaaaagcattatgactgtagtgtcctgggctcccagcacttctcctctggtaagcattactgggaggtagatgtggccaagaagactgcctggatcctgggggtatgcagcaattcactgggacctacattctctttcaaccattttgctcaaaatcacagtgcttactccaggtatcagcctcagagtggatactgggtgattgggttacagcataaccatgaatatagggcctatgaggattcttccccttccctgcttctctccatgacagtgccccctcgccgtgttggggttttcttagattatgaggctggtactgtctccttttataatgtcacaaaccatggcttccccatctacactttctctaaatattactttcccactactctttgtccatattttaatccttgcaactgtgtaattcctatgaccctgcgtcgtccaagctcttgaatattcttctgttcccacccacttctgataagtaccctgaggcttatcagcatgtgattctcccttctgatcttctgtttttctgtgttctcaattcttttgttgttttttggtttttgaatcttttttgagatggaatctcgctctgtcgcccaggctggagtgcactggcgcaatctcggctcactgcaacctctgcctcctgggttcaagcgaacctcctgcctcagcatcccaagtagctgggattacaggcacccaccaccatgcccaactaatttttgtatttttatagagatagggtttcaccgtgttggccaggctgatctcgaactcctgaccgcaagtgatccacccg

SEQ ID NO: 32752 - DNA, 1060 bp, Homo sapiens
  source 1..1060: mol_type = unassigned DNA
aagattagtttaaggtgccttggattgctctgaagagctttgaccacctgatattgcttacatctggaacttcttggcttctcattccccagatgtgcgggtcagagagaatcagatggagcctgagagatgcaggatccagacagagtttaatcagctgcgaaatatcctagacagagtggagcaacgggagctgaaaaagctggaacaggaagagaagaaggggctacgaattatagaagaggctgagaatgatctggtccaccagacccagtcgctgcgagagctcatctcggatctggagcgtcgatgtcaggggtcaacaatggagctgctgcaggatgtgagtgatgtcacagaaaggagtgagttctggaccctgaggaagccagaagctctccctacaaagctgagaagtatgttccgagccccagatctgaaaaggatgctgcgagtgtgtagagagctgacagatgtccaaagctactgggttgacgtgaccctgaatccacacacagctaatttaaatcttgtcctggctaaaaaccggagacaagtgaggtttgtgggagctaaagtatctggaccttcctgtctggaaaagcattatgactgtagtgtcctgggctcccagcacttctcctctggtaagcattactgggaggtagatgtggccaagaagactgcctggatcctgggggtatgcagcaattcactgggacctacattctctttcaaccattttgctcaaaatcacagtgcttactccaggtatcagcctcagagtggatactgggtgattgggttacagcataaccatgaatatagggcctatgaggattcttccccttccctgcttctctccatgacagtgccccctcgccgtgttggggttttcttagattatgaggctggtactgtctccttttataatgtcacaaaccatggcttccccatctacactttctctaaatattactttcccactactctttgtccatattttaatccttgcaactgtgtaattcctatgaccctgcgtcgtccaagctcttgaata

SEQ ID NO: 32753 - DNA, 9753 bp, Homo sapiens
  source 1..9753: mol_type = unassigned DNA
gacagatttcaatgtctgttgaaggcccccccacaccctccttcagtgccgggggcatggagggatatcttgggctcctgctgttttttaaaatgatgcgagctcatctcctgtcctgggtgtgaacgagtatatcttaccagggatgtaactgaacatttttttctgcattgtgttcctactgagcaacccaagatggccaggaactgctctgagtgcaaggagaagagggcagcacatatcctctgcacctactgcaatcgctggctgtgcagctcttgcacagaggaacaccgacacagccctgtccccgggggcccattctttcctcgggcccagaagggatctccaggagtgaatggtggtcccggagacttcaccttgtattgtcctctacacacacaggaagtactcaagctattctgtgagacatgtgatatgctcacttgccatagctgcctagtggtggaacacaaagaacacaggtgcagacatgttgaagaagttttgcaaaaccagaggatgcttctggaaggtgtgactacacaggtggcacataagaaatccagtctacagacatctgcaaagcaaattgaggacaggatttttgaagtgaagcatcagcataggaaggtggaaaaccagatcaaaatggccaagatggttctgatgaatgagctgaacaaacaggccaatgggctaatagaggaattagaggggattactaatgagagaaagcggaagctggaacagcagttacagagcatcatggttctcaaccgtcagtttgagcatgtgcagaatttcatcaactgggctgtctgcagcaaaaccagtgtcccttttcttttcagcaaagagctgattgtgtttcagatgcagcgattgctggagacaagttgtaacacagatcctggctccccttggagtatcagattcacctgggagcctaacttctggaccaagcagctagcttctcttggctgcataactactgaaggtggacaaatgtccagggcagatgctcctgcttatggaggcttacaggggtcatcacccttttatcaaagccaccagtctccagtggctcagcaagaggctcttagccacccctcacacaagttccagtctccagcagtgtgctcctcatctgtgtgctgctcccactgctccccagtctcgccttccctcaaaggccaggtccccccacccagcatacacccagcccacagcttcaggcagccccctgagatggtgccccagcagctggggtctctgcagtgctctgccctgctgcccagggagaaagagctggcctgcagccctcatccaccaaagctgctgcagccctggctggaaacccagccccccgtggagcaggagagcacatcccagcggctggggcagcagctgacttcccagcccgtgtgcattgtccccccacaggatgttcagcaaggagcccatgcccagcccaccttacagacaccctctatccaagtccagtttggccaccaccagaagctgaagctcagtcactttcagcagcagccacagcagcagctaccacctccaccaccacccctcccccatcccccacctccccttccccctcccccacagcagccacacccacctcttcctccatcccagcatctggcttctagtcagcacgagagccctcctggccctgcctgttctcagaacatggacataatgcatcacaagtttgagctggaggaaatgcagaaggacttggagcttcttctccaggctcaacagcccagcctgcaactgagtcagaccaaatctcctcagcatcttcagcaaaccattgtggggcagatcaactacatcgtgaggcagccagcacctgtccagtcccagagccaggaggagaccctgcaggctacagatgagcccccagcatctcagggctcaaagccggctctccctcttgacaagaatactgctgctgccttgccccaggcgtctggggaagaaacccctctcagtgtccccccagtggacagcaccatccagcactcctctccaaatgtggtgagaaagcactccacctcgctgagcatcatgggcttttccaacactctggagatggagttgtcatctaccaggttggagaggcccctagagccacagatccagagtgtgagcaacctgacagctggtgccccccaggcagtaccaagcctgctgagtgctccccccaaaatggtgtccagcctgacaagtgttcaaaaccaggccatgcccagcctgacaaccagtcacctacagactgtgcccagccttgtgcatagcacattccagtccatgcccaacctgataagtgactcccctcaggctatggcaagcctggcaagtgatcaccctcaggctgggcccagcctaatgtctggtcacacccaggctgtgccgagtctggcaacttgtcctctgcagagcatccctccagtttctgacatgcagccagaaactgggtccagctccagttctggccgaacttcagggagcctgtgtcccagagatggggctgatccctccctggagaatgctctgtgtaaggtaaaactggaggagccaattaacctctctgtgaagaaacctccactggcgccagtggtcagcacgtctacagctctgcagcagtaccagaacccaaaagagtgtgagaattttgaacaaggagccctagagctggatgcaaaagagaaccagagcatcagagccttcaatagtgagcataagattccctatgtgcgactggagcgactcaagatctgtgctgcctcctcaggagagatgcctgtgttcaaactgaagccacagaagaatgatcaggatgggagcttcctgctgatcatcgagtgtggcactgagtcctccagcatgtccattaaggtcagccaggacagactgtctgaggccacccaggccccaggtctggagggaagaaaggtcactgtcacttctttggctgggcagcggccaccagaagtggagggcacatctcctgaagaacacagactcattcctcgaaccccaggagccaagaagggccccccagccccaatagagaatgaggacttctgtgctgtttgcctcaatggcggagagttactgtgctgtgaccgctgccccaaagtgttccacctctcctgccatgtgccagccttgctcagcttcccagggggagagtgggtgtgtaccttgtgccgcagcctgacccagcccgagatggagtacgactgtgagaatgcctgctataaccagcctggaatgcgggcatctcctggcctaagcatgtatgaccagaagaagtgtgagaagctggtattgtccttgtgctgcaataacctcagcctgcccttccatgaacctgtcagccccctggcccggcattattaccagattatcaagaggcccatggacctgtcaatcatccggaggaagctgcaaaagaaggacccagctcactataccaccccagaggaggtggtatcagatgtgcgcctcatgttctggaactgtgctaagttcaattatcctgactccgaggttgcagaggctggccgctgcctggaagtgttctttgagggctggttgaaggagatctacccggagaaacggtttgcccagccaaggcaggaggactcagactccgaggaggtgtctagtgagagtggatgttccactccccagggcttcccgtggcctccctacatgcaggagggcatccaacccaagaggcggcgacgacatatggagaatgaaagagcaaaaagaatgtcatttcgcctggccaacagcatctctcaggtgtgagagccaaaaggagactgggcactctggcagctgttgtcccatactgtcgaccattcctccccatcttgcagcttatcctcttcagagtgtggatggtagatgagtcttgttgaactgtgtagtgctcttctttgccatttgcatctacagcatttatttgggagccgtagtacatccactacagagaagatttcagtaataaacaggaaagaggaaggtatttattattaccagagtaatcagatgtataggctccacttgacaagaccacacctggttaggctcgggaaaacctactttccttggtgaatttttttctgcctgggaaagcagacccgtctaaccttttagtgtccagggctcaggagccatgtatacatctgaactcctcctgggctcagaagtgggtaaaagaagggagagaggtttagacatatggcaggactgtgatccctggcccagcacagccaaagactgtcactgtttgcctttgcttgtcctgtctggatagaggcacctgccatgtgcagactagtggaggcttctagaggccataggtctcaatttgtgcctatttgggttctaacggttttcagggtatttgttttgcatagtcactttcctgatgttgacataggtggctgctgtgaaaatgctgtggatggtgtgacattcttgactgagctgggtggctgtggagagaccacttaaatcttctggttcagatttcacttacagacttagtaagatgtccacttcagagcccgccctctgtgctacttactctgggctaatcacacttctttagggtgagaacctgccttcctagaagtgactgttggtgcttgtcagtggccatacccttcatcatcctcattcagaggtatggatcgtgagttctgcttgtgaatactgtgagacagctgctgtctgcttcaggtccagagttccatgggtggagagagtaacccacaaccagctcactcctctgggcctctcctcctgcttaaagattctagttctcaacctctccaagttcatgagccaaagatcagaagtgagtcttctgaccagcccgcctccaggctgtctacagccccaaaaaagccaacacttttctggcagccctttttgttggaggttagagaaggcctcagggaccaacaggggccagatctagacattcctgggggaagtttgtctaaggtggacagggggaaaaatcaagaggcaaaaagccagtgtcctttggtgaccatgaagcaacctcagagccttagttctcctagaatgcagagagaagcattctggaagccatgggaacaggagctcgaggctgcatcctgaatgcatctgcatggccctcgcagggtgtttgtgaggatactggaggtcaggctacctcccaagcaagggcttggttgagaaggaacccattgctcatattgttgggggagctatgaacctgacatgtcagtggccaggactgagacagctctccctggtcctgtcattgcatggctaatttcaggggagtctgaggtcatggctttatttttgctaacagatgaagttcaaggatgttcttgtttgtagggcctttgctaatgagcagttttttaattagaaaacatttcttctctctttgtgagttgatggtattgctcatttccttctctacccaacctgagagatcatcttcactttaaagcaaaccatgccccttggcttgccattctttcagcagcacatgccacgttctaagcagatgggcttccgtgatcccgttttctagtttggggtaactgagtcttgaatgctttactagtccggcaatctttggacttaggcttctgccctttgagactcacatgactttctggtttggggtctggtcatttccctttcaatttttgaatctccttctctgttcagttggcttggcaaagtaccctctgttctcatgtcactaattcctgctctaggtcatctttcctttgtgcagcccacattcccaccatcctgtgaactttgttgtacttggtgttgggcaactggtgagtgttgtgacaggctcagacctgatccttcctcaggagcaattggagaccacaaatttaaagcagaaatacctgttaaaagcttggctttccttatatgagtgaggctcccagcttgggtgtggcctcctgggctcacggatcagcttgctgggccagagggggtcttagtaatgtgctagagagacacatgctcccttctcatcgtagagagcctgcatgctgagaggctccctttacacacctgcctctcgctggcttttcctttagacctagccaccagtgttttgaatcatggttttgttttgtttttgcatgcaaaaaccagaacatgacttagaaattaaaaaaaaaaaaatcctactagccaagtgactgcctgcagaggctcttcattaacatttgggctgatcctgcttttgacttattcccataatggcccagttttgaagtcagccaagtccttttgtccttgacaacatcatgcagtggaaatacggtgagttctagattcttatgggacagcatgcagccctagaggaaaaattgacttcttgggtatgctgagaaataagacagtaaaatggcttcagttgatgcaaggggattttagttaaaaattggttcaggatttttaaattttattttattttttggctgggcgcggtggctcacgcctgtaatcccagcactttgggaggctgaggtgggtggatcacctaaggacagcagttcgagaccagcctggccaacatagtgaaaccctgtctctactaaaaatacaaatatcagccaggtgtgatggcacatgcctgtaatcccagctacttgggaggctgaggcaggagaattgcttgaatccgggaggtggaggttgcagtgagctgagatcatgccattgcattccagcctgggcaacagaacgagactccgtctcaaaaaaaaaaaaattggttcaggatgaacttgcagagcactcttccacagaacatggttaggttagccctgcctgacttctagcaattgctaactatacaccttgcctgcctctaggacccctacctgagtggcaaccataccttccatatgctctgttccatggcagtccctgccatcccccaccagcggactctggctccctccctgtacccatttctagcaacagctccttgcctggctgctaagacggaggcgcctccttgtttgttcctgggctctgttctgctccctctctcactccatggagtcacttatagtcttcctttctgaacgccagaattgagcctttgctccttctggatcaccccttcctgggcttcttctccatccctcagtactgctaaaattgccctgctcctttagtccatttccatgacctcagccctctctctcctctccttgtcttttaactttctcctggacttcttcctctccccagcatgaacccagagcctatcacacactgatgtttttgtcagcatcctgaactttctcatgcccttcaactttatttatttatttatttatttattttttattttttgagagagagagtctcactctgtcatgcaggctggagtgcagtggtatgatgtcggctcattgcaacctctgccttctgggctcaggtgatcctcccatctcagcctcctgagtagctgggactacaggtgcatgccaccatgcctggctaatttttctactttaggtagagatggagtttcgccatgttgctcaagctggtatcaacactcctgggctcaagcagtctgcttcccttggcctcccaaagtgctgggattacaggcgtgagccactgcgccaggcgtatccccttcaattttgctgaaactatcagccattctccattttcggcatcatcatatttgctgcttccacctcctgggctgctatgcatgacagattcacagttggcagcctcagttgagctctcagtgttgactggaaattctttaacttgttgtgatccctttttttttccccacccatgcctccatctttgtcctccacaaatgactgagctcactgtctacttcacagaagacagcccctaaagcaagagcttccttgcctgctgttcctctctcccctctcattcatctgtgtctgtaactctccccaacccctccattcttgctcctatttaattctctatatcttgaatcctgttgtatgtcctccaagactgctccctcgcttactccactgctcccactccctggagtctccagcctctgtctccactggttacctccacacagcctgcaaacaagttctccacaagattaaaacagcatttctcagagtctgttaccccttacacattttccttgttaaccaagttacttttaaaaagatcctttttaaactgattcttcctcagctgttcttcagccctctatactttttcataaaagtcaccagtgactgcccagttgccaaatagaatgaatacctttcagtgctcagctgtcttgacctctccgcagcatttcacaccacccaccaaccctcagtgaaacaacctcctcccttagcttttatgacaccacaagtctctggattctcagagaatccagaaaaacaagtctctggattctctcctcttacctctcagcccacacaggctgagctgtccttgaaacctagatgggggaaatgtctgtggctgtctgtggtctcttcttttcaggagttgggtagggaggaagaatcacagctgctcctgcttcctctgtctgtctctctatttcctgagtcccttccttttcctgaactcagttctcctcatgccaaccatgtttatgagctcctgctgggaggacagcatctgtgagtccttccctctgtctctcccagacaacacagaggttttagcctgtttgctaagagaccccatctaagtcagcccaagggtgtggattaggttttacagcatccaggccgcagtctggctaaactggattaccaggctggtgggcagctcctcaccatgatcctgcaccagttagagcctgctgtagttgggaaggagcctgggattgtggtaagatgtgtttccgtgcatgtcagtgctgctaaccaggaggagaacctggcagggtgggtgcctgctgctgataacattcggatggagggagactagggagcgcggtggctgctcccttgctggggctcagctggagtcagcatgactccttatatcagggcctttcccacctgtgctgatcaccaccacctgcttgctccagttgtttctggagttggaggcagctattggttgctttcttggaggtaaggaggtatatactagaaagatatctgatttgagagtctgaacaccaaaatttttggctctttccattatgagctgtgtaaccttggatacagtttcctcatctataaagttgtggtgggagaatggctgagaacagtgatctctcagctctccagctgtaaagatgttaattatgattttaactctcaagatcaggccacataaggaacaggggaattccaggggtgggacacagctgggggagtccagaccagggcagggaaaggagactcacaagccaaacagagctgctttggggaaagttcttatcagctggtgctgcttcctgagccatatgcccattcctcaagctgtacccctttcttggctatgtaggatgagttcctcctaggcccttgttaggagtggctattggattctaagcggttggggcatgagggaggatattttaaagggaagtatagctgattttaaaagaacctatacattcaagaacaaataaaaaacagcacttttctttaccaagaa

SEQ ID NO: 32754 - DNA, 3352 bp, Homo sapiens
  source 1..3352: mol_type = unassigned DNA
attggctgccgtcccgcgagcggggcctagagccgggtgtagtattctgggagctgcgggctactgggcctgcgctgccgggctttgggttctgggcctctgccgctctctggccctaagtgctgagctgccgggaacggcagcttctgacgctgggccattggacgctgcggaaccaggcttcttcactttgagtttccgccgcgaagcgccagtccgggccgaggagggagcctttactacttctccctggtttcattcatgttctgaggagggtgtgagaaggaaccatggatcccacagccttggtggaagccattgtggaagaagtggcctgtcccatctgtatgaccttcctgagggagcccatgagcattgactgtggccacagcttctgccacagctgtctctctggactctgggagatcccaggagaatcccagaactggggttacacctgtcccctctgtcgagctcctgtccagccaaggaacctgcggcctaattggcagctggccaatgttgtagaaaaagtccgtctgctaaggctacatccaggaatggggctgaagggtgacctgtgtgagcgccatggggaaaagctgaagatgttctgcaaagaggatgtcttgataatgtgtgaggcctgcagccagtccccagagcatgaggcccacagtgttgtgccaatggaggatgttgcctgggagtacaagtgggaacttcatgaggccctcgaacatctgaagaaagagcaagaagaggcctggaagcttgaagttggtgaaaggaaacgaactgccacctggaagatacaggtggaaacccgaaaacagagtattgtatgggagtttgaaaaataccagcgattactagagaaaaagcagccaccacatcggcagctgggggcagaggtagcagcagctctggccagcctacagcgggaggcagcggagaccatgcagaaactggagttgaaccatagcgagctcatccagcagagccaggtcctgtggaggatgattgcagagttgaaagagaggtcgcagaggcctgtccgctggatgttgcaggatattcaggaagtgttaaacaggagcaaatcttggagcttgcagcagccagaaccaatctccctggagttgaagacagattgccgtgtgctggggctaagagagatcctgaagacttatgcagctgatgtgcgcttggatccagatactgcttactcccgtctcatcgtgtctgaggacagaaaacgtgtgcactatggagacaccaaccagaaactgccagacaatcctgagagattttaccgctataatatcgtcctgggaagccagtgcatctcctcaggccggcactactgggaggtggaggtgggagacaggtctgagtggggcctgggagtatgtaagcaaaatgtagaccggaaggaggtggtctacttatccccccactatggattctgggtgataaggctgaggaagggaaatgagtaccgagcaggcaccgatgagtacccaatcctgtccttgccggtccctcctcgccgggtgggaatcttcgtggattatgaggcccatgacatttctttctacaatgtgactgactgtggctcccacatcttcactttcccccgctatcccttccctgggcgcctcctgccctattttagtccttgctacagcattggaaccaacaacactgctcctctggccatctgctccctggatggggaggactaagaaagctaccaccctaaccagagaggcttggaattgggcctggcccccatggggcttggaggaccgagccactgacaggtatcccctgaaactgagctgagcccagtatccaaggattcctctgtctgatcctttggtctttgctaccaggctgaagtctgtcatgaaaccacttattttaaaaagcagaggcccagtcaaatgagcattgcatcccatgagggaagcacgacagggctgatggtgaggatcagagcagttctaaggtgactcgttggggtaaggatcaggactttgtccatgtagtagccaaccaccctcttccctgattcccgtccggtgtcacagttcagtcagtgaggatgatgaagtagatacagtcttcaggacaccattagatgggctttcccaataggccaaaaaaatgctgcgcatacccagagctggttgttgtgctgaggccagtcagaggatgcttcccctgaggtttgctataactaagcaacctttatgtgactctcaccttctgacctcctggcaagagaaattcagtgcagcagggggacacagacctgcccaagccaccccactgccgttccctctctgagcacaagctgggcaaatcactgtcccttggactccaggagaccagtgtcctagtcttgccttttttctctaagtggcaggatcagaaaacctgcgagctttagtttgtattttcactttatgaatgaggaaactgaaatggccttaagggagcaagttatttctttttttttgacacggagtctcactctgttgcccaggctggagtgcagtggcacgatctcggctcactgcaggctctgcctcctgggttcacgccattctcctgcctcagcttcccgagtagctgggactacaggcgcccaccacgacgcctggctcatttttttgtatttttagtagagacggagtttcaccatgttagctaggatggtctcgatctcctgacctcatgatccgccctcctcagcctcccacagtgctgggattagaggcatgagccactgcgcccggcccctggagcaagttatttcttacaaagctgctgaaggtaagattatcaaaattataaagcatttttcacactcaagtgaaacaaggttgacaaactcacttcgcaggtcacatgcctatacatcacttattatatttgggtctgaaacttctcacatgtttgggaggttttatgtgtcctcattgggaaaatgggtgtaattcagcataaaacctcatatgattgtcctgcctcatggagctgttgtatagatcccagatccatcccatgatttgttcctgtctgaggcatagaggcaggcaagccgtggattttgcacatggtgactttcccactgtgccatgatacagtctgcatcttatagcagtgcctttgtctcagggcctctgctggcagtctagaccttttgggcagaaaggagcttcaaatggctgtgataaggaatattaaaaattgtgtttctactttaattgtattggctgttcatgtatgtaggagttaaaataggccaaactggagaaataaacgcattctgtccaccatg

SEQ ID NO: 32755 - DNA, 1269 bp, Homo sapiens
  source 1..1269: mol_type = unassigned DNA
aagtgctgagctgccgggaacggcagcttctgacgctgggccattggacgctgcggaaccaggcttcttcactttgagtttccgccgcgaagcgccagtccgggccgaggagggagtgggaacttcatgaggccctcgaacatctgaagaaagagcaagaagaggcctggaagcttgaagttggtgaaaggaaacgaactgccacctggaagatacaggtggaaacccgaaaacagagtattgtatgggagtttgaaaaataccagcgattactagagaaaaagcagccaccacatcggcagctgggggcagaggtagcagcagctctggccagcctacagcgggaggcagcggagaccatgcagaaactggagttgaagacagattgccgtgtgctggggctaagagagatcctgaagacttatgcagctgatgtgcgcttggatccagatactgcttactcccgtctcatcgtgtctgaggacagaaaacgtgtgcactatggagacaccaaccagaaactgccagacaatcctgagagattttaccgctataatatcgtcctgggaagccagtgcatctcctcaggccggcactactgggaggtggaggtgggagacaggtctgagtggggcctgggagtatgtaagcaaaatgtagaccggaaggaggtggtctacttatccccccactatggattctgggtgataaggctgaggaagggaaatgagtaccgagcaggcaccgatgagtacccaatcctgtccttgccggtccctcctcgccgggtgggaatcttcgtggattatgaggcccatgacatttctttctacaatgtgactgactgtggctcccacatcttcactttcccccgctatcccttccctgggcgcctcctgccctattttagtccttgctacagcattggaaccaacaacactgctcctctggccatctgctccctggatggggaggactaagaaagctaccaccctaaccagagaggcttggaattgggcctggcccccatggggcttggaggaccgagccactgacaggtatcccctgaaactgagctgagcccagtatccaaggattcctctgtctgatcctttggtctttgctaccaggctgaagtctgtcatgaaaccacttattttaaaaagcagaggcccagtcaaatgagcattgcatcccatgagggaagcacgacagggctgatggtgaggatcagagcagttctaaggtgactcgttggggtaaggatca

SEQ ID NO: 32756 - DNA, 2840 bp, Homo sapiens
  source 1..2840: mol_type = unassigned DNA
gcgtcctgtgaggtccagtggccgcccaggcgcgaccagatctgggtgcgcggagagcgcgcatggcggctgtgggaccgcggaccggccccggaaccggcgccgaggctctagcgctggcggcagagctgcagggcgaggcgacgtgctccatctgcctagagctctttcgtgagccggtgtccgtcgagtgcggccacagcttctgccgcgcctgcatagggcgctgctgggagcgcccgggcgcggggtctgttggggccgccacccgcgcgccccccttcccactgccctgtccgcagtgccgcgagcccgcgcgccccagtcagctgcggcccaaccggcagctggcggcagtggccacgctcctgcggcgcttcagcctgcccgcggctgccccgggagagcacgggtctcaggcggccgcggcccgggcagcggctgcccgctgcgggcagcatggcgaacccttcaagctctactgccaggacgacggacgcgccatctgcgtggtgtgcgaccgcgcccgcgagcaccgcgagcacgccgtgctgccgctggacgaggcggtgcaggaggccaaggagctcttggagtccaggctgagggtcttgaagaaggaactggaggactgtgaggtgttccggtccacggaaaagaaggagagcaaggagctgctgaaacagatggcagcggagcaggagaaggtgggggcagagttccaggcactgagggctttcctggtggagcaggagggtcggctgctaggccgcctggaggaactgtcccgggaggtggcacagaagcagaatgagaacctggcccagctcggggttgagatcacccagctgtccaagctcagcagccagatccaggagacagctcaaaagcctgaccttgactttctccaggaattcaaaagcacgctgagcaggtgtagcaatgtgcctggccccaagccaaccacagtctcttctgagatgaagaataaagtctggaatgtttctctcaagacctttgtcttaaaagggatgctgaagaagttcaaagaggaccttcggggagagctggagaaagaggagaaagtggagctcaccttggatcccgacacggccaacccgcgcctcatcctctctctggatcttaagggcgtgcgcctcggcgagcgggcccaggacctgcccaaccacccctgccgcttcgacaccaacacccgcgtcctggcgtcctgcggcttctcctcgggccggcatcactgggaggtggaggtgggctctaaggacggctgggcctttggcgtggcccgcgagagcgtgcgccgaaagggcctgacgcccttcactcccgaggagggcgtctgggccctgcagctcaacggcggccagtactgggccgtgaccagccccgagcggtcgcccctcagctgcgggcacctgtcgcgcgtgcgggtggccctggacctggaggtgggagccgtgtccttctacgctgtggaggacatgcgccacctctacaccttccgcgtcaacttccaggagcgcgtgttcccgcttttctctgtttgctccacgggcacctacttgcgaatctggccttgaggggcactgctggggagctcctgtctctgggctgccggtgggaggggatgtcgcctccccagagatgcctggtccgtcttgggtctgccctccgtgctcctgacccctgctgcccaagagagcctgctacagacacaaccccgaggcaggagagtgactgtggccaaccgagcaggggaacaggggctttggactcctgagggtgttcccttcctgaggtcacatgtggatttggccagagccttcaggaggtggaggccggtgaggtcaggagcccagctctccagggggcttctgccctgactgggaagggtgcctggctccctaaaacaatgtcaaagccagtcctgctgttctctgttgccagggggcaggtctgggcctgggccaaccacgtttgttatcatggctgctgccttctggacagctgccagctctgccttgagaggttgtgggacctctggatccagctgacctgacaggtcatctactcagggaggagccctgtgctcccagctcagaggacagtctgggccagaactggaaggagacatctgtcccgtctttgagtgacaagcccgggacaacagccagtgggcatcacggctctccagcactccttagccggaggatacagagtgatgggtgcatcctgaccaatgcgacaaccaacacgtgctctcacaaacccctgactcccgcactttccagtgccaaagtacaaacgctgcttggataaggagagcaaagcttctggaactttatttactctttctttttaattttcttttaagagactgggtcttgctatgttgcccaggctggtcttgaactcctggcctcaagtgatcctccagtttccatctccctaagagctgggattacaggtgtgagccgctgtacccgaactttttttgtttttgcttctggaactttgaaacacaaaacacaagttggcacttacaattttaaagatgcagccagctctaaacaacacacagagcacaaatatgctcctgacggactcaggaaaatgccaacagcagagcaccctggtgccaaggccttctcagcccatgccctggagggcattcccctggccagcctcagccccttgtctacttgttctccagcttctgggtagctgggcttctggaagggtggcagtgggctactccctgctcagcgctcccctgggaagggggtgaggagatgaaaatgaaactatgagctgtctttgga

SEQ ID NO: 32757 - DNA, 1228 bp, Homo sapiens
  source 1..1228: mol_type = unassigned DNA
ccgtagtcaacgtgcgcctcccctcccggctcccagccgggcgcgccccgggctcgagtctctgcctgcccagtggcagccccgcccttcctctcccagtgggccctcggcgcccagctccgcgtcctgtgaggtccagtggccgcccaggcgcgaccagatctgggtgcgcggagagcgcgcatggcggctgtgggaccgcggaccggccccggaaccggcgccgaggctctagcgctggcggcagagctgcagggcgaggcgacgtgctccatctgcctagagctctttcgtgagccggtgtccgtcgagtgcggccacagcttctgccgcgcctgcatagggcgctgctgggagcgcccgggcgcggggtctgttggggccgccacccgcgcgccccccttcccactgccctgtccgcagtgccgcgagcccgcgcgccccagtcagctgcggcccaaccggcagctggcggcagtggccacgctcctgcggcgcttcagcctgcccgcggctgccccgggagagcacgggtctcaggcggccgcggcccgggcagcggctgcccgctgcgggcagcatggcgaacccttcaagctctactgccaggacgacggacgcgccatctgcgtggtgtgcgaccgcgcccgcgagcaccgcgagcacgccgtgctgccgctggacgaggcggtgcaggaggccaaggagctcttggagtccaggctgagggtcttgaagaaggaactggaggactgtgaggtgttccggtccacggaaaagaaggagagcaaggagctgctggtgagccaggcacccgcaggccccccgtgggacattacagaggcctgagaactcagcaccagggctcggtgtgtgtggtgttggagtgtgtgctatggaaccgcagaatcgatttcagaaagataatagagtccatattatatagggtgtccacataattgttgtacaaaccagagctttttaaagtgaaaagcagtgctaaaataattattgcaaaacaactggcttaaactggagctgtcccagcgaatcaggacgctcagtcactctgatattacgtaacataccagttagggcctgcggaagcatcttgtaatggaacacattactatttctgcagagaaacatggatattcaataagtgggaatattaatacaataaagagcctcatggcatgttttgtcaacaaaacagtagtgaaaaaaa

SEQ ID NO: 32758 - DNA, 2574 bp, Homo sapiens
  source 1..2574: mol_type = unassigned DNA
tgcgcgacgtcccccacggacttggcgatgttcttcctgtctgttcggagcctctagcctggtctgcgtctccgcagctctctgcccgcgggaagtctccggcacagccacgcagccgctgcccccactcttatctctttccccgaagcgggctctgctcaaagtccccacctcgtggaactgagtgagaggacctcgccaagatgtccagggagggggctcccgggttaagccgcgcacctagagccgtctgactgtgccaacgctgtcgattctgggggccctttctttgctattttctcgctgagcctcagcgagggagctcttggagtccaggctgagggtcttgaagaaggaactggaggactgtgaggtgttccggtccacggaaaagaaggagagcaaggagctgctgaaacagatggcagcggagcaggagaaggtgggggcagagttccaggcactgagggctttcctggtggagcaggagggtcggctgctaggccgcctggaggaactgtcccgggaggtggcacagaagcagaatgagaacctggcccagctcggggttgagatcacccagctgtccaagctcagcagccagatccaggagacagctcaaaagcctgaccttgactttctccaggaattcaaaagcacgctgagcaggtgtagcaatgtgcctggccccaagccaaccacagtctcttctgagatgaagaataaagtctggaatgtttctctcaagacctttgtcttaaaagggatgctgaagaagttcaaagaggaccttcggggagagctggagaaagaggagaaagtggagctcaccttggatcccgacacggccaacccgcgcctcatcctctctctggatcttaagggcgtgcgcctcggcgagcgggcccaggacctgcccaaccacccctgccgcttcgacaccaacacccgcgtcctggcgtcctgcggcttctcctcgggccggcatcactgggaggtggaggtgggctctaaggacggctgggcctttggcgtggcccgcgagagcgtgcgccgaaagggcctgacgcccttcactcccgaggagggcgtctgggccctgcagctcaacggcggccagtactgggccgtgaccagccccgagcggtcgcccctcagctgcgggcacctgtcgcgcgtgcgggtggccctggacctggaggtgggagccgtgtccttctacgctgtggaggacatgcgccacctctacaccttccgcgtcaacttccaggagcgcgtgttcccgcttttctctgtttgctccacgggcacctacttgcgaatctggccttgaggggcactgctggggagctcctgtctctgggctgccggtgggaggggatgtcgcctccccagagatgcctggtccgtcttgggtctgccctccgtgctcctgacccctgctgcccaagagagcctgctacagacacaaccccgaggcaggagagtgactgtggccaaccgagcaggggaacaggggctttggactcctgagggtgttcccttcctgaggtcacatgtggatttggccagagccttcaggaggtggaggccggtgaggtcaggagcccagctctccagggggcttctgccctgactgggaagggtgcctggctccctaaaacaatgtcaaagccagtcctgctgttctctgttgccagggggcaggtctgggcctgggccaaccacgtttgttatcatggctgctgccttctggacagctgccagctctgccttgagaggttgtgggacctctggatccagctgacctgacaggtcatctactcagggaggagccctgtgctcccagctcagaggacagtctgggccagaactggaaggagacatctgtcccgtctttgagtgacaagcccgggacaacagccagtgggcatcacggctctccagcactccttagccggaggatacagagtgatgggtgcatcctgaccaatgcgacaaccaacacgtgctctcacaaacccctgactcccgcactttccagtgccaaagtacaaacgctgcttggataaggagagcaaagcttctggaactttatttactctttctttttaattttcttttaagagactgggtcttgctatgttgcccaggctggtcttgaactcctggcctcaagtgatcctccagtttccatctccctaagagctgggattacaggtgtgagccgctgtacccgaactttttttgtttttgcttctggaactttgaaacacaaaacacaagttggcacttacaattttaaagatgcagccagctctaaacaacacacagagcacaaatatgctcctgacggactcaggaaaatgccaacagcagagcaccctggtgccaaggccttctcagcccatgccctggagggcattcccctggccagcctcagccccttgtctacttgttctccagcttctgggtagctgggcttctggaagggtggcagtgggctactccctgctcagcgctcccctgggaagggggtgaggagatgaaaatgaaactatgagctgtctttgg

SEQ ID NO: 32759 - DNA, 2851 bp, Homo sapiens
  source 1..2851: mol_type = unassigned DNA
tgcgcgacgtcccccacggacttggcgatgttcttcctgtctgttcggagcctctagcctggtctgcgtctccgcagctctctgcccgcgggaagtctccggcacagccacgcagccgctgcccccactcttatctctttccccgaagcgggctctgctcaaagtccccacctcgtggaactgagtgagaggacctcgccaagatgtccagggagggggctcccgggttaagccgcgcacctagagccgtctgactgtgccaacgctgtcgattctgggggccctttctttgctattttctcgctgagcctcagcgagggtgtgtgcaggggtgagggcggggcggggaggctcgggcggcagtccccagtctctccttgctggcccatcctgctccaactctcccagccacggggcttcctggtgggggggcggagagtagaggagacgactaggggtagggctgccggagcttgtgtttcagtctggctggtccagcagatgcttttggggaagcaagatcccgagaccttcagagtcacctcgcagtgtaacctgtagcctgtagagatgacttctacccggcctccccctcagagctcttggagtccaggctgagggtcttgaagaaggaactggaggactgtgaggtgttccggtccacggaaaagaaggagagcaaggagctgctgaaacagatggcagcggagcaggagaaggtgggggcagagttccaggcactgagggctttcctggtggagcaggagggtcggctgctaggccgcctggaggaactgtcccgggaggtggcacagaagcagaatgagaacctggcccagctcggggttgagatcacccagctgtccaagctcagcagccagatccaggagacagctcaaaagcctgaccttgactttctccaggaattcaaaagcacgctgagcaggtgtagcaatgtgcctggccccaagccaaccacagtctcttctgagatgaagaataaagtctggaatgtttctctcaagacctttgtcttaaaagggatgctgaagaagttcaaagaggaccttcggggagagctggagaaagaggagaaagtggagctcaccttggatcccgacacggccaacccgcgcctcatcctctctctggatcttaagggcgtgcgcctcggcgagcgggcccaggacctgcccaaccacccctgccgcttcgacaccaacacccgcgtcctggcgtcctgcggcttctcctcgggccggcatcactgggaggtggaggtgggctctaaggacggctgggcctttggcgtggcccgcgagagcgtgcgccgaaagggcctgacgcccttcactcccgaggagggcgtctgggccctgcagctcaacggcggccagtactgggccgtgaccagccccgagcggtcgcccctcagctgcgggcacctgtcgcgcgtgcgggtggccctggacctggaggtgggagccgtgtccttctacgctgtggaggacatgcgccacctctacaccttccgcgtcaacttccaggagcgcgtgttcccgcttttctctgtttgctccacgggcacctacttgcgaatctggccttgaggggcactgctggggagctcctgtctctgggctgccggtgggaggggatgtcgcctccccagagatgcctggtccgtcttgggtctgccctccgtgctcctgacccctgctgcccaagagagcctgctacagacacaaccccgaggcaggagagtgactgtggccaaccgagcaggggaacaggggctttggactcctgagggtgttcccttcctgaggtcacatgtggatttggccagagccttcaggaggtggaggccggtgaggtcaggagcccagctctccagggggcttctgccctgactgggaagggtgcctggctccctaaaacaatgtcaaagccagtcctgctgttctctgttgccagggggcaggtctgggcctgggccaaccacgtttgttatcatggctgctgccttctggacagctgccagctctgccttgagaggttgtgggacctctggatccagctgacctgacaggtcatctactcagggaggagccctgtgctcccagctcagaggacagtctgggccagaactggaaggagacatctgtcccgtctttgagtgacaagcccgggacaacagccagtgggcatcacggctctccagcactccttagccggaggatacagagtgatgggtgcatcctgaccaatgcgacaaccaacacgtgctctcacaaacccctgactcccgcactttccagtgccaaagtacaaacgctgcttggataaggagagcaaagcttctggaactttatttactctttctttttaattttcttttaagagactgggtcttgctatgttgcccaggctggtcttgaactcctggcctcaagtgatcctccagtttccatctccctaagagctgggattacaggtgtgagccgctgtacccgaactttttttgtttttgcttctggaactttgaaacacaaaacacaagttggcacttacaattttaaagatgcagccagctctaaacaacacacagagcacaaatatgctcctgacggactcaggaaaatgccaacagcagagcaccctggtgccaaggccttctcagcccatgccctggagggcattcccctggccagcctcagccccttgtctacttgttctccagcttctgggtagctgggcttctggaagggtggcagtgggctactccctgctcagcgctcccctgggaagggggtgaggagatgaaaatgaaactatgagctgtctttgg

SEQ ID NO: 32760 - DNA, 2320 bp, Homo sapiens
  source 1..2320: mol_type = unassigned DNA
ctgcagcctgcctggaagctgaaggaaaggtgggggcattgtaggacaccttgaacccaggtctcccaacttcacaggactcccttcctccgcccaggagttttaaggaagaggaacttcctggtgggacatattgagtgccaaacgtgtgttcacataaaaaatcaagagatcagggcatgagtctgcatctgaaaactcgagtaaaaaatccggtgtatgctgttaatggaaagaacagaatatgacacttgcatgccgcatattctcacttcgttccttgggggtgtgctgctacctctggtcactggcatcggacttttcttccttctttctactttcctacatctcccaagttttgtattttgagcatgtgttagcattataactgctaaacaggaaagatggcctttaaaaagaaagtgaagtgtaaaagtttgagggtgatgaaataaatgtgcttgaggaagaaaaagcaatctcagtttaatcctatggttgccccaggaggcactaatttatcccttctgcttttcaagtgaggaagctgcagcttggcgtagttctggggggagtatgaagctgccttggtttaggtgatggagcacaggtccacagacatgtgtgggtgcatctgtggcaggggagaaaagagcatgtgtccagactacagcttgttcagagctgggacactgacaatagagcacgcactgcgtgcgtaggtgggtgtgtctccgatcctccagcagtgacagggacgaagccttgccctgtgggatgactcaggccactggccaaatgttatgtctccatgttcaagtccctctccaacttctcctcctgggacagaaacagatggcagcggagcaggagaaggtgggggcagagttccaggcactgagggctttcctggtggagcaggagggtcggctgctaggccgcctggaggaactgtcccgggaggtggcacagaagcagaatgagaacctggcccagctcggggttgagatcacccagctgtccaagctcagcagccagatccaggagacagctcaaaagcctgaccttgactttctccaggaattcaaaagcacgctgagcaggtgtagcaatgtgcctggccccaagccaaccacagtctcttctgagatgaagaataaagtctggaatgtttctctcaagacctttgtcttaaaagggatgctgaagaagttcaaagaggaccttcggggagagctggagaaagaggagaaagtggagctcaccttggatcccgacacggccaacccgcgcctcatcctctctctggatcttaagggcgtgcgcctcggcgagcgggcccaggacctgcccaaccacccctgccgcttcgacaccaacacccgcgtcctggcgtcctgcggcttctcctcgggccggcatcactgggaggtggaggtgggctctaaggacggctgggcctttggcgtggcccgcgagagcgtgcgccgaaagggcctgacgcccttcactcccgaggagggcgtctgggccctgcagctcaacggcggccagtactgggccgtgaccagccccgagcggtcgcccctcagctgcgggcacctgtcgcgcgtgcgggtggccctggacctggaggtgggagccgtgtccttctacgctgtggaggacatgcgccacctctacaccttccgcgtcaacttccaggagcgcgtgttcccgcttttctctgtttgctccacgggcacctacttgcgaatctggccttgaggggcactgctggggagctcctgtctctgggctgccggtgggaggggatgtcgcctccccagagatgcctggtccgtcttgggtctgccctccgtgctcctgacccctgctgcccaagagagcctgctacagacacaaccccgaggcaggagagtgactgtggccaaccgagcaggggaacaggggctttggactcctgagggtgttcccttcctgaggtcacatgtggatttggccagagccttcaggaggtggaggccggtgaggtcaggagcccagctctccagggggcttctgccctgactgggaagggtgcctggctccctaaaacaatgtcaaagccagtcctgctgttctctgttgccagggggcaggtctgggcctgggccaaccacgtttgttatcatggctgctgccttctggacagctgccagctctgccttgagaggttgtgggacctctggatccagctgacctgacaggtcatctactcagggaggagccctgtgctcccagctcagaggacagtctgggccagaactggaaggagaca

SEQ ID NO: 32761 - DNA, 1954 bp, Homo sapiens
  source 1..1954: mol_type = unassigned DNA
tgcgcgacgtcccccacggacttggcgatgttcttcctgtctgttcggagcctctagcctggtctgcgtctccgcagctctctgcccgcgggaagtctccggcacagccacgcagccgctgcccccactcttatctctttccccgaagcgggctctgctcaaagtccccacctcgtggaactgagtgagaggacctcgccaagatgtccagggagggggctcccgggttaagccgcgcacctagagccgtctgactgtgccaacgctgtcgattctgggggccctttctttgctattttctcgctgagcctcagcgagggagctcttggagtccaggctgagggtcttgaagaaggaactggaggactgtgaggtgttccggtccacggaaaagaaggagagcaaggagctgctggtgagccaggcacccgcaggccccccgtgggacattacagaggcctgagaactcagcaccagggctcgaaacagatggcagcggagcaggagaaggtgggggcagagttccaggcactgagggctttcctggtggagcaggagggtcggctgctaggccgcctggaggaactgtcccgggaggtggcacagaagcagaatgagaacctggcccagctcggggttgagatcacccagctgtccaagctcagcagccagatccaggagacagctcaaaagcctgaccttgactttctccaggaattcaaaagcacgctgagcaggtgtagcaatgtgcctggccccaagccaaccacagtctcttctgagatgaagaataaagtctggaatgtttctctcaagacctttgtcttaaaagggatgctgaagaagttcaaagaggaccttcggggagagctggagaaagaggagaaagtggagctcaccttggatcccgacacggccaacccgcgcctcatcctctctctggatcttaagggcgtgcgcctcggcgagcgggcccaggacctgcccaaccacccctgccgcttcgacaccaacacccgcgtcctggcgtcctgcggcttctcctcgggccggcatcactgggaggtggaggtgggctctaaggacggctgggcctttggcgtggcccgcgagagcgtgcgccgaaagggcctgacgcccttcactcccgaggagggcgtctgggccctgcagctcaacggcggccagtactgggccgtgaccagccccgagcggtcgcccctcagctgcgggcacctgtcgcgcgtgcgggtggccctggacctggaggtgggagccgtgtccttctacgctgtggaggacatgcgccacctctacaccttccgcgtcaacttccaggagcgcgtgttcccgcttttctctgtttgctccacgggcacctacttgcgaatctggccttgaggggcactgctggggagctcctgtctctgggctgccggtgggaggggatgtcgcctccccagagatgcctggtccgtcttgggtctgccctccgtgctcctgacccctgctgcccaagagagcctgctacagacacaaccccgaggcaggagagtgactgtggccaaccgagcaggggaacaggggctttggactcctgagggtgttcccttcctgaggtcacatgtggatttggccagagccttcaggaggtggaggccggtgaggtcaggagcccagctctccagggggcttctgccctgactgggaagggtgcctggctccctaaaacaatgtcaaagccagtcctgctgttctctgttgccagggggcaggtctgggcctgggccaaccacgtttgttatcatggctgctgccttctggacagctgccagctctgccttgagaggttgtgggacctctggatccagctgacctgacaggtcatctactcagggaggagccctgtgctcccagctcagaggacagtctgggccagaactggaaggagaca

SEQ ID NO: 32762 - DNA, 2152 bp, Homo sapiens
  source 1..2152: mol_type = unassigned DNA
ttttagaacggtttccggaagtgatgggagggattgggcagggcagctaaatatagtcctggggccatggctcagtctgggagggtcttccgctgagcactgtgtgcccatcacgcgtggtgtccactgccagctgcccctgtgagtccctgtccttgcttggagcctgctgcttgtctcagatccttggacccagccctgaccccagtccagctaagctcaaccctgaccggtcctccttcgagactctttcagcctaagatctccaaccagacctgcccgccatgtcggctgcgcccggcctcctgcaccaggagctgtcctgcccgctgtgcctgcagctgttcgacgcgcccgtgacagccgagtgcggccacagtttctgccgcgcctgcctaggccgcgtggccggggagccggcggcggatggcaccgttctctgcccctgctgccaggcccccacgcggccgcaggcactcagcaccaacctgcagctggcgcgcctggtggaggggctggcccaggtgccgcagggccactgcgaggagcacctggacccgctgagcatctactgcgagcaggaccgcgcgctggtgtgcggagtgtgcgcctcactcggctcgcaccgcggtcatcgcctcctgcctgccgccgaggcccacgcacgcctcaagacacagctgccacagcagaaactgcagctgcaggaggcatgcatgcgcaaggagaagagtgtggctgtgctggagcatcagctggtggaggtggaggagacagtgcgtcagttccggggggccgtgggggagcagctgggcaagatgcgggtgttcctggctgcactggagggctccttggaccgcgaggcagagcgtgtacggggtgaggcaggggtcgccttgcgccgggagctggggagcctgaactcttacctggagcagctgcggcagatggagaaggtcctggaggaggtggcggacaagccgcagactgagttcctcatgaaatactgcctggtgaccagcaggctgcagaagatcctggcagagtctcccccacccgcccgtctggacatccagctgccaattatctcagatgacttcaaattccaggtgtggaggaagatgttccgggctctgatgccagcgctggaggagctgacctttgacccgagctctgcgcacccgagcctggtggtgtcttcctctggccgccgcgtggagtgctcggagcagaaggcgccgccggccggggaggacccgcgccagttcgacaaggcggtggcggtggtggcgcaccagcagctctccgagggcgagcactactgggaggtggatgttggcgacaagccgcgctgggcgctgggcgtgatcgcggccgaggccccccgccgcgggcgcctgcacgcggtgccctcgcagggcctgtggctgctggggctgcgcgagggcaagatcctggaggcacacgtggaggccaaggagccgcgcgctctgcgcagccccgagaggcggcccacgcgcattggcctttacctgagcttcggcgacggcgtcctctccttctacgatgccagcgacgccgacgcgctcgtgccgctttttgccttccacgagcgcctgcccaggcccgtgtaccccttcttcgacgtgtgctggcacgacaagggcaagaatgcccagccgctgctgctcgtgggtcccgaaggcgccgaggcctgagccgccggacgggtagtggaggggcgcgggggcctgggttgaagcttaggtctccttggtcgggtctgacgggagaagggtggggagcgggttgccagggcccagggggctgggaactgggggatctcccagaatactgacaagcgtggggtaggactggcttggtggctcatgcctgtaatcccagcactttgggagacggaggcgggtggatcacctgaggtcaggagttcaagaccagcctggccaacatggtgaaactcctctctactgaaaatacaaaaatgagctgggcgcggtggcatacgcctgtaatcccagctagttgggaggctgaggcaggataattgcttgaacccaggaggtggaggttgcagtgagcagacattgcggcactgcactctagcctgggtgacaagagtgagactctgtct

SEQ ID NO: 32763 - DNA, 1350 bp, Homo sapiens
  source 1..1350: mol_type = unassigned DNA
gagcatgatggggcatgtgcgggagcgccaggcggggcatgtaaccagagcgtgcggggcatgatggggcacggacatggggggttaggtggggcacgtaattggagctcgcggggcaggatggggcatctaactggagcgacagagagcacgatggggcacttacaggggccggaggctggcccgggcagtgagtgtggatggcttggcaggtgagcctgctggagctggaggaccggcttcagtgtcccatctgcctggaggtcttcaaggagtccctaatgctacagtgcggccactcctactgcaagggctgcctggtttccctgtcctaccacctggacaccaaggtgcgctgccccatgtgctggcaggtggtggacggcagcagctccttgcccaacgtctccctggcctgggtgatcgaagccctgaggctccctggggacccagagcccaaggtctgcgtgcaccaccggaacccgctcagccttttctgcgagaaggaccaggagctcatctgtggcctctgcggtctgctgggctcccaccaacaccacccggtcacgcccgtctccaccgtctgcagccgcatgaaggaggagctcgcagccctcttctctgagctgaagcaggagcagaagaaggtggatgagctcatcgccaaactggtgaaaaaccggacccgaatcgtcaatgagtcggatgtcttcagctgggtgatccgccgcgagttccaggagctgcgccacccggtggacgaggagaaggcccgctgcctggaggggatagggggtcacacccgtggcctggtggcctccctggacatgcagctggagcaggcccagggaacccgggagcggctggcccaagccgagtgtgtgctggaacagttcggcaatgaggaccaccatgagttcatctggaagttccactccatggcctccaggtaataaccttggagagagctcagccagggtctggtggctgcgggcacgggcatctcagctccactggttcctccattcagcttaaccagcgcctcccaagcagctgcctatagctggctctataactgagcctggggaagatagaggaaagtcacatccctgccttcaagggtctcgcagacaggtggggaggcagatggtgaactgtgggtacctagaacagcagaagttcactcaagctacagaaatactagaggagggtagctcatgcctgcaatcccagtactttgggaggccaaggcaggagtattgctggaggccgggagttcgagaccagcctggccaatgtagtaacacccccgtctctacaaaaaatacaaaaataaaaaaattagttggg

SEQ ID NO: 32764 - DNA, 1321 bp, Homo sapiens
  source 1..1321: mol_type = unassigned DNA
atctaactggagcgacagagagcacgatggggcacttacaggggccggaggctggcccgggcagtgagtgtggatggcttggcaggtgagcctgctggagctggaggaccggcttcagtgtcccatctgcctggaggtcttcaaggagtccctaatgctacagtgcggccactcctactgcaagggctgcctggtttccctgtcctaccacctggacaccaaggtgcgctgccccatgtgctggcaggtggtggacggcagcagctccttgcccaacgtctccctggcctgggtgatcgaagccctgaggctccctggggacccagagcccaaggtctgcgtgcaccaccggaacccgctcagccttttctgcgagaaggaccaggagctcatctgtggcctctgcggtctgctgggctcccaccaacaccacccggtcacgcccgtctccaccgtctgcagccgcatgaaggaggagctcgcagccctcttctctgagctgaagcaggagcagaagaaggtggatgagctcatcgccaaactggtgaaaaaccggacccgaatcgtcaatgagtcggatgtcttcagctgggtgatccgccgcgagttccaggagctgcgccacccggtggacgaggagaaggcccgctgcctggaggggatagggggtcacacccgtggcctggtggcctccctggacatgcagctggagcaggcccagggaacccgggagcggctggcccaagccgagtgtgtgctggaacagttcggcaatgaggaccaccatgagttcatctggaagttccactccatggcctccagattgacaaagactgaagaactggagaagaagtggcgaaacgggctcgcagcgtcgcattccctaccccagcaggtgcgcccgcagcgtcgcactccctagcccggcagaacgtgaagcagctgtacgcgctggtgtgcgaaacgcagcgctactccgccgtgctggatgccgtgatctccagcgccggcctcctcagtgcgaagaagctgcagccgcacctggccaagggtaggggcggggcggggaagtgaaccccgacggtcagcgctttgtcatctggtttcagccccgctgccgtgcacggcgggactggagcaagtcgctcacctgaaatgagtatgagcagaccttccctgggttacgaattgagatgggatgaaaatgctttaacttcgagtgttttgaaggattaaataaccgaagtacaaagtagtagtagcggagacagtaaggaagtcgggcgtggcggcgcgcacctgtggtcccagctactcggaa

SEQ ID NO: 32765 - DNA, 1169 bp, Homo sapiens
  source 1..1169: mol_type = unassigned DNA
gcccgggcagtgagtgtggatggcttggcaggtgagcctgctggagctggaggaccggcttcagtgtcccatctgcctggaggtcttcaaggagtccctaatgctacagtgcggccactcctactgcaagggctgcctggtttccctgtcctaccacctggacaccaaggtgcgctgccccatgtgctggcaggtggtggacggcagcagctccttgcccaacgtctccctggcctgggtgatcgaagccctgaggctccctggggacccagagcccaaggtctgcgtgcaccaccggaacccgctcagccttttctgcgagaaggaccaggagctcatctgtggcctctgcggtctgctgggctcccaccaacaccacccggtcacgcccgtctccaccgtctgcagccgcatgaaggaggagctcgcagccctcttctctgagctgaagcaggagcagaagaaggtggatgagctcatcgccaaactggtgaaaaaccggacccgaatcgtcaatgagtcggatgtcttcagctgggtgatccgccgcgagttccaggagctgcgccacccggtggacgaggagaaggcccgctgcctggaggggatagggggtcacacccgtggcctggtggcctccctggacatgcagctggagcaggcccagggaacccgggagcggctggcccaagccgagtgtgtgctggaacagttcggcaatgaggaccaccatgagttcatctggaagttccactccatggcctccaggtaataaccttggagagagctcagccagggtctggtggctgcgggcacgggcatctcagctccactggttcctccattcagcttaaccagcgcctcccaagcagctgcctatagctggctctataactgagcctggggaagatagaggaaagtcacatccctgccttcaagggtctcgcagacaggtggggaggcagatggtgaactgtgggtacctagaacagcagaagttcactcaagctacagaaatactagaggagggtagctcatgcctgcaatcccagtactttgggaggccaaggcaggagtattgctggaggccgggagttcgagaccagcctggccaatgtagtaacacccccgtctctacaaaaaatacaaaaataaaaaaattagttggg

SEQ ID NO: 32766 - DNA, 1286 bp, Homo sapiens
  source 1..1286: mol_type = unassigned DNA
ggcgtccagctgcacttcccacttctgactctgtgcctgctgttccctgctgggaagaagaaaagccagtgatgctggcttgaggctgtagtgggaggcccagcggattgtgagaagccagcccgggcagtgagtgtggatggcttggcaggtgagcctgctggagctggaggaccggcttcagtgtcccatctgcctggaggtcttcaaggagtccctaatgctacagtgcggccactcctactgcaagggctgcctggtttccctgtcctaccacctggacaccaaggtgcgctgccccatgtgctggcaggtggtggacggcagcagctccttgcccaacgtctccctggcctgggtgatcgaagccctgaggctccctggggacccagagcccaaggtctgcgtgcaccaccggaacccgctcagccttttctgcgagaaggaccaggagctcatctgtggcctctgcggtctgctgggctcccaccaacaccacccggtcacgcccgtctccaccgtctgcagccgcatgaaggaggagctcgcagccctcttctctgagctgaagcaggagcagaagaaggtggatgagctcatcgccaaactggtgaaaaaccggacccgaatcgtcaatgagtcggatgtcttcagctgggtgatccgccgcgagttccaggagctgcgccacccggtggacgaggagaaggcccgctgcctggaggggatagggggtcacacccgtggcctggtggcctccctggacatgcagctggagcaggcccagggaacccgggagcggctggcccaagccgagtgtgtgctggaacagttcggcaatgaggaccaccatgagttcatctggttccactccatggcctccaggtaataaccttggagagagctcagccagggtctggtggctgcgggcacgggcatctcagctccactggttcctccattcagcttaaccagcgcctcccaagcagctgcctatagctggctctataactgagcctggggaagatagaggaaagtcacatccctgccttcaagggtctcgcagacaggtggggaggcagatggtgaactgtgggtacctagaacagcagaagttcactcaagctacagaaatactagaggagggtagctcatgcctgcaatcccagtactttgggaggccaaggcaggagtattgctggaggccgggagttcgagaccagcctggccaatgtagtaacacccccgtctctacaaaaaatacaaaaataaaaaaattagttggg

SEQ ID NO: 32767 - DNA, 1350 bp, Homo sapiens
  source 1..1350: mol_type = unassigned DNA
gagcatgatggggcatgtgcgggagcgccaggcggggcatgtaaccagagcgtgcggggcatgatggggcacggacatggggggttaggtggggcacgtaattggagctcgcggggcaggatggggcatctaactggagcgacagagagcacgatggggcacttacaggggccggaggctggcccgggcagtgagtgtggatggcttggcaggtgagcctgctggagctggaggactggcttcagtgtcccatctgcctggaggtcttcaaggagtccctaatgctacagtgcggccactcctactgcaagggctgcctggtttccctgtcctaccacctggacaccaaggtgcgctgccccatgtgctggcaggtggtggacggcagcagctccttgcccaacgtctccctggcctgggtgatcgaagccctgaggctccctggggacccggagcccaaggtctgcgtgcaccaccggaacccgctcagccttttctgcgagaaggaccaggagctcatctgtggcctctgcggtctgctgggctcccaccaacaccacccggtcacgcccgtctccaccgtctgcagccgcatgaaggaggagctcgcagccctcttctctgagctgaagcaggagcagaagaaggtggatgagctcatcgccaaactggtgaaaaaccggacccgaatcgtcaatgagtcggatgtcttcagctgggtgatccgccgcgagttccaggagctgcgccacccggtggacgaggagaaggcccgctgcctggaggggatagggggtcacacccgtggcctggtggcctccctggacatgcagctggagcaggcccagggaacccgggagcggctggcccaagccgagtgtgtgctggaacagttcggaaatgaggaccaccatgagttcatctggaagttccactccatggcctccaggtaataaccttggagagagctcagccagggtctggtggctgcgggcacgggcatctcagctccactggttcctccattcagcttaaccagcgcctcccaagcagctgcctatagctggctctataactgagcctggggaagatagaggaaagtcacgtccctgccttcaagggtctcgcagacaggtggggaggcagatggtgaactgtgggtacctagaacagcagaagttcactcaagctacagaaatactagaggagggtagctcatgcctgcaatcccagtactttgggaggccaaggcaggagtattgctggaggccgggagttcgagaccagcctggccaatgtagtaacacccccgtctctacaaaaaatacaaaaataaaaaaattagttggg

SEQ ID NO: 32768 - DNA, 1286 bp, Homo sapiens
  source 1..1286: mol_type = unassigned DNA
ggcgtccagctgcacttcccacttctgactctgtgcctgctgttccctgctgggaagaagaaaagccagtgatgctggcttgaggccatagtgggaggcccagtggatcctgagaagctagcccgggcagtgagtgtggatggcttggcaggtgagcctgctggagctggaggactggcttcagtgtcccatctgcctggaggtcttcaaggagtccctaatgctacagtgcggccactcctactgcaagggctgcctggtttccctgtcctaccacctggacaccaaggtgcgctgccccatgtgctggcaggtggtggacggcagcagctccttgcccaacgtctccctggcctgggtgatcgaagccctgaggctccctggggacccggagcccaaggtctgcgtgcaccaccggaacccgctcagccttttctgcgagaaggaccaggagctcatctgtggcctctgcggtctgctgggctcccaccaacaccacccggtcacgcccgtctccaccgtctgcagccgcatgaaggaggagctcgcagccctcttctctgagctgaagcaggagcagaagaaggtggatgagctcatcgccaaactggtgaaaaaccggacccgaatcgtcaatgagtcggatgtcttcagctgggtgatccgccgcgagttccaggagctgcgccacccggtggacgaggagaaggcccgctgcctggaggggatagggggtcacacccgtggcctggtggcctccctggacatgcagctggagcaggcccagggaacccgggagcggctggcccaagccgagtgtgtgctggaacagttcggaaatgaggaccaccatgagttcatctggttccactccatggcctccaggtaataaccttggagagagctcagccagggtctggtggctgcgggcacgggcatctcagctccactggttcctccattcagcttaaccagcgcctcccaagcagctgcctatagctggctctataactgagcctggggaagatagaggaaagtcacgtccctgccttcaagggtctcgcagacaggtggggaggcagatggtgaactgtgggtacctagaacagcagaagttcactcaagctacagaaatactagaggagggtagctcatgcctgcaatcccagtactttgggaggccaaggcaggagtattgctggaggccgggagttcgagaccagcctggccaatgtagtaacacccccgtctctacaaaaaatacaaaaataaaaaaattagttggg

SEQ ID NO: 32769 - DNA, 2742 bp, Homo sapiens
  source 1..2742: mol_type = unassigned DNA
gagcgaccgtcggggccggctggggccggagctcggggctcggtgggcctacagcggctccggacggacccccggggctggggagtcggggaggcctgccccggccccctgcccgcggccgccatggcggagaattggaagaactgcttcgaggaggagctcatctgccctatctgcctgcacgttttcgtggagccagtgcagctgccgtgcaaacacaacttctgccggggctgcatcggcgaggcgtgggccaaggacagcggcctcgtacgctgcccagagtgcaaccaggcctacaaccagaagccgggcctggagaagaacctgaagctcaccaacatcgtggagaagttcaatgccctgcacgtggagaagccgccggcggcgctgcactgcgtgttctgccgccgcggccccccgctgcccgcgcagaaggtctgcctgcgctgcgaggcgccctgctgccagtcccacgtgcagacgcacctgcagcagccctccaccgcccgcgggcacctcctggtggaggcggacgacgtgcgggcctggagctgcccgcagcacaacgcctaccgcctctaccactgcgaggccgagcaggtggccgtgtgccagtactgctgctactacagcggcgcgcatcagggacactcggtgtgcgacgtggagatccgaaggaatgaaatccggaagatgctcatgaagcagcaggaccggctggaggagcgagagcaggacattgaggaccagctgtacaaactcgagtcagacaagcgcctggtggaggagaaagtgaaccaactgaaggaggaagttcggctgcagtacgagaagctgcaccagctgctggacgaggacctgcggcagacagtggaggtcctagacaaggcccaggccaagttctgcagcgagaacgcagcgcaggcgctgcacctcggggagcgcatgcaggaggccaagaagctgctgggctccctgcagctgctctttgataagacggaggatgtcagcttcatgaagaacaccaagtctgtgaaaatcctgatggacaggacccagacctgcacgagcagcagcctttcccccactaagatcggccacctgaactccaagctcttcctgaacgaagtggccaagaaggagaagcagctgcggaaaatgctagaaggccccttcagcacgccggtgcccttcctgcagagtgtccccctgtacccttgcggcgtgagcagctctggggcggaaaagcgcaagcactcaacggccttcccagaggccagtttcctagagacgtcgtcgggccctgtgggcggccagtacggggcggcgggcacagccagcggtgagggccagtctgggcagcccctggggccctgcagctccacgcagcacttggtggccctgccgggcggcgcccaaccagtgcactcaagccccgtgttccccccatcgcagtatcccaatggctccgccgcccagcagcccatgctcccccagtatggcggccgcaagattctcgtctgttctgtggacaactgttactgttcttccgtggccaaccatggcggccaccagccctacccccgctccggccactttccctggacagtgccctcgcaggagtactcacacccgctcccgcccacaccctccgtcccccagtcccttcccagcctggcggtcagagactggcttgacgcctcccagcagcccggccaccaggatttctacagggtgtatgggcagccgtccaccaaacactacgtgacgagctaacgccacgcaggcggcggggcgctggggaatcttcctccccagcccccgggctcgggagttatgcatccagagacctgcccttctaccttcctcgcctcccctcttcctcattccattgccccaggtcttttccttttggattttgttttggttttggctttgtttttgatttttttttattatgaatctcctggacgcagaggtgacagtgggagctggcctgggccaggacggcaggtggccctggagatgggaaagtgtctgtgtcgaggcgctgagctctctctctgtttctccttttttcctctactccttccccttcacacccccgtggctggaaggaacctcggcttccctgaaagcttgggggtcccacccttcttaccccacccgggaggaacgcccagggccccgggcttgtttctcctcttgttttccttttgggcagtttgatcactgatcgagtaaggaatgacctttagattgtgcgacttttgtttttgtttttttaaatttttttaaaccaagaatgatttctcctgcttccttctcctcaccatcttcccagacggagttcaaaggccacttctcaagcagcttttggcaccttcagcctcagagtggaatcttttaaagacaggacccctatgtccaggaaaggggaaaaggaactttgccaatgatagtgaccacagcaaaagcaaataataataatattaataataataaagagaaataaaataataaaataaaaaacaatagcacagcccttgttgaggtcagcagggaggaggggctgcccggagttgggtccttgcctggattttgacacagcaacttcctgtagtgagcactttgtatgaatcgtggacttcctgttctcaaggcgcaggtatttattctgtatctgtctagagcacacaccaaaatccaaccttctaataaacatgatggcgcagtccc

SEQ ID NO: 32770 - DNA, 2828 bp, Homo sapiens
  source 1..2828: mol_type = unassigned DNA
agcgaccgtcggggccggctggggccggagctcggggctcggtgggcctacagcggctccggacggacccccggggctggggagtcggggaggcctgccccggccccctgcccgcggccgccatggcggagaattggaagaactgcttcgaggaggagctcatctgccctatctgcctgcacgttttcgtggagccagtgcagctgccgtgcaaacacaacttctgccggggctgcatcggcgaggcgtgggccaaggacagcggcctcgtacgctgcccagagtgcaaccaggcctacaaccagaagccgggcctggagaagaacctgaagctcaccaacatcgtggagaagttcaatgccctgcacgtggagaagccgccggcggcgctgcactgcgtgttctgccgccgcggccccccgctgcccgcgcagaaggtctgcctgcgctgcgaggcgccctgctgccagtcccacgtgcagacgcacctgcagcagccctccaccgcccgcgggcacctcctggtggaggcggacgacgtgcgggcctggagctgcccgcagcacaacgcctaccgcctctaccactgcgaggccgagcaggtggccgtgtgccagtactgctgctactacagcggcgcgcatcagggacactcggtgtgcgacgtggagatccgaaggaatgaaatccggatgctcatgaagcagcaggaccggctggaggagcgagagcaggacattgaggaccagctgtacaaactcgagtcagacaagcgcctggtggaggagaaagtgaaccaactgaaggaggaagttcggctgcagtacgagaagctgcaccagctgctggacgaggacctgcggcagacagtggaggtcctagacaaggcccaggccaagttctgcagcgagaacgcagcgcaggcgctgcacctcggggagcgcatgcaggaggccaagaagctgctgggctccctgcagctgctctttgataagacggaggatgtcagcttcatgaagaacaccaagtctgtgaaaatcctgatggacaggacccagacctgcacgagcagcagcctttcccccactaagatcggccacctgaactccaagctcttcctgaacgaagtggccaagaaggagaagcagctgcggaaaatgctagaaggccccttcagcacgccggtgcccttcctgcagagtgtccccctgtacccttgcggcgtgagcagctctggggcggaaaagcgcaagcactcaacggccttcccagaggccagtttcctagagacgtcgtcgggccctgtgggcggccagtacggggcggcgggcacagccagcggtgagggccagtctgggcagcccctggggccctgcagctccacgcagcacttggtggccctgccgggcggcgcccaaccagtgcactcaagccccgtgttccccccatcgcagtatcccaatggctccgccgcccagcagcccatgctcccccagtatggcggccgcaagattctcgtctgttctgtggacaactgttactgttcttccgtggccaaccatggcggccaccagccctacccccgctccggccactttccctggacagtgccctcgcaggagtactcacacccgctcccgcccacaccctccgtcccccagtcccttcccagcctggcggtcagagactggcttgacgcctcccagcagcccggccaccaggatttctacagggtgtatgggcagccgtccaccaaacactacgtgacgagctaacgccacgcaggcggcggggcgctggggaatcttcctccccagcccccgggctcgggagttatgcatccagagacctgcccttctaccttcctcgcctcccctcttcctcattccattgccccaggtcttttccttttggattttgttttggttttggctttgtttttgatttttttttattatgaatctcctggacgcagaggtgacagtgggagctggcctgggccaggacggcaggtggccctggagatgggaaagtgtctgtgtcgaggcgctgagctctctctctgtttctccttttttcctctactccttccccttcacacccccgtggctggaaggaacctcggcttccctgaaagcttgggggtcccacccttcttaccccacccgggaggaacgcccagggccccgggcttgtttctcctcttgttttccttttgggcagtttgatcactgatcgagtaaggaatgacctttagattgtgcgacttttgtttttgtttttttaaatttttttaaaccaagaatgatttctcctgcttccttctcctcaccatcttcccagacggagttcaaaggccacttctcaagcagcttttggcaccttcagcctcagagtggaatcttttaaagacaggacccctatgtccaggaaaggggaaaaggaactttgccaatgatagtgaccacagcaaaagcaaataataataatattaataataataaagagaaataaaataataaaataaaaaacaatagcacagcccttgttgaggtcagcagggaggaggggctgcccggagttgggtccttgcctggattttgacacagcaacttcctgtagtgagcactttgtatgaatcgtggacttcctgttctcaaggcgcaggtatttattctgtatctgtctagagcacacaccaaaatccaaccttctaataaacatgatggcgcagtcccactccctgcctcgcctgttcccctatcccccccaggcctgggatcttcaggcgtcggtgtggggaggggcccctgccctccttgccttga

SEQ ID NO: 32771 - DNA, 5284 bp, Homo sapiens
  source 1..5284: mol_type = unassigned DNA
aaactacgggcactcagaaatagacaaactgttcttgcctcaaccgaaccaaaggcccagcgggcctcgaaaaagctcagccaggtgctttgggaggccgcgaggaggaagaaggatccgtggaaggaagcacgttcacaccacggcactgaggcctctgggccgagctataatttaaagcatgaaacgaaggggtcatagattctgactaatgctgaccatttccatcggttacccagttgaatctcatgtcgacactaggaaatcgactttatacatgctctttaggaaacgagggacgcaggatgaaagaagccaagagtgtcgccagggcttgcgccagcgccgtcagactcccgggatgggggagctccagggcacggcgtcagcggattcacggagaaggagaaaagccccactgccgtgcagaagcctaggcccgggtgagacgcctgcgaaggctgccagcagcggaagagaaggggcgtcctccgtgctgcgcagcactcgcccgcggtaggtgggcgcggagctcagagctgggagccaaacgcaaacgctggcgagaagccccagccccctccggcagcccactcgctgcggggaggggtttctcacgcccccagctcctgggagactgcaccggaggtcggaagtaagccgggcgaggatgaatcatcccgcctaactcctccttcccggtcccctagcctccgcacgccggcccccttcagagatcttgcagccgcgagcgaagactgccctatcctcagactctaccgaaccccctgtggcctgcggagacgaggagacggacgggtctggtggccaatgagagcttcgatctcttgccccccgcccaatgggccgctgctcatgggccggggcgggactaggagggcaggtaggggcggtccgggctggcgcgcggcgcggcggctacgcggctgcggctcacagagctagcgcctctctgggtgtccgtgccagtgctgcgcgggaaggcaccaccaccacagccgccgccgctggccagggtgctggacaagacgggcccgtcggccacctcgccagctcaggcacccgctgcagccgtcgctgtctcctcccagaccggtccccatggaggagatggaagaggagttgaaatgccccgtgtgcggctccttctatcgggagcccatcatcctgccctgctctcacaatttgtgtcaggcgtgcgcccgcaacatcctggtgcagaccccagagtctgaatccccccagagccatcgggccgcgggctccggggtctccgactatgactatctggacctggacaagatgagcctatacagcgaggcggacagcggctatggctcctacggggggttcgccagcgcccccactaccccgtgccagaagtcccccaacggcgtccgcgtgtttcccccggctatgccgccaccggccacccacttgtcaccggccctggccccggtgccccgcaactcctgtatcacctgcccccagtgtcaccgcagcctcatcctggatgaccgggggctccgcggcttccccaagaatcgcgtactggaaggggtaattgaccgctaccagcagagcaaagccgcggccctcaagtgccagctctgcgagaaggcgcccaaggaagccaccgtcatgtgcgaacagtgcgatgtcttctactgcgatccgtgccgcctgcgctgccacccgccccgggggcccctagccaagcaccgcctggtgcccccggcccagggtcgtgtgagccggaggctgagcccacgcaaggtctccacctgcacagaccacgagctggagaaccacagcatgtactgcgtgcaatgcaagatgcccgtgtgctaccagtgcttggaggagggcaaacactccagccacgaagtcaaggctctgggggccatgtggaaactacataagagccagctctcccaggcgctgaacggactgtcagacagggccaaagaagccaaggagtttctggtacagctgcgcaacatggtccagcagatccaggagaacagtgtggagtttgaagcctgtctggtggcccaatgtgatgccctcatcgatgccctcaacagaagaaaagcccagctgctggcccgcgtcaacaaggagcatgagcacaagctgaaggtggttcgagatcagatctctcactgcacagtgaaattgcgccagaccacaggtctcatggagtactgcttggaggtgattaaggaaaatgatcctagtggttttttgcagatttctgacgccctcataagaagagtgcacctgactgaggatcagtggggtaaaggcacactcactccaaggatgaccacggactttgacttgagtctggacaacagccctctgctgcaatccatccaccagctggatttcgtgcaagtgaaagcttcctctccagtcccagcaacccctatcctacagctggaggaatgttgtacccacaacaacagcgctacgttgtcctggaaacagccacctctgtccacggtgcccgccgatggatacattctggagctggatgatggcaacggtggtcaattccgggaggtgtatgtggggaaggagacaatgtgcactgtggatggtcttcacttcaacagcacatacaacgctcgggtcaaggccttcaacaaaacaggagtcagcccgtacagcaagaccctggtcctccaaacgtctgaggtggcctggtttgctttcgaccctggctcggcgcactcggacatcatcctctccaatgacaacctgacagtgacctgtagtagctatgatgaccgggtggtgctagggaagactggcttctccaagggcatccactactgggagctcacggtagatcgctatgacaaccaccctgatcctgcctttggtgtggctcgcatggacgtgatgaaggatgtgatgttaggaaaagacgacaaagcttgggcaatgtatgtggacaataaccggagctggttcatgcacaacaactcgcacaccaacagaactgagggagggatcacaaaaggggccacaattggggtcctcctcgacttaaatagaaaaaacttgacattttttatcaacgatgaacaacaaggtcccatagcatttgataacgtggagggcctcttcttccctgcggtcagcctgaacaggaacgtgcaggtcacgctgcacaccgggctcccagtccccgacttctactccagcagagcatcaatagcctaaggatgtgccgtggaggcgccagctgcctgttcttacctccgcctgcgagagccacagcaaggagctcagccagccgtggtggggtgcagagttggcaggagtgggagaaggaggagagaaaagctggtcctctgcagtctttacacccacagctctgcccttttccctttcaacctctcctccgctgtcatgcctgcttccgcttccatgtccaacaattctaaccaacaaaggacctagacagcccaccaagtcacttggttcccactcccagattttgcttttatttaacttaattttttatgtaggtgagttatattttctttcttttctgatcaggttattggtgacttactggactggcaccgccaggagaaaattctcctgctaactttttttcttaagctttctgtcaaacaatgaggttgtagggggaggtagggaagaatgagctgaatttgtagcatacagcttacctgctagaatgttcttaccctcttacctctcctgtagcgttagctctgcagagctaagctttgggagaatgaatctatcactgagaagttttactactcattgaagcacaaaaatatccgctacacaggttcacatcagggtaggatcgttaggatggctctataattaggataggccagaaccctggccactgtataaaattggaaagtctctaagacacaggcaaaccaggggacttaatgatttggttcgtttatttaataaaagcttttaattgagaacctactattgaccaggcactgttcaagacactagaacattatgttctagacactgtggggacacagtggtgaacagacaggcatggtctctgcccttcggagcttatattccagtaggagaaaaagcaaaaataaaataattataaatggtcatatgtactagaaaggaaatgggcaagggtcaaagagactcatgggcaagatctttcaggcttcctagaatgatgctaaaaatccacacattctggccatagcaccagaaatgtaccaactcaatgccttttcagctgcactatttaattatggtacctgctgccactcatcacagagcccttcttggtagaaatgatgtcagcattcttatttgctgatgctgctatgataccacgccttaaaaattgacagttgaaaaaaaaaagagtgaccagagggcaaaggacccattctcagtaatgggagatcttgagttgcagtccacagcattcacattctcaggataaacatgcttgtctccatatatactatctgtgcctgttatgaatgaaaaatccatccactctgctgccattcacagcctaattttctggagtagtccaaacaatgtttggaaaaacatgggactgtatgtcattactatgactgatagcagaataataatgcatcttacttctatatagagatagacttacataggttacccttgaaattcattagtttgtcataaagttttaggaaaggtaggacccggaaagaagttctaattagttgtctaaatatttttcagtgagccaagaaattcaccatgaaaaaacaagaataacaaatagaagggaagagataggatgggaaagctaacaaattaaagttttggcaaaaaggaatatatgtaaatagctaattatttacttttgtgcttactttatttagattatttctatcagttacaatctttttctagttaagtgtacctaatttatggaatgggtgctatcctgtttatgtgtgtcttggtttttcttggctacagaaaaactgttgcagggcaacactagtttgatatttgatttactctccaatgagactcaatggctgggccgtggtagactcatagttcctcttgttctttattaaattcatcctgctaattagatttctagtgacttgtaacatgtagtttacactgaattgcaattacagatgcatacaactactatactagaaaaaattgtcatttctgatgtgccaataaatgatttttatgagagaataaa

SEQ ID NO: 32772 - DNA, 3312 bp, Homo sapiens
  source 1..3312: mol_type = unassigned DNA
agagatcttgcagccgcgagcgaagactgccctatcctcagactctaccgaaccccctgtggcctgcggagacgaggagacggacgggtctggtggccaatgagagcttcgatctcttgccccccgcccaatgggccgctgctcatgggccggggcgggactaggagggcaggtaggggcggtccgggctggcgcgcggcgcggcggctacgcggctgcggctcacagagctagcgcctctctgggtgtccgtgccagtgctgcgcgggaaggcaccaccaccacagccgccgccgctggccagggtgctggacaagacgggcccgtcggccacctcgccagctcaggcacccgctgcagccgtcgctgtctcctcccagaccggtccccatggaggagatggaagaggagttgaaatgccccgtgtgcggctccttctatcgggagcccatcatcctgccctgctctcacaatttgtgtcaggcgtgcgcccgcaacatcctggtgcagaccccagagtctgaatccccccagagccatcgggccgcgggctccggggtctccgactatgactatctggacctggacaagatgagcctatacagcgaggcggacagcggctatggctcctacggggggttcgccagcgcccccactaccccgtgccagaagtcccccaacggcgtccgcgtgtttcccccggctatgccgccaccggccacccacttgtcaccggccctggccccggtgccccgcaactcctgtatcacctgcccccagtgtcaccgcagcctcatcctggatgaccgggggctccgcggcttccccaagaatcgcgtactggaaggggtaattgaccgctaccagcagagcaaagccgcggccctcaagtgccagctctgcgagaaggcgcccaaggaagccaccgtcatgtgcgaacagtgcgatgtcttctactgcgatccgtgccgcctgcgctgccacccgccccgggggcccctagccaagcaccgcctggtgcccccggcccagggtcgtgtgagccggaggctgagcccacgcaaggtctccacctgcacagaccacgagctggagaaccacagcatgtactgcgtgcaatgcaagatgcccgtgtgctaccagtgcttggaggagggcaaacactccagccacgaagtcaaggctctgggggccatgtggaaactacataagagccagctctcccaggcgctgaacggactgtcagacagggccaaagaagccaaggagtttctggtacagctgcgcaacatggtccagcagatccaggagaacagtgtggagtttgaagcctgtctggtggcccaatgtgatgccctcatcgatgccctcaacagaagaaaagcccagctgctggcccgcgtcaacaaggagcatgagcacaagctgaaggtggttcgagatcagatctctcactgcacagtgaaattgcgccagaccacaggtctcatggagtactgcttggaggtgattaaggaaaatgatcctagtggttttttgcagatttctgacgccctcataagaagagtgcacctgactgaggatcagtggggtaaaggcacactcactccaaggatgaccacggactttgacttgagtctggacaacagccctctgctgcaatccatccaccagctggatttcgtgcaagtgaaagtcccagcaacccctatcctacagctggaggaatgttgtacccacaacaacagcgctacgttgtcctggaaacagccacctctgtccacggtgcccgccgatggatacattctggagctggatgatggcaacggtggtcaattccgggaggtgtatgtggggaaggagacaatgtgcactgtggatggtcttcacttcaacagcacatacaacgctcgggtcaaggccttcaacaaaacaggagtcagcccgtacagcaagaccctggtcctccaaacgtctgaggacacagattcagaagaacagaccctcccttttccagtgccttcggaaagattgccgctccgtagaatgagtcctttctcctccacccttaatctacaacccagcttccccgggagatcctactttgatttccgatcctcaccccaccagctgagcttgcattcctctttacagtctctcaatgcaccgggatgcaattttgagacacaatctgcaccttactctcaattagttgacattaaaaagctgttggcagtggcctggtttgctttcgaccctggctcggcgcactcggacatcatcctctccaatgacaacctgacagtgacctgtagtagctatgatgaccgggtggtgctagggaagactggcttctccaagggcatccactactgggagctcacggtagatcgctatgacaaccaccctgatcctgcctttggtgtggctcgcatggacgtgatgaaggatgtgatgttaggaaaagacgacaaagcttgggcaatgtatgtggacaataaccggagctggttcatgcacaacaactcgcacaccaacagaactgagggagggatcacaaaaggggccacaattggggtcctcctcgacttaaatagaaaaaacttgacattttttatcaacgatgaacaacaaggtcccatagcatttgataacgtggagggcctcttcttccctgcggtcagcctgaacaggaacgtgcaggtaagcaccctgcccctgaggttaaacagctgttgctggctaccggttcaaaggctgcccagggccgttcaatccaaccgaagagagggaagctgacagcgtaaggcccagaccaagatatgaaggagaggaggagagaaagggatcagcactggcaacttattttattccacgccaagcataagcaccttctttatacttggacgcagactagttaatagcacataggaaactagaattctcttcatggttggctaatgatcatctctgtagctctagtttcacctctaaatagaaacgaaagcctttaaccaactggcatgaaaacaaatagaatgacttaacaaagctcaggagtgcctgagaagaggtgagggtgtaagactgaagcattagtatcattatcagaaaatctgagcatcttctctgcactcttgtttggctctgttaggtcctaaggggtagaaaacatagtccctacctacaacttagtcaattattatttattatagaataaaacaacagcttctcatttattcattcagcaaatatctatagaatgcctttaatgtgccaggcacagttataagtgtctgggatacatcagtg

SEQ ID NO: 32773 - DNA, 3726 bp, Homo sapiens
  source 1..3726: mol_type = unassigned DNA
gccagtgctgcgcgggaaggcaccaccaccacagccgccgccgctggccagggtgctggacaagacgggcccgtcggccacctcgccagctcaggcacccgctgcagccgtcgctgtctcctcccagaccggtccccatggaggagatggaagaggagttgaaatgccccgtgtgcggctccttctatcgggagcccatcatcctgccctgctctcacaatttgtgtcaggcgtgcgcccgcaacatcctggtgcagaccccagagtctgaatccccccagagccatcgggccgcgggctccggggtctccgactatgactatctggacctggacaagatgagcctatacagcgaggcggacagcggctatggctcctacggggggttcgccagcgcccccactaccccgtgccagaagtcccccaacggcgtccgcgtgtttcccccggctatgccgccaccggccacccacttgtcaccggccctggccccggtgccccgcaactcctgtatcacctgcccccagtgtcaccgcagcctcatcctggatgaccgggggctccgcggcttccccaagaatcgcgtactggaaggggtaattgaccgctaccagcagagcaaagccgcggccctcaagtgccagctctgcgagaaggcgcccaaggaagccaccgtcatgtgcgaacagtgcgatgtcttctactgcgatccgtgccgcctgcgctgccacccgccccgggggcccctagccaagcaccgcctggtgcccccggcccagggtcgtgtgagccggaggctgagcccacgcaaggtctccacctgcacagaccacgagctggagaaccacagcatgtactgcgtgcaatgcaagatgcccgtgtgctaccagtgcttggaggagggcaaacactccagccacgaagtcaaggctctgggggccatgtggaaactacataagagccagctctcccaggcgctgaacggactgtcagacagggccaaagaagccaaggagtttctggtacagctgcgcaacatggtccagcagatccaggagaacagtgtggagtttgaagcctgtctggtggcccaatgtgatgccctcatcgatgccctcaacagaagaaaagcccagctgctggcccgcgtcaacaaggagcatgagcacaagctgaaggtggttcgagatcagatctctcactgcacagtgaaattgcgccagaccacaggtctcatggagtactgcttggaggtgattaaggaaaatgatcctagtggttttttgcagatttctgacgccctcataagaagagtgcacctgactgaggatcagtggggtaaaggcacactcactccaaggatgaccacggactttgacttgagtctggacaacagccctctgctgcaatccatccaccagctggatttcgtgcaagtgaaagcttcctctccagtcccagcaacccctatcctacagctggaggaatgttgtacccacaacaacagcgctacgttgtcctggaaacagccacctctgtccacggtgcccgccgatggatacattctggagctggatgatggcaacggtggtcaattccgggaggtgtatgtggggaaggagacaatgtgcactgtggatggtcttcacttcaacagcacatacaacgctcgggtcaaggccttcaacaaaacaggagtcagcccgtacagcaagaccctggtcctccaaacgtctgagggtaaggcccttcagcagtatccctcagagcgagaactgcgtggcatctaaagtggctggcaagcccggaggtaaccccaccactgcccacattcctgaagtgtttccatgacttgctctgcattctgcacagagccgctgttcctctcctgcctttagagagcctatggtatgtggatgtgatcaaaccaaagattccacatcggcagttccaatggcttgggccggcggcttcctttgataacaatctaaataagctgcagttgaagaagctgaaaaatgaaggcctgaatgtgcccctggtgtgtaagacaaatgtatctaggctctagagcaggctcccattctccaccgatacacatcatgtgccagttttgcccagatgattctaaattactctgtagtacttgcttgttctgagggtgggacctaggttctttccagtcgtggatttgtatgactgaatgtgtttcaaatgggtggtggggtgctagagctgtttagagagggcctgttggctgctcctggcttacccacttagactgcctccgtttcatacccaaagcggaggccgtcagcaccaggattgagacttcctgtgggcaccaaacaggaagagaccagcaacttcgcattacccgccattttcatctttgccagtcccttcagtcttggctaggctaccgagagccaccatacaaggttcatctctagagaatttttgcttcttagctatactttaaatattttggtcatcaaagacaagtaatgtgtctcagatgagaggcttgaatttgatggccagatataacctctgaggcttttaacattttcattttaagagtaagcaagacacatgaaattaaacctacaaggaggtatttgtggctggtgccaaagcattctgacactttggggtgtcattttaatcaaagaaatcacccccccacctcaccgggattctccataacttccctctgcagaactaattatgttgattttgttcaagttcaagatgttagctaaaagaactatggtggtgttttttttcccacttcccacaaacctcaacatgtgccagtcaccctaaaatgcttcacatggttaaaaacaagcacaattttgaatcctacagcaaggatgaaaggcccctagccgtgaaaacagtgctttggggagcagttgtcagtctaagtgatgctattccaagagaaggatatgctgagggaaaatgcccacatgacctgttcccatttggagtacagtgatgtggtagctacagcttcccccagaattatcattttagcaccttctctcagggatgacctatcagtttgagagcagttgcctcttttctcaaaataccatactaactgctaaagccctccaagagtctttcctagatgcaacgcagaaggcccttgctggtgatggcctcatttcccatgtgtgtacaaggtggtttgattgaagagtgaagtgcatgcctgcagagcagagagaaatttgtagcaatgttgctaatatgtgttatcagatctgcgggaaaactatttctattcataatacatcatgggaatcatactattctggtaaaaatcagttattagcataacagcctgagcacttatgtctctcgtttcatcctgcaggaggatgtagcgcctcagtttattttaatgttcataagattatggtgtctaatttaataaattacaggattggaactgcgatccttggtaccacagtcacagaactgggggtcattttctagatgaaacaaacggaacaagttctcttccaacaaagaaactgtactgtagaaattaatttcctccatgaattttatatattgtgtacaaatataaggtatgtatctgaatacaaagaaaagcctatcatcatatagatatcagtattctctgttactgcacagaagtaattttctcatgatgaaataaagttcacacacatactttctccataa

SEQ ID NO: 32774 - DNA, 3931 bp, Homo sapiens
  source 1..3931: mol_type = unassigned DNA
gcagtttgccgcttcctcgtcctccatcctgcgtccatggccaccgctgcgactgaggagcccttcccttttcacggtctcctgccgaagaaggagaccggagccgcctccttcctctgccgctacccggagtatgatgggcggggggtgctcatcgcagtcctggacacgggggtcgacccgggggctccgggcatgcaggttacaactgatggaaaaccaaaaatcgttgatatcattgatacaacaggaagtggcgatgtgaatactgctacagaagtagagccaaaggatggtgagattgttggcctttcaggaagagtgcttaagattcctgcaagctggacaaatccctcaggcaaatatcatattggcataaaaaatggctatgacttctatcctaaggcactcaaggaaaggatacagaaagaacggaaggaaaaaatctgggaccctgttcacagagtggcccttgcagaagcctgtagaaaacaggaagaatttgatgttgccaacaacggctcttctcaagcaaataaactaatcaaggaggaacttcaaagtcaagtggaattgctaaattcttttgagaagaaatacagcgatcctggccctgtatatgactgcttggtatggcatgatggcgaagtctggagagcctgcattgattctaatgaagatggggacttgagtaaatctaccgtgttgagaaactacaaagaagcccaagaatatggctcttttggcacagctgagatgttgaattactccgttaatatatacgatgatggaaacctgctctccattgtgaccagtggaggagctcatgggacacatgtagctagtatagctgctggacactttccagaagaacctgaacggaatggggtagctcctggtgctcaaattctttccatcaagattggtgatacaagactaagcacaatggaaacaggcacaggcctcataagagctatgatagaagttataaatcataagtgtgatcttgtcaactacagttacggagaagcaactcactggccaaattctgggagaatttgtgaagtaattaatgaagcagtatggaagcataatataatttatgtttcaagtgctggaaataatggtccatgcctgtctacagttggttgtccaggtggaactacatcaagtgtgataggtgttggtgcttatgtttctcctgatatgatggttgctgagtattcactgagagagaaattacctgcaaatcaatatacttggtcttctagaggacctagtgctgacggggcccttggtgtgagtatcagtgcgccaggaggagccattgcttctgttcctaactggacactgagagggacgcagctgatgaatggaacatctatgtcttcccccaatgcatgtggaggcattgccctgatcctttcaggtctgaaagctaataacattgactacacagttcattcagtcagaagagctctagaaaacactgcagtgaaggctgacaatatagaagtatttgctcaaggacatggtattattcaggttgataaagcctatgactacctcgttcagaatacatcatttgctaataaattaggttttactgttactgttggaaataaccgtggcatctacctccgagatcctgttcaggtggctgcaccttcagatcatggcgttggcattgaacctgtatttccggagaacacagaaaactctgaaaaaatatcccttcagcttcatttagctctgacttcaaattcatcttgggttcagtgtcccagccatttggaactcatgaatcaatgtagacacataaacatacgtgtggatcccaggggcttaagagaaggattgcattatacagaggtatgtggctatgatatagcatcccctaacgcaggtccgctcttcagagttccgatcactgcagttatagcagcaaaagtaaatgaatcatcacattatgatctagcctttacagatgtacactttaaacctggtcaaattcgaaggcattttattgaggttcctgagggtgcaacatgggctgaagtgacagtgtgttcgtgttcttctgaggtgtcagcaaagtttgttctacatgcagtccagcttgtgaagcaaagagcatatcgaagccatgaattctataagttttgttctcttccagagaaaggaacactgactgaagcttttcctgtcctaggtggaaaagcaattgaattttgcattgctcgttggtgggcaagtctcagtgatgtcaacattgattataccatttctttccatgggatagtgtgtactgctcctcagttaaacattcatgcatcggaaggaatcaaccgctttgatgttcagtcctccttgaaatacgaagatctggctccctgcataactttgaagaactgggtccaaacactgcgcccagtgagtgcaaaaacaaaacctttaggatcaagagatgttttgccaaataaccgtcaactttatgagatggtcctgacatataactttcatcaacccaagagtggggaagtaactccaagctgcccactactttgtgaactattatatgaatctgaatttgacagccaactgtggattatttttgaccagaacaaaagacagatgggttcaggcgatgcctatccacatcagtattctttgaaactggagaaaggagattatacaattcgactacagattcgccatgagcaaatcagtgatttggaacgccttaaagaccttccatttattgtttctcatagattgtctaataccttgagcttagatattcatgaaaatcatagttttgcacttctagggaagaagaaatcaagcaatttgacattaccacccaaatataaccagccattctttgttacttccttacctgatgataaaatacctaaaggggcaggacctggatgctatcttgcaggatccttaacattgtcaaagactgaactaggaaagaaagctgatgtaatccctgttcattactacttaatacctccaccaacaaagactaagaatggcagcaaagataaggaaaaagattcagaaaaagagaaagatttaaaagaagagtttactgaagcattacgagatcttaaaattcagtggatgacaaagctggattctagtgacatttataacgaattgaaagaaacatatcctaattatcttcctctgtacgttgcacgacttcatcaattggatgctgaaaaggaacgaatgaaaagacttaatgaaattgttgatgcggcaaatgctgttatttctcatatagatcaaacagccctagcagtttatattgcaatgaagactgatcccaggcctgatgcagctactataaaaaatgacatggacaaacaaaaatccaccctcgtagatgccctttgtaggaaaggttgtgccctggcagaccatcttcttcacacccaggctcaagacggagccatttccactgatgcagaaggaaaggaggaggaaggagaaagtcctttggattctctggcagaaacattttgggaaactactaaatggactgatctctttgacaataaggttttgacatttgcatataaacatgcattagtaaataaaatgtatgggagaggccttaaatttgcaactaaacttgtggaagaaaaaccaacaaaagaaaactggaaaaattgtattcaactgatgaagttacttggatggacccattgtgcatcttttactgaaaactggctccccatcatgtatcctcccgattattgcgtattctaaaataggaaacaagactttaaattttaaaaaaggaagttttatagtgaatgggtataaaaacaaatttgtggcatttttagtctaatgcatgttttcatccactatccagtactgattattaaaatgacatgtatttatcagagaa

SEQ ID NO: 32775 - DNA, 4065 bp, Homo sapiens
  source 1..4065: mol_type = unassigned DNA
tgttcgtgtcttctaataagagcaagccgatcattaaccttctcaacgcagcgtcttttggtttcttccatttccaaccagcagaatatcttcttggaactttcttttttaacctctgccttcctcacgcacctattttttggagggttccttttccctgctctctacctcctgtttaaattgaaacctgtacactttaagctttttgctcatcgcttggttttgctcttttatgccttaaattatctttgcggcatttttgactcatctgctggggaagaccattccctcaagaaaacttccaacagcaactcaaagcaaactaagatgaaaaaatggggggaaagaatctgtccactgggaacgctttacgtcaccgtgttgctctggaagacagagactgctctgggcacctggcgaggcggctctgcagtgcaggctggggccggtccctgcggcctgctgggctctggcctcgtttggcccatcactcatgctgccgtctcaagcacaagggttgctgtggtgggttttccctctgtttcctgcttcctcactgtcctacccacctgtttcctacagggcagatggcctggcccgtaacactttcctgaaggcatgcagtgaaagcagcagcagtagcaacatctccaccatgttggtgacacacgattacacggcagtgaaggaggatgagatcaacgtctaccaaggagaggtcgttcaaattctggccagcaaccagcagaacatgtttctggtgttccgagccgccactgaccagtgccccgcagctgagggctggattccaggctttgtcctgggccacaccagtgcagtcatcgtggagaacccggacgggactctcaagaagtcaacatcttggcacacagcactccgtttaaggaaaaaatctgagaaaaaagataaagacggcaaaagggaaggcaagttagagaacggttatcggaagtcacgggaaggactcagcaacaaggtatctgtgaagcttctcaatcccaactacatttatgacgttcccccagaattcgtcattccattgagtgaggtcacgtgtgagacaggggagaccgttgttcttagatgtcgagtctgtggccgccccaaagcctcaattacctggaagggccctgaacacaacaccttgaacaacgatggtcactacagcatctcctacagtgacctgggagaggccacgctgaagattgtgggcgtgaccacggaagatgacggcatctacacgtgcatcgctgtcaatgacatgggttcagcctcatcgtcggccagcctgagggtcctaggtccagggatggatgggatcatggtgacctggaaagacaactttgactccttctacagtgaagtggctgagcttggcaggggcagattctctgtcgttaagaaatgtgatcagaaaggaaccaagcgagcagtggccactaagtttgtgaacaagaagttgatgaagcgcgaccaggtcacccatgagcttggcatcctgcagagcctccagcaccccctgcttgtcggcctcctcgacacctttgagacccccaccagctacatcctggtcttagaaatggctgaccagggtcgcctcctggactgcgtggtgcgatggggaagcctcactgaagggaagatcagggcgcacctgggggaggttctggaagctgtccggtacctgcacaactgcaggatagcacacctggacctaaagcctgagaatatcctggtggatgagagtttagccaagccaaccatcaaactggctgactttggagatgctgttcagctcaacacgacctactacatccaccagttactggggaaccctgaattcgcagcccctgaaatcatcctcgggaaccctgtctccctgacctcggatacgtggagtgttggagtgctcacatacgtacttcttagtggcgtgtcccccttcctggatgacagtgtggaagagacctgcctgaacatttgccgcttagactttagcttcccagatgactactttaaaggagtgagccagaaggccaaggagttcgtgtgcttcctcctgcaggaggaccccgccaagcgtccctcggctgcgctggccctccaggagcagtggctgcaggccggcaacggcagaagcacgggcgtcctcgacacgtccagactgacttccttcattgagcggcgcaaacaccagaatgatgttcgacctatccgtagcattaaaaactttctgcagagcaggcttctgcctagagtttgacctatccagaagttctttctcattctctttcacctgccaatcagctgttaatctgaattttcaagagaaaacaagcaaacataactgatcagctgccggtatgttcatcgtgtgaaattgcattccaagtgagctgtgctcagcagtgcttggacacagagctgcaagctgcgctggggtggaggaccgtcacttacactctgcccaaggcagaggtcgcattgctgtatcacagtattttattcaggtttctgcaaaaaaataaaaagataacttttttaaacaaacatgaatagaattttgcaaatttaacgttttcaagatttattcaaggaaacaaaatgcctatgttcaaccactggtgttaatgaacaaagatactgtgcgtctctggggaagacgcacctaggtggcggccactcccatggccttgtctaggactcagagaccactcggctctgagcttccaggcgcctcgtctgtgtgcatctcacgcccgacgtggcttctgaaacgtgcattcaacctcaaacttttgcataaaatagaatgaatcgttttgctctgatgaaatgtaggccttacttgtatataagactgttcctgccttcggtctgtcattttcccacctgcctcccctacccaccccccacccaccacctggggcttcctctgggggtccgagggtcttcccatcacatgaagacatcaggttgggtcctgccccactgcccctccccctgttcctgccccaagccgtcaatcagattgtggagcagtacacagtcagatgaaaatactgtaaatgcactcattgggggttttttggttttacttcatatcatgtgcaatgttgtggctttaacattttatgcaactatttatgaagacctctgttgtacctgtaataaatatatagaaaaagcacatacttcgtatggtgagctttatggttttgtgtgtgtgttggggttggcgggtgggtgggtagggtcgtagccctgtgccatcggttcaaagagacttttcgtgaaatttgttggttttgaggactgtaaaagtgatttcatactctgaatataaaactggataatagggtaatgttttaaaatttattatgctattattcagaatgccaaagtattattttttttcccaaaatcagtctggacatttactactttttagactttttgacgttgaactttctgtataaaaattggctgggttttgagcttttggtaagaaataaaagccgattaagcactggccgccccgcggctggtacccaatgcccgagtcactgtggcagcattcgcactggtgtggggagtcctttcaactcaaggaggctgggtttctgggcaccctcgaagttttctggatgtctttttatctttctcgtgtgaactgcactacaaaagagaccagcccgcttcccaagccagccagacacctgggtcttgagccataaactggcgtagttaagctttgcagcttccagtgtattttatttattcttttgttgggtttttgtttgtttcttcttgtaaaattgtacagaaactttttaaaagaaattggattcgaaactggatgtgtattcgtaacctcataatttttatttgtgtattgtttcttttattatttcagttaaatttttacattattttgcatgtatatttctttgtacagagaccttacatgtttacacagtatgatgtgatgtaaatattttattttgccatcagttattttaaaaaattaaacatatttgcctg

SEQ ID NO: 32776 - DNA, 11100 bp, Homo sapiens
  source 1..11100: mol_type = unassigned DNA
gcggccgcgggcgccgccgcagccatgagcggcagcagcggcggagccgccgcccccgccgcgtcctccggccccgccgcggcggccagcgcggctggctcgggctgcgggggcggtgccggcgagggggcagaggaggcggccaaggacctggccgacatcgcggccttcttccgatccgggtttcgaaaaaacgatgaaatgaaagctatggatgttttaccaattttgaaggaaaaagttgcatacctttcaggtgggagagataaacgtggaggtcccattttaacgtttccggcccgcagcaatcatgacagaatacgacaggaggatctcaggagactcatttcctatctagcctgtattcccagcgaggaggtctgcaagcgtggcttcacggtgatcgtggacatgcgtgggtccaagtgggactccatcaagccccttctgaagatcctgcaggagtccttcccctgctgcatccatgtggccctgatcatcaagccagacaacttctggcagaaacagaggactaattttggcagttctaaatttgaatttgagacaaatatggtctctttagaaggccttaccaaagtagttgatccttctcagctaactcctgagtttgatggctgcctggaatacaaccacgaagaatggattgaaatcagagttgcttttgaagactacattagcaatgccacccacatgctgtctcggctggaggaacttcaggacatcctagctaagaaggagctgcctcaggatttagagggggctcggaatatgatcgaggaacattctcagctgaagaagaaggtgattaaggcccccatcgaggacctggatttggagggacagaagctgcttcagaggatacagagcagtgaaagctttcccaaaaagaactcaggctcaggcaatgcggacctgcagaacctcttgcccaaggtgtccaccatgctggaccggctgcactcgacacggcagcatctgcaccagatgtggcatgtgaggaagctgaagctggaccagtgcttccagctgaggctgtttgaacaggatgctgagaagatgtttgactggatcacacacaacaaaggcctgtttctaaacagctacacagagattgggaccagccaccctcatgccatggagcttcagacgcagcacaatcactttgccatgaactgtatgaacgtgtatgtaaatataaaccgcatcatgtcggtggccaatcgtctggtggagtctggccactatgcctcgcagcagatcaggcagatcgcgagtcagctggagcaggagtggaaggcgtttgcggcagccctggatgagcggagcaccttgctggacatgtcctccattttccaccagaaggccgaaaagtatatgagcaacgtggattcatggtgtaaagcttgcggtgaggtagaccttccctcagagctgcaggacctagaagatgccattcatcaccaccagggaatatatgaacatatcactcttgcttattctgaggtcagccaagatgggaagtcgctccttgacaagctccagcggcccttgactcccggcagctccgattccctgacagcctctgccaactactccaaggccgtgcaccatgtcctggatgtcatccacgaggtgctgcaccaccagcggcagctggagaacatctggcaacaccgcaaggtccggctgcatcagaggctgcagctgtgtgttttccagcaggacgttcagcaggtgctagactggatcgagaaccacggagaagcatttctgagcaaacatacaggtgtggggaaatctcttcatcgggccagagcattgcagaaacgtcatgaagattttgaagaagtggcacagaacacatacaccaatgcggataaattactggaagcagcagaacagctggctcagactggggaatgtgaccccgaagagatttatcaggctgcccatcagctggaagaccggattcaagatttcgttcggcgtgttgagcagcgaaagatcctactggacatgtcagtgtcctttcacacccatgtgaaagagctgtggacgtggctggaggagctgcagaaggagctgctggacgacgtgtatgccgagtcggtggaggccgtgcaggacctcatcaagcgctttggccagcagcagcagaccaccctgcaggtgactgtcaacgtgatcaaggaaggggaggacctcatccagcagctcagggactctgccatctccagtaacaagaccccccacaacagctccatcaaccacattgagacggtgctgcagcagctggacgaggcgcagtcgcagatggaggagctcttccaggagcgcaagatcaagctggagctcttcctgcagctgcgcatcttcgagagggacgccatcgacattatctcagacctcgagtcttggaatgatgagctttctcagcaaatgaatgacttcgacacagaagatctcacgattgcagagcagcgcctccagcaccatgcagacaaagccttgaccatgaacaacttgacttttgacgtcatccaccaagggcaagatcttctgcagtatgtcaatgaggtccaggcctctggtgtggagctgctgtgtgatagagatgtagacatggcaactcgggtccaggacctgctggagtttcttcatgaaaaacagcaggaattggatttagccgcagagcagcatcggaaacacctggagcagtgcgtgcagctgcgccacctgcaggcagaagtgaaacaggtgctgggttggatccgcaacggagagtccatgttaaatgccggacttatcacagccagctcgttacaagaggcagagcagctccagcgagagcacgagcagttccagcatgccattgagaaaacacatcagagcgcgctgcaggtgcagcagaaggcagaagccatgctacaggccaaccactacgacatggacatgatccgggactgcgccgagaaggtggcgtctcactggcaacagctcatgctcaagatggaagatcgcctcaagctcgtcaacgcctctgtcgctttctacaaaacctcagagcaggtctgcagcgtcctcgagagcctggaacaggagtacaagagagaagaagactggtgtggcggggcggataagctgggcccaaactctgagacggaccacgtgacgcccatgatcagcaagcacctggagcagaaggaggcattcctgaaggcttgcacccttgctcggaggaatgcagacgtcttcctgaaatacctgcacaggaacagcgtgaacatgccaggaatggtgacgcacatcaaagctcctgaacagcaagtgaaaaatatcttgaatgaactcttccaacgggagaacagggtattgcattactggaccatgaggaagagacggctggaccagtgtcagcagtacgtggtctttgagaggagtgccaagcaggctttggaatggatccatgacaatggcgagttctacctttccacacacacctccacgggctccagtatacagcacacccaggagctcctgaaagagcacgaggagttccagataactgcaaagcaaaccaaagagagagtgaagctattgatacagctggctgatggcttttgtgaaaaagggcatgcccatgcggcagagataaaaaaatgtgttactgctgtggataagaggtacagagatttctctctgcggatggagaagtacaggacctctttggaaaaagccctggggatttcttcagattccaacaaatcgagtaaaagtctccagctagatatcattccagccagtatccctggctcagaggtgaaacttcgagatgctgctcatgaacttaatgaagagaagcggaaatctgcccgcaggaaagagttcataatggctgagctcattcaaactgaaaaggcttatgtaagagacctccgggaatgtatggatacgtacctgtgggaaatgaccagtggcgtggaagagattccacctggcattgtaaacaaagaactcatcatcttcggaaacatgcaagaaatctacgaatttcataataacatattcctaaaggagctggaaaaatatgaacagttgccagaggatgttggacattgttttgttacttgggcagacaagtttcagatgtatgtcacatattgcaaaaataagcctgattctactcagctgatattggaacatgcagggtcctattttgacgagatacagcagcgacatggattagccaattccatttcttcctaccttattaaaccagttcagcgaataacgaagtatcagctccttttaaaagagctgctgacgtgctgtgaggaaggaaagggagagattaaagatggcctggaggtgatgctcagcgtgccgaagcgagccaatgatgccatgcacctcagcatgctggaagggtttgatgaaaacattgagtctcagggagaactcatcctacaggaatccttccaagtgtgggacccaaaaaccttaattcgaaagggtcgagaacggcatctcttcctttttgaaatgtccttagtatttagtaaagaagtgaaagattccagtgggagaagcaagtacctttataaaagcaaattgtttacctcagagttgggtgtcacagaacatgttgaaggagacccttgcaaatttgcactgtgggtggggagaacaccaacttcagataataaaattgtccttaaggcttccagcatagagaacaagcaggactggataaagcatatccgcgaagtcatccaggagcggacgatccacctgaagggagccctgaaggagcccattcacatccctaagaccgctcccgccacaagacagaagggaaggagggatggagaggatctggacagccaaggagacggcagcagccagcctgatacgatttccatcgcctcacggacgtctcagaacacgctggacagcgataagctctctggtggctgtgagctgacagtggtgatccatgacttcaccgcttgcaacagcaacgagctgaccatccgacggggccagaccgtggaagttctggagcggccgcatgacaagcctgactggtgtctggtgcggacaactgaccgctccccagcggcagaaggcctggtcccctgtggttcactgtgcatcgcccactccagaagtagcatggaaatggagggcatcttcaaccacaaagactcgctctccgtctccagcaatgacgccagtccacccgcatccgtggcttccctccagccccacatgatcggggcccagagctcgccgggccccaagcggccgggcaacaccctgcgcaagtggctcaccagccccgtgcggcggctcagcagcggcaaggccgacgggcacgtgaagaagctggcgcacaagcacaagaagagccgcgaggtccgcaagagcgccgacgccggctcgcagaaggactccgacgacagtgcggccaccccgcaggacgagacggtcgaggagagaggccggaacgagggcctgagcagcggtactctctccaaatcctcctcctcggggatgcagagctgtggagaagaggaaggcgaggagggggccgacgccgtgcccctgccgccacccatggccatccagcagcacagcctcctccagccagactcacaggatgacaaggcctcttctcggttattagtccgccccaccagctccgaaacaccgagtgcagccgagctcgtcagtgcaattgaggaactcgtgaaaagcaagatggcactggaggatcgccccagctcactccttgttgaccagggagatagtagcagcccttccttcaacccttcggataattcccttctctcttcctcctcgcccattgatgagatggaagaaaggaaatccagctctttaaagagaagacactacgttttgcaagaactagtggagacagagcgtgactatgtgcgggaccttggctatgtggttgagggctacatggcacttatgaaagaagatggtgttcctgatgacatgaaaggaaaagacaaaattgtgttcggcaacatccatcagatttacgactggcacagagacttttttttaggagagttagagaagtgccttgaagatccagaaaaactaggatccctttttgttaaacacgagagaaggttgcacatgtacatagcttattgtcaaaataaaccaaagtctgagcacattgtctcagaatacattgataccttttttgaggacttaaagcagcgtcttggccacaggttacagctcacagatctgttgatcaaaccagtgcagagaatcatgaagtatcagctgttactgaaggacttcctcaagtattccaaaaaggccagcctggatacatcagaattagagagagctgtggaagtcatgtgcatagtacccaggcggtgcaacgacatgatgaacgtggggcggctgcaaggattcgacgggaaaatcgttgcccagggtaaactgctcttgcaggacacattcttggtcacagaccaagatgcaggacttctgcctcgctgcagagagaggcgcatcttcctctttgagcagatcgtcatattcagcgaaccacttgataaaaagaagggcttctccatgccgggattcctgtttaagaacagtatcaaggtgagttgcctttgcctggaggaaaatgtggaaaatgatccctgtaaatttgctctgacatcgaggacgggtgacgtggtagagaccttcattttgcattcatctagtccaagtgtccggcaaacttggatccatgaaatcaaccaaattttagaaaaccagcgcaattttttaaatgccttgacatcgccaatcgagtaccagaggaaccacagcgggggcggcggcggcggcggcagcgggggcagcggcgggggtgggggcagcggcggcggcggggcccccagtggcggcagcggccacagtggcggccccagcagctgcggcggcgcccccagcacgagcaggagccggccctcccggatcccccagcctgtccgacaccacccccccgtgctggtctcctctgcagcctcgagccaggcagaggcagacaagatgtcaggtacgtccacccccgggccctccctgcctccccctggcgcggcccccgaggccggccccagcgcgcccagcaggcggccccccggcgcggacgccgaggggtccgagcgagaagcggagccgatccccaagatgaaggtgctggagagccccaggaaaggcgccgcgaacgcctcggggtcgagcccagacgcccccgccaaggacgcgcgcgctagcctgggcaccctgccgcttgggaagccccgggccggggccgcttcgccgctgaactcgccgctctccagcgcggtcccttctctcggcaaggagcccttcccccccagcagccccctgcagaaggggggctccttctggagctccatccccgcctcccccgccagccgacccggctccttcaccttcccgggggacagcgactccctccagcggcagacaccccgccacgcggcccctggcaaggatactgaccgcatgagcacgtgctcctcggccagcgagcagtccgtgcagtccacccagagcaacgggagtgaaagcagcagcagtagcaacatctccaccatgttggtgacacacgattacacggcagtgaaggaggatgagatcaacgtctaccaaggagaggtcgttcaaattctggccagcaaccagcagaacatgtttctggtgttccgagccgccactgaccagtgccccgcagctgagggctggattccaggctttgtcctgggccacaccagtgcagtcatcgtggagaacccggacgggactctcaagaagtcaacatcttggcacacagcactccgtttaaggaaaaaatctgagaaaaaagataaagacggcaaaagggaaggcaagttagagaacggttatcggaagtcacgggaaggactcagcaacaaggtatctgtgaagcttctcaatcccaactacatttatgacgttcccccagaattcgtcattccattgagtgaggtcacgtgtgagacaggggagaccgttgttcttagatgtcgagtctgtggccgccccaaagcctcaattacctggaagggccctgaacacaacaccttgaacaacgatggtcactacagcatctcctacagtgacctgggagaggccacgctgaagattgtgggcgtgaccacggaagatgacggcatctacacgtgcatcgctgtcaatgacatgggttcagcctcatcgtcggccagcctgagggtcctaggtccagggatggatgggatcatggtgacctggaaagacaactttgactccttctacagtgaagtggctgagcttggcaggggcagattctctgtcgttaagaaatgtgatcagaaaggaaccaagcgagcagtggccactaagtttgtgaacaagaagttgatgaagcgcgaccaggtcacccatgagcttggcatcctgcagagcctccagcaccccctgcttgtcggcctcctcgacacctttgagacccccaccagctacatcctggtcttagaaatggctgaccagggtcgcctcctggactgcgtggtgcgatggggaagcctcactgaagggaagatcagggcgcacctgggggaggttctggaagctgtccggtacctgcacaactgcaggatagcacacctggacctaaagcctgagaatatcctggtggatgagagtttagccaagccaaccatcaaactggctgactttggagatgctgttcagctcaacacgacctactacatccaccagttactggggaaccctgaattcgcagcccctgaaatcatcctcgggaaccctgtctccctgacctcggatacgtggagtgttggagtgctcacatacgtacttcttagtggcgtgtcccccttcctggatgacagtgtggaagagacctgcctgaacatttgccgcttagactttagcttcccagatgactactttaaaggagtgagccagaaggccaaggagttcgtgtgcttcctcctgcaggaggaccccgccaagcgtccctcggctgcgctggccctccaggagcagtggctgcaggccggcaacggcagaagcacgggcgtcctcgacacgtccagactgacttccttcattgagcggcgcaaacaccagaatgatgttcgacctatccgtagcattaaaaactttctgcagagcaggcttctgcctagagtttgacctatccagaagttctttctcattctctttcacctgccaatcagctgttaatctgaattttcaagagaaaacaagcaaacataactgatcagctgccggtatgttcatcgtgtgaaattgcattccaagtgagctgtgctcagcagtgcttggacacagagctgcaagctgcgctggggtggaggaccgtcacttacactctgcccaaggcagaggtcgcattgctgtatcacagtattttattcaggtttctgcaaaaaaataaaaagataacttttttaaacaaacatgaatagaattttgcaaatttaacgttttcaagatttattcaaggaaacaaaatgcctatgttcaaccactggtgttaatgaacaaagatactgtgcgtctctggggaagacgcacctaggtggcggccactcccatggccttgtctaggactcagagaccactcggctctgagcttccaggcgcctcgtctgtgtgcatctcacgcccgacgtggcttctgaaacgtgcattcaacctcaaacttttgcataaaatagaatgaatcgttttgctctgatgaaatgtaggccttacttgtatataagactgttcctgccttcggtctgtcattttcccacctgcctcccctacccaccccccacccaccacctggggcttcctctgggggtccgagggtcttcccatcacatgaagacatcaggttgggtcctgccccactgcccctccccctgttcctgccccaagccgtcaatcagattgtggagcagtacacagtcagatgaaaatactgtaaatgcactcattgggggttttttggttttacttcatatcatgtgcaatgttgtggctttaacattttatgcaactatttatgaagacctctgttgtacctgtaataaatatatagaaaaagcacatacttcgtatggtgagctttatggttttgtgtgtgtgttggggttggcgggtgggtgggtagggtcgtagccctgtgccatcggttcaaagagacttttcgtgaaatttgttggttttgaggactgtaaaagtgatttcatactctgaatataaaactggataatagggtaatgttttaaaatttattatgctattattcagaatgccaaagtattattttttttcccaaaatcagtctggacatttactactttttagactttttgacgttgaactttctgtataaaaattggctgggttttgagcttttggtaagaaataaaagccgattaagcactggccgccccgcggctggtacccaatgcccgagtcactgtggcagcattcgcactggtgtggggagtcctttcaactcaaggaggctgggtttctgggcaccctcgaagttttctggatgtctttttatctttctcgtgtgaactgcactacaaaagagaccagcccgcttcccaagccagccagacacctgggtcttgagccataaactggcgtagttaagctttgcagcttccagtgtattttatttattcttttgttgggtttttgtttgtttcttcttgtaaaattgtacagaaactttttaaaagaaattggattcgaaactggatgtgtattcgtaacctcataatttttatttgtgtattgtttcttttattatttcagttaaatttttacattattttgcatgtatatttctttgtacagagaccttacatgtttacacagtatgatgtgatgtaaatattttattttgccatcagttattttaaaaaattaaacatatttgcctga

SEQ ID NO: 32777 - DNA, 7993 bp, Homo sapiens
  source 1..7993: mol_type = unassigned DNA
attaaggcccccatcgaggacctggatttggagggacagaagctgcttcagaggatacagagcagtgaaagctttcccaaaaagaactcaggctcaggcaatgcggacctgcagaacctcttgcccaaggtgtccaccatgctggaccggctgcactcgacacggcagcatctgcaccagatgtggcatgtgaggaagctgaagctggaccagtgcttccagctgaggctgtttgaacaggatgctgagaagatgtttgactggatcacacacaacaaaggcctgtttctaaacagctacacagagattgggaccagccaccctcatgccatggagcttcagacgcagcacaatcactttgccatgaactgtatgaacgtgtatgtaaatataaaccgcatcatgtcggtggccaatcgtctggtggagtctggccactatgcctcgcagcagatcaggcagatcgcgagtcagctggagcaggagtggaaggcgtttgcggcagccctggatgagcggagcaccttgctggacatgtcctccattttccaccagaaggccgaaaagtatatgagcaacgtggattcatggtgtaaagcttgcggtgaggtagaccttccctcagagctgcaggacctagaagatgccattcatcaccaccagggaatatatgaacatatcactcttgcttattctgaggtcagccaagatgggaagtcgctccttgacaagctccagcggcccttgactcccggcagctccgattccctgacagcctctgccaactactccaaggccgtgcaccatgtcctggatgtcatccacgaggtgctgcaccaccagcggcagctggagaacatctggcaacaccgcaaggtccggctgcatcagaggctgcagctgtgtgttttccagcaggacgttcagcaggtgctagactggatcgagaaccacggagaagcatttctgagcaaacatacaggtgtggggaaatctcttcatcgggccagagcattgcagaaacgtcatgaagattttgaagaagtggcacagaacacatacaccaatgcggataaattactggaagcagcagaacagctggctcagactggggaatgtgaccccgaagagatttatcaggctgcccatcagctggaagaccggattcaagatttcgttcggcgtgttgagcagcgaaagatcctactggacatgtcagtgtcctttcacacccatgtgaaagagctgtggacgtggctggaggagctgcagaaggagctgctggacgacgtgtatgccgagtcggtggaggccgtgcaggacctcatcaagcgctttggccagcagcagcagaccaccctgcaggtgactgtcaacgtgatcaaggaaggggaggacctcatccagcagctcagggactctgccatctccagtaacaagaccccccacaacagctccatcaaccacattgagacggtgctgcagcagctggacgaggcgcagtcgcagatggaggagctcttccaggagcgcaagatcaagctggagctcttcctgcagctgcgcatcttcgagagggacgccatcgacattatctcagacctcgagtcttggaatgatgagctttctcagcaaatgaatgacttcgacacagaagatctcacgattgcagagcagcgcctccagcaccatgcagacaaagccttgaccatgaacaacttgacttttgacgtcatccaccaagggcaagatcttctgcagtatgtcaatgaggtccaggcctctggtgtggagctgctgtgtgatagagatgtagacatggcaactcgggtccaggacctgctggagtttcttcatgaaaaacagcaggaattggatttagccgcagagcagcatcggaaacacctggagcagtgcgtgcagctgcgccacctgcaggcagaagtgaaacaggtgctgggttggatccgcaacggagagtccatgttaaatgccggacttatcacagccagctcgttacaagaggcagagcagctccagcgagagcacgagcagttccagcatgccattgagaaaacacatcagagcgcgctgcaggtgcagcagaaggcagaagccatgctacaggccaaccactacgacatggacatgatccgggactgcgccgagaaggtggcgtctcactggcaacagctcatgctcaagatggaagatcgcctcaagctcgtcaacgcctctgtcgctttctacaaaacctcagagcaggtctgcagcgtcctcgagagcctggaacaggagtacaagagagaagaagactggtgtggcggggcggataagctgggcccaaactctgagacggaccacgtgacgcccatgatcagcaagcacctggagcagaaggaggcattcctgaaggcttgcacccttgctcggaggaatgcagacgtcttcctgaaatacctgcacaggaacagcgtgaacatgccaggaatggtgacgcacatcaaagctcctgaacagcaagtgaaaaatatcttgaatgaactcttccaacgggagaacagggtattgcattactggaccatgaggaagagacggctggaccagtgtcagcagtacgtggtctttgagaggagtgccaagcaggctttggaatggatccatgacaatggcgagttctacctttccacacacacctccacgggctccagtatacagcacacccaggagctcctgaaagagcacgaggagttccagataactgcaaagcaaaccaaagagagagtgaagctattgatacagctggctgatggcttttgtgaaaaagggcatgcccatgcggcagagataaaaaaatgtgttactgctgtggataagaggtacagagatttctctctgcggatggagaagtacaggacctctttggaaaaagccctggggatttcttcagattccaacaaatcgagtaaaagtctccagctagatatcattccagccagtatccctggctcagaggtgaaacttcgagatgctgctcatgaacttaatgaagagaagcggaaatctgcccgcaggaaagagttcataatggctgagctcattcaaactgaaaaggcttatgtaagagacctccgggaatgtatggatacgtacctgtgggaaatgaccagtggcgtggaagagattccacctggcattgtaaacaaagaactcatcatcttcggaaacatgcaagaaatctacgaatttcataataacatattcctaaaggagctggaaaaatatgaacagttgccagaggatgttggacattgttttgttacttgggcagacaagtttcagatgtatgtcacatattgcaaaaataagcctgattctactcagctgatattggaacatgcagggtcctattttgacgagatacagcagcgacatggattagccaattccatttcttcctaccttattaaaccagttcagcgaataacgaagtatcagctccttttaaaagagctgctgacgtgctgtgaggaaggaaagggagagattaaagatggcctggaggtgatgctcagcgtgccgaagcgagccaatgatgccatgcacctcagcatgctggaagggtttgatgaaaacattgagtctcagggagaactcatcctacaggaatccttccaagtgtgggacccaaaaaccttaattcgaaagggtcgagaacggcatctcttcctttttgaaatgtccttagtatttagtaaagaagtgaaagattccagtgggagaagcaagtacctttataaaagcaaattgtttacctcagagttgggtgtcacagaacatgttgaaggagacccttgcaaatttgcactgtgggtggggagaacaccaacttcagataataaaattgtccttaaggcttccagcatagagaacaagcaggactggataaagcatatccgcgaagtcatccaggagcggacgatccacctgaagggagccctgaaggagcccattcacatccctaagaccgctcccgccacaagacagaagggaaggagggatggagaggatctggacagccaaggagacggcagcagccagcctgatacgatttccatcgcctcacggacgtctcagaacacgctggacagcgataagctctctggtggctgtgagctgacagtggtgatccatgacttcaccgcttgcaacagcaacgagctgaccatccgacggggccagaccgtggaagttctggagcggccgcatgacaagcctgactggtgtctggtgcggacaactgaccgctccccagcggcagaaggcctggtcccctgtggttcactgtgcatcgcccactccagaagtagcatggaaatggagggcatcttcaaccacaaagactcgctctccgtctccagcaatgacgccagtccacccgcatccgtggcttccctccagccccacatgatcggggcccagagctcgccgggccccaagcggccgggcaacaccctgcgcaagtggctcaccagccccgtgcggcggctcagcagcggcaaggccgacgggcacgtgaagaagctggcgcacaagcacaagaagagccgcgaggtccgcaagagcgccgacgccggctcgcagaaggactccgacgacagtgcggccaccccgcaggacgagacggtcgaggagagaggccggaacgagggcctgagcagcggtactctctccaaatcctcctcctcggggatgcagagctgtggagaagaggaaggcgaggagggggccgacgccgtgcccctgccgccacccatggccatccagcagcacagcctcctccagccagactcacaggatgacaaggcctcttctcggttattagtccgccccaccagctccgaaacaccgagtgcagccgagctcgtcagtgcaattgaggaactcgtgaaaagcaagatggcactggaggatcgccccagctcactccttgttgaccagggagatagtagcagcccttccttcaacccttcggataattcccttctctcttcctcctcgcccattgatgagatggaagaaaggaaatccagctctttaaagagaagacactacgttttgcaagaactagtggagacagagcgtgactatgtgcgggaccttggctatgtggttgagggctacatggcacttatgaaagaagatggtgttcctgatgacatgaaaggaaaagacaaaattgtgttcggcaacatccatcagatttacgactggcacagagacttttttttaggagagttagagaagtgccttgaagatccagaaaaactaggatccctttttgttaaacacgagagaaggttgcacatgtacatagcttattgtcaaaataaaccaaagtctgagcacattgtctcagaatacattgataccttttttgaggacttaaagcagcgtcttggccacaggttacagctcacagatctgttgatcaaaccagtgcagagaatcatgaagtatcagctgttactgaaggacttcctcaagtattccaaaaaggccagcctggatacatcagaattagagagagctgtggaagtcatgtgcatagtacccaggcggtgcaacgacatgatgaacgtggggcggctgcaaggattcgacgggaaaatcgttgcccagggtaaactgctcttgcaggacacattcttggtcacagaccaagatgcaggacttctgcctcgctgcagagagaggcgcatcttcctctttgagcagatcgtcatattcagcgaaccacttgataaaaagaagggcttctccatgccgggattcctgtttaagaacagtatcaaggtgagttgcctttgcctggaggaaaatgtggaaaatgatccctgtaaatttgctctgacatcgaggacgggtgacgtggtagagaccttcattttgcattcatctagtccaagtgtccggcaaacttggatccatgaaatcaaccaaattttagaaaaccagcgcaattttttaaatgccttgacatcgccaatcgagtaccagaggaaccacagcgggggcggcggcggcggcggcagcgggggcagcggcgggggtgggggcagcggcggcggcggggcccccagtggcggcagcggccacagtggcggccccagcagctgcggcggcgcccccagcacgagcaggagccggccctcccggatcccccagcctgtccgacaccacccccccgtgctggtctcctctgcagcctcgagccaggcagaggcagacaagatgtcaggtacgtccacccccgggccctccctgcctccccctggcgcggcccccgaggccggccccagcgcgcccagcaggcggccccccggcgcggacgccgaggggtccgagcgagaagcggagccgatccccaagatgaaggtgctggagagccccaggaaaggcgccgcgaacgcctcggggtcgagcccagacgcccccgccaaggacgcgcgcgctagcctgggcaccctgccgcttgggaagccccgggccggggccgcttcgccgctgaactcgccgctctccagcgcggtcccttctctcggcaaggagcccttcccccccagcagccccctgcagaaggggggctccttctggagctccatccccgcctcccccgccagccgacccggctccttcaccttcccgggggacagcgactccctccagcggcagacaccccgccacgcggcccctggcaaggatactgaccgcatgagcacgtgctcctcggccagcgagcagtccgtgcagtccacccagagcaacgggagtgaaagcagcagcagtagcaacatctccaccatgttggtgacacacgattacacggcagtgaaggaggatgagatcaacgtctaccaaggagaggtcgttcaaattctggccagcaaccagcagaacatgtttctggtgttccgagccgccactgaccagtgccccgcagctgagggctggattccaggctttgtcctgggccacaccagtgcagtcatcgtggagaacccggacgggactctcaagaagtcaacatcttggcacacagcactccgtttaaggaaaaaatctgagaaaaaagataaagacggcaaaagggaaggcaagttagagaacggttatcggaagtcacgggaaggactcagcaacaaggtatctgtgaagcttctcaatcccaactacatttatgacgttcccccagaattcgtcattccattgagtgaggtcacgtgtgagacaggggagaccgttgttcttagatgtcgagtctgtggccgccccaaagcctcaattacctggaagggccctgaacacaacaccttgaacaacgatggtcactacagcatctcctacagtgacctgggagaggccacgctgaagattgtgggcgtgaccacggaagatgacggcatctacacgtgcatcgctgtcaatgacatgggttcagcctcatcgtcggccagcctgagggtcctaggtccagggatggatgggatcatggtgacctggaaagacaactttgactccttctacagtgaagtggctgagcttggcagggcaaactggaacaactggtcaccctactaacctgtaaactgggaataactggcatttgtgcagaatggctcccaggttcctgatgcccagcggcactctacagacattgccaggtctgtctgcaaatccacggtgcttggccggatgctgtttgaagtgtgcactttagagaagaaaaggggcggggtgtcatttcccacacacaagccgctagtccttatggaaactcttccaacgaaggtggatggaaacttttccaacgaaggtgatgtttttgaaacccagcttttatttggacaaagccttcttgaaaaatccttgaaaatgctttctgtttttaataaaggagatctctggaacatttccatgagctttcatagca

SEQ ID NO: 32778 - DNA, 9689 bp, Homo sapiens
  source 1..9689: mol_type = unassigned DNA
gcagccatgagcggcagcagcggcggagccgccgcccccgccgcgtcctccggccccgccgcggcggccagcgcggctggctcgggctgcgggggcggtgccggcgagggggcagaggaggcggccaaggacctggccgacatcgcggccttcttccgatccgggtttcgaaaaaacgatgaaatgaaagctatggatgttttaccaattttgaaggaaaaagttgcatacctttcaggtgggagagataaacgtggaggtcccattttaacgtttccggcccgcagcaatcatgacagaatacgacaggaggatctcaggagactcatttcctatctagcctgtattcccagcgaggaggtctgcaagcgtggcttcacggtgatcgtggacatgcgtgggtccaagtgggactccatcaagccccttctgaagatcctgcaggagtccttcccctgctgcatccatgtggccctgatcatcaagccagacaacttctggcagaaacagaggactaattttggcagttctaaatttgaatttgagacaaatatggtctctttagaaggccttaccaaagtagttgatccttctcagctaactcctgagtttgatggctgcctggaatacaaccacgaagaatggattgaaatcagagttgcttttgaagactacattagcaatgccacccacatgctgtctcggctggaggaacttcaggacatcctagctaagaaggagctgcctcaggatttagagggggctcggaatatgatcgaggaacattctcagctgaagaagaaggtgattaaggcccccatcgaggacctggatttggagggacagaagctgcttcagaggatacagagcagtgaaagctttcccaaaaagaactcaggctcaggcaatgcggacctgcagaacctcttgcccaaggtgtccaccatgctggaccggctgcactcgacacggcagcatctgcaccagatgtggcatgtgaggaagctgaagctggaccagtgcttccagctgaggctgtttgaacaggatgctgagaagatgtttgactggatcacacacaacaaaggcctgtttctaaacagctacacagagattgggaccagccaccctcatgccatggagcttcagacgcagcacaatcactttgccatgaactgtatgaacgtgtatgtaaatataaaccgcatcatgtcggtggccaatcgtctggtggagtctggccactatgcctcgcagcagatcaggcagatcgcgagtcagctggagcaggagtggaaggcgtttgcggcagccctggatgagcggagcaccttgctggacatgtcctccattttccaccagaaggccgaaaagtatatgagcaacgtggattcatggtgtaaagcttgcggtgaggtagaccttccctcagagctgcaggacctagaagatgccattcatcaccaccagggaatatatgaacatatcactcttgcttattctgaggtcagccaagatgggaagtcgctccttgacaagctccagcggcccttgactcccggcagctccgattccctgacagcctctgccaactactccaaggccgtgcaccatgtcctggatgtcatccacgaggtgctgcaccaccagcggcagctggagaacatctggcaacaccgcaaggtccggctgcatcagaggctgcagctgtgtgttttccagcaggacgttcagcaggtgctagactggatcgagaaccacggagaagcatttctgagcaaacatacaggtgtggggaaatctcttcatcgggccagagcattgcagaaacgtcatgaagattttgaagaagtggcacagaacacatacaccaatgcggataaattactggaagcagcagaacagctggctcagactggggaatgtgaccccgaagagatttatcaggctgcccatcagctggaagaccggattcaagatttcgttcggcgtgttgagcagcgaaagatcctactggacatgtcagtgtcctttcacacccatgtgaaagagctgtggacgtggctggaggagctgcagaaggagctgctggacgacgtgtatgccgagtcggtggaggccgtgcaggacctcatcaagcgctttggccagcagcagcagaccaccctgcaggtgactgtcaacgtgatcaaggaaggggaggacctcatccagcagctcagggactctgccatctccagtaacaagaccccccacaacagctccatcaaccacattgagacggtgctgcagcagctggacgaggcgcagtcgcagatggaggagctcttccaggagcgcaagatcaagctggagctcttcctgcagctgcgcatcttcgagagggacgccatcgacattatctcagacctcgagtcttggaatgatgagctttctcagcaaatgaatgacttcgacacagaagatctcacgattgcagagcagcgcctccagcaccatgcagacaaagccttgaccatgaacaacttgacttttgacgtcatccaccaagggcaagatcttctgcagtatgtcaatgaggtccaggcctctggtgtggagctgctgtgtgatagagatgtagacatggcaactcgggtccaggacctgctggagtttcttcatgaaaaacagcaggaattggatttagccgcagagcagcatcggaaacacctggagcagtgcgtgcagctgcgccacctgcaggcagaagtgaaacaggtgctgggttggatccgcaacggagagtccatgttaaatgccggacttatcacagccagctcgttacaagaggcagagcagctccagcgagagcacgagcagttccagcatgccattgagaaaacacatcagagcgcgctgcaggtgcagcagaaggcagaagccatgctacaggccaaccactacgacatggacatgatccgggactgcgccgagaaggtggcgtctcactggcaacagctcatgctcaagatggaagatcgcctcaagctcgtcaacgcctctgtcgctttctacaaaacctcagagcaggtctgcagcgtcctcgagagcctggaacaggagtacaagagagaagaagactggtgtggcggggcggataagctgggcccaaactctgagacggaccacgtgacgcccatgatcagcaagcacctggagcagaaggaggcattcctgaaggcttgcacccttgctcggaggaatgcagacgtcttcctgaaatacctgcacaggaacagcgtgaacatgccaggaatggtgacgcacatcaaagctcctgaacagcaagtgaaaaatatcttgaatgaactcttccaacgggagaacagggtattgcattactggaccatgaggaagagacggctggaccagtgtcagcagtacgtggtctttgagaggagtgccaagcaggctttggaatggatccatgacaatggcgagttctacctttccacacacacctccacgggctccagtatacagcacacccaggagctcctgaaagagcacgaggagttccagataactgcaaagcaaaccaaagagagagtgaagctattgatacagctggctgatggcttttgtgaaaaagggcatgcccatgcggcagagataaaaaaatgtgttactgctgtggataagaggtacagagatttctctctgcggatggagaagtacaggacctctttggaaaaagccctggggatttcttcagattccaacaaatcgagtaaaagtctccagctagatatcattccagccagtatccctggctcagaggtgaaacttcgagatgctgctcatgaacttaatgaagagaagcggaaatctgcccgcaggaaagagttcataatggctgagctcattcaaactgaaaaggcttatgtaagagacctccgggaatgtatggatacgtacctgtgggaaatgaccagtggcgtggaagagattccacctggcattgtaaacaaagaactcatcatcttcggaaacatgcaagaaatctacgaatttcataataacatattcctaaaggagctggaaaaatatgaacagttgccagaggatgttggacattgttttgttacttgggcagacaagtttcagatgtatgtcacatattgcaaaaataagcctgattctactcagctgatattggaacatgcagggtcctattttgacgagatacagcagcgacatggattagccaattccatttcttcctaccttattaaaccagttcagcgaataacgaagtatcagctccttttaaaagagctgctgacgtgctgtgaggaaggaaagggagagattaaagatggcctggaggtgatgctcagcgtgccgaagcgagccaatgatgccatgcacctcagcatgctggaagggtttgatgaaaacattgagtctcagggagaactcatcctacaggaatccttccaagtgtgggacccaaaaaccttaattcgaaagggtcgagaacggcatctcttcctttttgaaatgtccttagtatttagtaaagaagtgaaagattccagtgggagaagcaagtacctttataaaagcaaattgtttacctcagagttgggtgtcacagaacatgttgaaggagacccttgcaaatttgcactgtgggtggggagaacaccaacttcagataataaaattgtccttaaggcttccagcatagagaacaagcaggactggataaagcatatccgcgaagtcatccaggagcggacgatccacctgaagggagccctgaaggagcccattcacatccctaagaccgctcccgccacaagacagaagggaaggagggatggagaggatctggacagccaaggagacggcagcagccagcctgatacgatttccatcgcctcacggacgtctcagaacacgctggacagcgataagctctctggtggctgtgagctgacagtggtgatccatgacttcaccgcttgcaacagcaacgagctgaccatccgacggggccagaccgtggaagttctggagcggccgcatgacaagcctgactggtgtctggtgcggacaactgaccgctccccagcggcagaaggcctggtcccctgtggttcactgtgcatcgcccactccagaagtagcatggaaatggagggcatcttcaaccacaaagactcgctctccgtctccagcaatgacgccagtccacccgcatccgtggcttccctccagccccacatgatcggggcccagagctcgccgggccccaagcggccgggcaacaccctgcgcaagtggctcaccagccccgtgcggcggctcagcagcggcaaggccgacgggcacgtgaagaagctggcgcacaagcacaagaagagccgcgaggtccgcaagagcgccgacgccggctcgcagaaggactccgacgacagtgcggccaccccgcaggacgagacggtcgaggagagaggccggaacgagggcctgagcagcggtactctctccaaatcctcctcctcggggatgcagagctgtggagaagaggaaggcgaggagggggccgacgccgtgcccctgccgccacccatggccatccagcagcacagcctcctccagccagactcacaggatgacaaggcctcttctcggttattagtccgccccaccagctccgaaacaccgagtgcagccgagctcgtcagtgcaattgaggaactcgtgaaaagcaagatggcactggaggatcgccccagctcactccttgttgaccagggagatagtagcagcccttccttcaacccttcggataattcccttctctcttcctcctcgcccattgatgagatggaagaaaggaaatccagctctttaaagagaagacactacgttttgcaagaactagtggagacagagcgtgactatgtgcgggaccttggctatgtggttgagggctacatggcacttatgaaagaagatggtgttcctgatgacatgaaaggaaaagacaaaattgtgttcggcaacatccatcagatttacgactggcacagagacttttttttaggagagttagagaagtgccttgaagatccagaaaaactaggatccctttttgttaaacacgagagaaggttgcacatgtacatagcttattgtcaaaataaaccaaagtctgagcacattgtctcagaatacattgataccttttttgaggacttaaagcagcgtcttggccacaggttacagctcacagatctgttgatcaaaccagtgcagagaatcatgaagtatcagctgttactgaaggacttcctcaagtattccaaaaaggccagcctggatacatcagaattagagagagctgtggaagtcatgtgcatagtacccaggcggtgcaacgacatgatgaacgtggggcggctgcaaggattcgacgggaaaatcgttgcccagggtaaactgctcttgcaggacacattcttggtcacagaccaagatgcaggacttctgcctcgctgcagagagaggcgcatcttcctctttgagcagatcgtcatattcagcgaaccacttgataaaaagaagggcttctccatgccgggattcctgtttaagaacagtatcaaggtgagttgcctttgcctggaggaaaatgtggaaaatgatccctgtaaatttgctctgacatcgaggacgggtgacgtggtagagaccttcattttgcattcatctagtccaagtgtccggcaaacttggatccatgaaatcaaccaaattttagaaaaccagcgcaattttttaaatgccttgacatcgccaatcgagtaccagaggaaccacagcgggggcggcggcggcggcggcagcgggggcagcggcgggggtgggggcagcggcggcggcggggcccccagtggcggcagcggccacagtggcggccccagcagctgcggcggcgcccccagcacgagcaggagccggccctcccggatcccccagcctgtccgacaccacccccccgtgctggtctcctctgcagcctcgagccaggcagaggcagacaagatgtcagaaagtgaaagcagcagcagtagcaacatctccaccatgttggtgacacacgattacacggcagtgaaggaggatgagatcaacgtctaccaaggagaggtcgttcaaattctggccagcaaccagcagaacatgtttctggtgttccgagccgccactgaccagtgccccgcagctgagggctggattccaggctttgtcctgggccacaccagtgcagtcatcgtggagaacccggacgggactctcaagaagtcaacatcttggcacacagcactccgtttaaggaaaaaatctgagaaaaaagataaagacggcaaaagggaaggcaagttagagaacggttatcggaagtcacgggaaggactcagcaacaaggtatctgtgaagcttctcaatcccaactacatttatgacgttcccccagaattcgtcattccattgagtgaggtcacgtgtgagacaggggagaccgttgttcttagatgtcgagtctgtggccgccccaaagcctcaattacctggaagggccctgaacacaacaccttgaacaacgatggtcactacagcatctcctacagtgacctgggagaggccacgctgaagattgtgggcgtgaccacggaagatgacggcatctacacgtgcatcgctgtcaatgacatgggttcagcctcatcgtcggccagcctgagggtcctaggtccagggatggatgggatcatggtgacctggaaagacaactttgactccttctacagtgaagtggctgagcttggcaggggcagattctctgtcgttaagaaatgtgatcagaaaggaaccaagcgagcagtggccactaagtttgtgaacaagaagttgatgaagcgcgaccaggtcacccatgagcttggcatcctgcagagcctccagcaccccctgcttgtcggcctcctcgacacctttgagacccccaccagctacatcctggtcttagaaatggctgaccagggtcgcctcctggactgcgtggtgcgatggggaagcctcactgaagggaagatcagggcgcacctgggggaggttctggaagctgtccggtacctgcacaactgcaggatagcacacctggacctaaagcctgagaatatcctggtggatgagagtttagccaagccaaccatcaaactggctgactttggagatgctgttcagctcaacacgacctactacatccaccagttactggggaaccctgaattcgcagcccctgaaatcatcctcgggaaccctgtctccctgacctcggatacgtggagtgttggagtgctcacatacgtacttcttagtggcgtgtcccccttcctggatgacagtgtggaagagacctgcctgaacatttgccgcttagactttagcttcccagatgactactttaaaggagtgagccagaaggccaaggagttcgtgtgcttcctcctgcaggaggaccccgccaagcgtccctcggctgcgctggccctccaggagcagtggctgcaggccggcaacggcagaagcacgggcgtcctcgacacgtccagactgacttccttcattgagcggcgcaaacaccagaatgatgttcgacctatccgtagcattaaaaactttctgcagagcaggcttctgcctagagtttgacctatccagaagttctttctcattctctttcacctgccaatcagctgttaatctgaattttcaagagaaaacaagcaaacataactgatcagctgccggtatgttcatcgtgtgaaattgcattccaagtgagctgtgctcagcagtgcttggacacagagctgcaagctgcgctggggtggaggaccgtcacttacactctgcccaaggcagaggtcgcattgctgtatcacagtattttattcaggtttctgcaaaaaaataaaaagataacttttttaaacaaacatgaatagaattttgcaaatttaacgttttcaagatttattcaaggaaacaaaatgcctatgttcaaccactggtgttaatgaacaaagatactgtgcgtctctggggaagacgcacctaggtggcggccactcccatggccttgtctaggactcagagaccactcggctctgagcttccaggcgcctcgtctgtgtgcatctcacgcccgacgtggcttctgaaacgtgcattcaacctcaaacttttgcataaaatagaatgaatcgttttgctctgatgaaatgtaggccttacttgtatataagactgttcctgccttcggtctgtcattttcccacctgcctcccctacccaccccccacccaccacctggggcttcctctgggggtccgagggtcttcccatcacatgaagacatcaggttgggtcctgccccactgcccctccccctgttcctgccccaagccgtcaatcagattgtggagcagtacacagtcagatgaaaatactgtaaatgcactcattgggggttttttggttttacttcatatcatgtgcaatgttgtggctttaacattttatgcaactatttatgaagacctctgttgtacctgtaataaatatat

SEQ ID NO: 32779 - DNA, 1547 bp, Homo sapiens
  source 1..1547: mol_type = unassigned DNA
gagtgcagccgagctcgtcagtgcaattgaggaactcgtgaaaagcaagatggcactggaggatcgccccagctcactccttgttgaccagggagatagtagcagcccttccttcaacccttcggataattcccttctctcttcctcctcgcccattgatgagatggaagaaaggaaatccagctctttaaagagaagacactacgttttgcaagaactagtggagacagagcgtgactatgtgcgggaccttggctatgtggttgagggctacatggcacttatgaaagaagatggtgttcctgatgacatgaaaggaaaagacaaaattgtgttcggcaacatccatcagatttacgactggcacagagacttttttttaggagagttagagaagtgccttgaagatccagaaaaactaggatccctttttgttaaacacgagagaaggttgcacatgtacatagcttattgtcaaaataaaccaaagtctgagcacattgtctcagaatacattgataccttttttgaggacttaaagcagcgtcttggccacaggttacagctcacagatctgttgatcaaaccagtgcagagaatcatgaagtatcagctgttactgaaggacttcctcaagtattccaaaaaggccagcctggatacatcagaattagagagagctgtggaagtcatgtgcatagtacccaggcggtgcaacgacatgatgaacgtggggcggctgcaaggattcgacggtagggtcgtagccctgtgccatcggttcaaagagacttttcgtgaaatttgttggttttgaggactgtaaaagtgatttcatactctgaatataaaactggataatagggtaatgttttaaaatttattatgctattattcagaatgccaaagtattattttttttcccaaaatcagtctggacatttactactttttagactttttgacgttgaactttctgtataaaaattggctgggttttgagcttttggtaagaaataaaagccgattaagcactggccgccccgcggctggtacccaatgcccgagtcactgtggcagcattcgcactggtgtggggagtcctttcaactcaaggaggctgggtttctgggcaccctcgaagttttctggatgtctttttatctttctcgtgtgaactgcactacaaaagagaccagcccgcttcccaagccagccagacacctgggtcttgagccataaactggcgtagttaagctttgcagcttccagtgtattttatttattcttttgttgggtttttgtttgtttcttcttgtaaaattgtacagaaactttttaaaagaaattggattcgaaactggatgtgtattcgtaacctcataatttttatttgtgtattgtttcttttattatttcagttaaatttttacattattttgcatgtatatttctttgtacagagaccttacatgtttacacagtatgatgtgatgtaaatattttattttgccatcagttattttaaaaaattaaacatatttgcc

SEQ ID NO: 32780 - DNA, 1978 bp, Homo sapiens
  source 1..1978: mol_type = unassigned DNA
gtcctgggtatgtccacgcgcaataaggaggggcgaaaggacatttttttttttcttgctcccgcctctgttcttcccccacctgccacgtacagagcccaagttctcgctaggcttgttgggtcagcgcgattggccggggcccgcgcgagcctgcgagcgaggtgcggcggtcgcgaagggcaaccgagggggccgtgaccaccgcctccccgcgacgccccagtccagtggcctcgcgtccgcccattcagcggagacctgcggagaggcggcggccgcggcctccgcaagccgtctttctctagagttgtatatatagaacatcctggagtccaccatgaacggacagttggatctaagtgggaagctaatcatcaaagctcaacttggggaggatattcggcgaattcctattcataatgaagatattacttatgatgaattagtgctaatgatgcaacgagttttcagaggaaaacttctgagtaatgatgaagtaacaataaagtataaagatgaagatggagatcttataacaatttttgatagttctgacctttcctttgcaattcagtgcagtaggatactgaaactgacattatttgttaatggccagccaagaccccttgaatcaagtcaggtgaaatatctccgtcgagaactgatagaacttcgaaataaagtgaatcgtttattggatagcttggaaccacctggagaaccaggaccttccaccaatattcctgaaaatgatactgtggatggtagggaagaaaagtctgcttctgattcttctggaaaacagtctactcaggttatggcagcaagtatgtctgcttttgatcctttaaaaaaccaagatgaaatcaataaaaatgttatgtcagcgtttggcttaacagatgatcaggtttcagggccacccagtgctcctgcagaagatcgttcaggaacacccgacagcattgcttcctcctcctcagcagctcacccaccaggcgttcagccacagcagccaccatatacaggagctcagactcaagcaggtcagattgaaggtcagatgtaccaacagtaccagcaacaggccggctatggtgcacagcagccgcaggctccacctcagcagcctcaacagtatggtattcagtattcagcaagctatagtcagcagactggacctcaacaacctcagcagttccagggatatggccagcaaccaacttcccaggcaccagctcctgccttttctggtcagcctcaacaactgcctgctcagccgccacagcagtaccaggcgagcaattatcctgcacaaacttacactgcccaaacttctcagcctactaattatactgtggctcctgcctctcaacctggaatggctccaagccaacctggggcctatcaaccaagaccaggttttacttcacttcctggaagtaccatgacccctcctccaagtgggcctaatccttatgcgcgtaaccgtcctccctttggtcagggctatacccaacctggacctggttatcgataaggaggctcctctacaccaattaatgtagctgctagctattggcctcccaaaagactccagtactattttaatttgtattgaagaagttcagaaatttaaaagcagagcattttttatgatatcattgttggtgttaattgaaagtataatttgctggaacacaaagaccaaaatgaaagttttttcctccctgcttaaaaatgtagcagcttcttagttactttggaacactactcttacatgtataaagtgattgacttgactttctagcttcccttgtccggaggatattaaaatgctagggtgaggtttagccatcttacttggctttttactattaacatgatgtactaaagtagagccctttgagaatacaagatattatgtataaaatgtaacactgatgataggttaataaagatgattgaatccatt

SEQ ID NO: 32781 - DNA, 1781 bp, Homo sapiens
  source 1..1781: mol_type = unassigned DNA
ggcaaccgagggggccgtgaccaccgcctccccgcgacgccccagtccagtggcctcgcgtccgcccattcagcggagacctgcggagaggcggcggccgcggcctccgcaagccgtctttctctagagttgtatatatagaacatcctggagtccaccatgaacggacagttggatctaagtgggaagctaatcatcaaagctcaacttggggaggatattcggcgaattcctattcataatgaagatattacttatgatgaattagtgctaatgatgcaacgagttttcagaggaaaacttctgagtaatgatgaagtaacaataaagtataaagatgaagatggagatcttataacaatttttgatagttctgacctttcctttgcaattcagtgcagtaggatactgaaactgacattatttgttaatggccagccaagaccccttgaatcaagtcaggtgaaatatctccgtcgagaactgatagaacttcgaaataaagtgaatcgtttattggatagcttggaaccacctggagaaccaggaccttccaccaatattcctgaaaatgatactgtggatggtagggaagaaaagtctgcttctgattcttctggaaaacagtctactcaggttatggcagcaagtatgtctgcttttgatcctttaaaaaaccaagatgaaatcaataaaaatgttatgtcagcgtttggcttaacagatgatcaggtttcagggccacccagtgctcctgcagaagatcgttcaggaacacccgacagcattgcttcctcctcctcagcagctcacccaccaggcgttcagccacagcagccaccatatacaggagctcagactcaagcaggtcagatgtaccaacagtacagcaacaggccggctatggtgcacagcagccgcaggctccacctcagcagcctcaacagtatggtattcagtattcagcaagctatagtcagcagactggacctcaacaacctcagcagttccagggatatggccagcaaccaacttcccaggcaccagctcctgccttttctggtcagcctcaacaactgcctgctcagccgccacagcagtaccaggcgagcaattatcctgcacaaacttacactgcccaaacttctcagcctactaattatactgtggctcctgcctctcaacctggaatggctccaagccaacctggggcctatcaaccaagaccaggttttacttcacttcctggaagtaccatgacccctcctccaagtgggcctaatccttatgcgcgtaaccgtcctccctttggtcagggctatacccaacctggacctggttatcgataaggaggctcctctacaccaattaatgtagctgctagctattggcctcccaaaagactccagtactattttaatttgtattgaagaagttcagaaatttaaaagcagagcattttttatgatatcattgttggtgttaattgaaagtataatttgctggaacacaaagaccaaaatgaaagttttttcctccctgcttaaaaatgtagcagcttcttagttactttggaacactactcttacatgtataaagtgattgacttgactttctagcttcccttgtccggaggatattaaaatgctagggtgaggtttagccatcttacttggctttttactattaacatgatgtactaaagtagagccctttgagaatacaagatattatgtataaaatgtaacactgatgataggttaataaagatgattgaatcc

SEQ ID NO: 32782 - DNA, 723 bp, Homo sapiens
  source 1..723: mol_type = unassigned DNA
gagggggccgtgaccaccgcctccccgcgacgccccagtccagtggcctcgcgtccgcccattcagcggagacctgcggagaggcggcggccgcggcctccgcaagccggtatggccactggagacgggggttgcgggcgctctgtccgaggaggccgggagactaggaggcgctgggagggcctcgttcgaaccgcgcggcagctgggtctttctctagagttgtatatatagaacatcctggagtccaccatgaacggacagttggatctaagtgggaagctaatcatcaaagctcaacttggggaggatattcggcgaattcctattcataatgaagatattacttatgatgaattagtgctaatgatgcaacgagttttcagaggaaaacttctgagtaatgatgaagtaacaataaagtataaagatgaagatggagatcttataacaatttttgatagttctgacctttcctttgcaattcagtgcagtaggatactgaaactgacattatttgttaatggccagccaagaccccttgaatcaagtcaggtgaaatatctccgtcgagaactgatagaacttcgaaataaagtgaatcgtttattggatagcttggaaccacctggagaaccaggaccttccaccaatattcctgaaaatgatactgtggatggtagggaagaaaagtctgcttctgattcttctggaaaacagtct

SEQ ID NO: 32783 - DNA, 776 bp, Homo sapiens
  source 1..776: mol_type = unassigned DNA
tttttttcttgctcccgcctctgttcttcccccacctgccacgtacagagcccaagttctcgctaggcttgttgggtcagcgcgattggccggggcccgcgcgagcctgcgagcgaggtgcggcggtcgcgaagggcaaccgagggggccgtgaccaccgcctccccgcgacgccccagtccagtggcctcgcgtccgcccattcagcggagacctgcggagaggcggcggccgcggcctccgcaagccgatgactgcaagagcaaacgacagctttaggaaagaagcactggttcctggccacaagatgtttacagtcaataggaaacacaaaaagtgaatttgcagtctttctctagagttgtatatatagaacatcctggagtccaccatgaacggacagttggatctaagtgggaagctaatcatcaaagctcaacttggggaggatattcggcgaattcctattcataatgaagatattacttatgatgaattagtgctaatgatgcaacgagttttcagaggaaaacttctgagtaatgatgaagtaacaataaagtataaagatgaagatggagatcttataacaatttttgatagttctgacctttcctttgcaattcagtgcagtaggatactgaaactgacattatttgttaatggccagccaagaccccttgaatcaagtcaggtgaaatatctccgtcgagaactgatagaacttcgaaataaagtgaatcgtttattggatagcttggaaccacctggagaac

SEQ ID NO: 32784 - DNA, 913 bp, Homo sapiens
  source 1..913: mol_type = unassigned DNA
aacccctggctgcggtggccaggaggcgcgcctggggggctccgggaggggagtgcgccagctaatgccttggtgcagcctgcctccaagcgtttggattgagaggagaggggctttgggaggtttggggcggccggcgcccaatacccgaaggagctcggaagggtgtggagtggcgcctacgggaataagttgattggggtcatagaatcggagcctagttccttggctaagtcagcgcttaatcaagcgccggctggaggcccagcctggtttatagtgatgattctagctaactttaagagtttgctttgctggacactacatctttctctagagttgtatatatagaacatcctggagtccaccatgaacggacagttggatctaagtgggaagctaatcatcaaagctcaacttggggaggatattcggcgaattcctattcataatgaagatattacttatgatgaattagtgctaatgatgcaacgagttttcagaggaaaacttctgagtaatgatgaagtaacaataaagtataaagatgaagatggagatcttataacaatttttgatagttctgacctttcctttgcaattcagtgcagtaggatactgaaactgacattatttgttaatggccagccaagaccccttgaatcaagtcaggtgaaatatctccgtcgagaactgatagaacttcgaaataaagtgaatcgtttattggatagcttggaaccacctggagaaccaggaccttccaccaatattcctgaaaatgatactgtggatggtagggaagaaaagtctgcttctgattcttctggaaaacagtctactcaggttatggcagcaagtatgtctgcttttgatcctttaaaaaaccaagatgaaatcaataaaaatgtta

SEQ ID NO: 32785 - DNA, 1696 bp, Homo sapiens
  source 1..1696: mol_type = unassigned DNA
ggcagccgggacccagccagccctgcgcctcgcgccgtcgcgcatgcgtcctggtctttctctagagttgtatatatagaacatcctggagtccaccatgaacggacagttggatctaagtgggaagctaatcatcaaagctcaacttggggaggatattcggcgaattcctattcataatgaagatattacttatgatgaattagtgctaatgatgcaacgagttttcagaggaaaacttctgagtaatgatgaagtaacaataaagtataaagatgaagatggagatcttataacaatttttgatagttctgacctttcctttgcaattcagtgcagtaggatactgaaactgacattatttgttaatggccagccaagaccccttgaatcaagtcaggtgaaatatctccgtcgagaactgatagaacttcgaaataaagtgaatcgtttattggatagcttggaaccacctggagaaccaggaccttccaccaatattcctgaaaatgatactgtggatggtagggaagaaaagtctgcttctgattcttctggaaaacagtctactcaggttatggcagcaagtatgtctgcttttgatcctttaaaaaaccaagatgaaatcaataaaaatgttatgtcagcgtttggcttaacagatgatcaggtttcagggccacccagtgctcctgcagaagatcgttcaggaacacccgacagcattgcttcctcctcctcagcagctcacccaccaggcgttcagccacagcagccaccatatacaggagctcagactcaagcaggtcagattgaaggtcagatgtaccaacagtaccagcaacaggccggctatggtgcacagcagccgcaggctccacctcagcagcctcaacagtatggtattcagtattcagcaagctatagtcagcagactggacctcaacaacctcagcagttccagggatatggccagcaaccaacttcccaggcaccagctcctgccttttctggtcagcctcaacaactgcctgctcagccgccacagcagtaccaggcgagcaattatcctgcacaaacttacactgcccaaacttctcagcctactaattatactgtggctcctgcctctcaacctggaatggctccaagccaacctggggcctatcaaccaagaccaggttttacttcacttcctggaagtaccatgacccctcctccaagtgggcctaatccttatgcgcgtaaccgtcctccctttggtcagggctatacccaacctggacctggttatcgataaggaggctcctctacaccaattaatgtagctgctagctattggcctcccaaaagactccagtactattttaatttgtattgaagaagttcagaaatttaaaagcagagcattttttatgatatcattgttggtgttaattgaaagtataatttgctggaacacaaagaccaaaatgaaagttttttcctccctgcttaaaaatgtagcagcttcttagttactttggaacactactcttacatgtataaagtgattgacttgactttctagcttcccttgtccggaggatattaaaatgctagggtgaggtttagccatcttacttggctttttactattaacatgatgtactaaagtagagccctttgagaatacaagatattatgtataaaatgt

SEQ ID NO: 32786 - DNA, 1716 bp, Homo sapiens
  source 1..1716: mol_type = unassigned DNA
agggactcttcggcctaggcagccgggacccagccagccctgcgcctcgcgccgtcgcgcatgcgtcctggtctttctctagagttgtatatatagaacatcctggagtccaccatgaacggacagttggatctaagtgggaagctaatcatcaaagctcaacttggggaggatattcggcgaattcctattcataatgaagatattacttatgatgaattagtgctaatgatgcaacgagttttcagaggaaaacttctgagtaatgatgaagtaacaataaagtataaagatgaagatggagatcttataacaatttttgatagttctgacctttcctttgcaattcagtgcagtaggatactgaaactgacattatttgttaatggccagccaagaccccttgaatcaagtcaggtgaaatatctccgtcgagaactgatagaacttcgaaataaagtgaatcgtttattggatagcttggaaccacctggagaaccaggaccttccaccaatattcctgaaaatgatactgtggatggtagggaagaaaagtctgcttctgattcttctggaaaacagtctactcaggttatggcagcaagtatgtctgcttttgatcctttaaaaaaccaagatgaaatcaataaaaatgttatgtcagcgtttggcttaacagatgatcaggtttcagggccacccagtgctcctgcagaagatcgttcaggaacacccgacagcattgcttcctcctcctcagcagctcacccaccaggcgttcagccacagcagccaccatatacaggagctcagactcaagcaggtcagatgtaccaacagtaccagcaacaggccggctatggtgcacagcagccgcaggctccacctcagcagcctcaacagtatggtattcagtattcagcaagctatagtcagcagactggacctcaacaacctcagcagttccagggatatggccagcaaccaacttcccaggcaccagctcctgccttttctggtcagcctcaacaactgcctgctcagccgccacagcagtaccaggcgagcaattatcctgcacaaacttacactgcccaaacttctcagcctactaattatactgtggctcctgcctctcaacctggaatggctccaagccaacctggggcctatcaaccaagaccaggttttacttcacttcctggaagtaccatgacccctcctccaagtgggcctaatccttatgcgcgtaaccgtcctccctttggtcagggctatacccaacctggacctggttatcgataaggaggctcctctacaccaattaatgtagctgctagctattggcctcccaaaagactccagtactattttaatttgtattgaagaagttcagaaatttaaaagcagagcattttttatgatatcattgttggtgttaattgaaagtataatttgctggaacacaaagaccaaaatgaaagttttttcctccctgcttaaaaatgtagcagcttcttagttactttggaacactactcttacatgtataaagtgattgacttgactttctagcttcccttgtccggaggatattaaaatgctagggtgaggtttagccatcttacttggctttttactattaacatgatgtactaaagtagagccctttgagaatacaagatattatgtataaaatgtaacactgatgatagg

SEQ ID NO: 32787 - DNA, 2176 bp, Homo sapiens
  source 1..2176: mol_type = unassigned DNA
aggacgggctaggcagcgcggggagggattcggactcggggcgggcctgcacgagggcatcggctccacagggaccagtcatccccaaaacgaggggatatcagcttaccgaggccgcaggttttcctagtccctacctcatagatatgtaggacatccccgggcccggaatgcggctctctgaccctctctgtgccctcccccgccccccgaaccaggcttggcgggcggaggcgccagcggatgtctcatgcaaggatcgtctctgtggctaagcctcactttccgctccgcccgggtgctctctagagcccggtttttcgagtggcagtctccagggctgccgaatacagcagcgatggagaacggcaccgggccctacggagaagaacgtccacgtgaagtccaggagacgacagtcaccgagggggctgccaaaatcgcctttcccagtgccaacgaggtcttttataacccggtgcaggaattcaatcgggacctgacatgtgctgtgatcaccgagtttgctcgcattcagcttggggccaaaggaatccagatcaaggttccaggagagaaggacacgcaaaaagtggtcgtggacttgtcagagcaagaggaggaaaaggttgaactgaaagagagtgaaaacctggcctcaggagaccaacctcgcacagcggccgtgggggagatctgtgaggaaggcctgcatgtgctggaaggcctggcagcttcaggcctacgttccattcgatttgccctagaggtgcctgggctcagatctgtggttgcaaacgatgcctccacccgggctgtggatctcatacgccggaatgtccagctcaatgacgtggcccacctggtacagccgagccaagcagatgcccggatgctgatgtaccagcaccagagggtgtcggagaggtttgacgtcatcgatctggacccctatggcagcccagccaccttcctggatgcagctgtgcaggctgtgagtgaaggagggttgctgtgtgtgacctgcacagacatggcggtgttggcggggaacagcggggagacgtgctacagcaagtacggggccatggccctcaagagccgggcctgccacgagatggccctgagaatcgtcctgcacagcctggacctccgcgccaactgctaccagcgcttcgtggtgccgctgctcagcatcagcgctgacttctacgtgcgtgtttttgtccgtgtcttcaccggccaggccaaggtcaaggcctcagccagggccaagttctctgcagcctgtggtccccctgtgacccccgagtgtgaacactgtgggcaacgacaccagcttggtggccccatgtgggcagagcccatccatgacctggattttgtgggccgtgtcctggaggctgtgagcgctaaccccggccgcttccacacctcggagcggatccgaggggtcctgagcgtcatcactgaggagctcccggacgtgcctctgtactacaccctggaccagctgagcagcaccatccactgcaacacaccaagcctcctgcagttgcggtcggccctcctccacgctgacttccgggtctcactctcccacgcctgtaagaacgctgtgaagacggatgcccctgcctctgccctctgggacatcatgcgttgctgggagaaggaatgtccggtgaaacgggagcgactatcagagactagcccagcgttccgcattctcagtgtggagcccaggctgcaggccaacttcaccatccgggaagatgccaaccccagctcccgacagcgaggactcaagcgcttccaggctaacccggaggccaactggggtccccggcctcgtgcccggccagggggcaaggcggccgacgaagctatggaggagagacgcaggctgcttcagaacaagcggaaggagccgccggaagatgtggcccagcgggctgcccggctcaagacatttccttgcaagaggtttaaggagggcacctgtcaacgcggggaccagtgctgctactcccacagccccccgacacccagggtttctgctgatgctgcccctgactgtccagagacctccaaccagaccccccctggacctggggctgccgctgggccaggcatagactgaaccaataaagagatgtcacgtcaccttctcccg

SEQ ID NO: 32788 - DNA, 2142 bp, Homo sapiens
  source 1..2142: mol_type = unassigned DNA
gattcgcccacccactgtgccaacatggcggcgcccaggtcctaattcgggaaacgtgcaccttgactaattcggttttctgtggctacgagagcaggcttggcgggcggaggcgccagcggatgtctcatgcaaggatcgtctctgtggctaagcctcactttccgctccgcccgggtgctctctagagcccggtttttcgagtggcagtctccagggctgccgaatacagcagcgatggagaacggcaccgggccctacggagaagaacgtccacgtgaagtccaggagacgacagtcaccgagggggctgccaaaatcgcctttcccagtgccaacgaggtcttttataacccggtgcaggaattcaatcgggacctgacatgtgctgtgatcaccgagtttgctcgcattcagcttggggccaaaggaatccagatcaaggttccaggagagaaggacacgcaaaaagtggtcgtggacttgtcagagcaagaggaggaaaaggttgaactgaaagagagtgaaaacctggcctcaggagaccaacctcgcacagcggccgtgggggagatctgtgaggaaggcctgcatgtgctggaaggcctggcagcttcaggcctacgttccattcgatttgccctagaggtgcctgggctcagatctgtggttgcaaacgatgcctccacccgggctgtggatctcatacgccggaatgtccagctcaatgacgtggcccacctggtacagccgagccaagcagatgcccggatgctgatgtaccagcaccagagggtgtcggagaggtttgacgtcatcgatctggacccctatggcagcccagccaccttcctggatgcagctgtgcaggctgtgagtgaaggagggttgctgtgtgtgacctgcacagacatggcggtgttggcggggaacagcggggagacgtgctacagcaagtacggggccatggccctcaagagccgggcctgccacgagatggccctgagaatcgtcctgcacagcctggacctccgcgccaactgctaccagcgcttcgtggtgccgctgctcagcatcagcgctgacttctacgtgcgtgtttttgtccgtgtcttcaccggccaggccaaggtcaaggcctcagccagcaagcaggcgctggtgttccagtgtgtgggctgcggggccttccaccttcagcgtctcggcaaagcgtcaggagtccccagcggccgggccaagttctctgcagcctgtggtccccctgtgacccccgagtgtgaacactgtgggcaacgacaccagcttggtggccccatgtgggcagagcccatccatgacctggattttgtgggccgtgtcctggaggctgtgagcgctaaccccggccgcttccacacctcggagcggatccgaggggtcctgagcgtcatcactgaggagctcccggacgtgcctctgtactacaccctggaccagctgagcagcaccatccactgcaacacaccaagcctcctgcagttgcggtcggccctcctccacgctgacttccgggtctcactctcccacgcctgtaagaacgctgtgaagacggatgcccctgcctctgccctctgggacatcatgcgttgctgggagaaggaatgtccggtgaaacgggagcgactatcagagactagcccagcgttccgcattctcagtgtggagcccaggctgcaggccaacttcaccatccgggaagatgccaaccccagctcccgacagcgaggactcaagcgcttccaggctaacccggaggccaactggggtccccggcctcgtgcccggccagggggcaaggcggccgacgaagctatggaggagagacgcaggctgcttcagaacaagcggaaggagccgccggaagatgtggcccagcgggctgcccggctcaagacatttccttgcaagaggtttaaggagggcacctgtcaacgcggggaccagtgctgctactcccacagccccccgacacccagggtttctgctgatgctgcccctgactgtccagagacctccaaccagaccccccctggacctggggctgccgctgggccaggcatagactgaaccaataaagagatgtcacgtcaccttctcccg

SEQ ID NO: 32789 - DNA, 2263 bp, Homo sapiens
  source 1..2263: mol_type = unassigned DNA
aggacgggctaggcagcgcggggagggattcggactcggggcgggcctgcacgagggcatcggctccacagggaccagtcatccccaaaacgaggggatatcagcttaccgaggccgcaggttttcctagtccctacctcatagatatgtaggacatccccgggcccggaatgcggctctctgaccctctctgtgccctcccccgccccccgaaccaggcttggcgggcggaggcgccagcggatgtctcatgcaaggatcgtctctgtggctaagcctcactttccgctccgcccgggtgctctctagagcccggtttttcgagtggcagtctccagggctgccgaatacagcagcgatggagaacggcaccgggccctacggagaagaacgtccacgtgaagtccaggagacgacagtcaccgagggggctgccaaaatcgcctttcccagtgccaacgaggtcttttataacccggtgcaggaattcaatcgggacctgacatgtgctgtgatcaccgagtttgctcgcattcagcttggggccaaaggaatccagatcaaggttccaggagagaaggacacgcaaaaagtggtcgtggacttgtcagagcaagaggaggaaaaggttgaactgaaagagagtgaaaacctggcctcaggagaccaacctcgcacagcggccgtgggggagatctgtgaggaaggcctgcatgtgctggaaggcctggcagcttcaggcctacgttccattcgatttgccctagaggtgcctgggctcagatctgtggttgcaaacgatgcctccacccgggctgtggatctcatacgccggaatgtccagctcaatgacgtggcccacctggtacagccgagccaagcagatgcccggatgctgatgtaccagcaccagagggtgtcggagaggtttgacgtcatcgatctggacccctatggcagcccagccaccttcctggatgcagctgtgcaggctgtgagtgaaggagggttgctgtgtgtgacctgcacagacatggcggtgttggcggggaacagcggggagacgtgctacagcaagtacggggccatggccctcaagagccgggcctgccacgagatggccctgagaatcgtcctgcacagcctggacctccgcgccaactgctaccagcgcttcgtggtgccgctgctcagcatcagcgctgacttctacgtgcgtgtttttgtccgtgtcttcaccggccaggccaaggtcaaggcctcagccagcaagcaggcgctggtgttccagtgtgtgggctgcggggccttccaccttcagcgtctcggcaaagcgtcaggagtccccagcggccgggccaagttctctgcagcctgtggtccccctgtgacccccgagtgtgaacactgtgggcaacgacaccagcttggtggccccatgtgggcagagcccatccatgacctggattttgtgggccgtgtcctggaggctgtgagcgctaaccccggccgcttccacacctcggagcggatccgaggggtcctgagcgtcatcactgaggagctcccggacgtgcctctgtactacaccctggaccagctgagcagcaccatccactgcaacacaccaagcctcctgcagttgcggtcggccctcctccacgctgacttccgggtctcactctcccacgcctgtaagaacgctgtgaagacggatgcccctgcctctgccctctgggacatcatgcgttgctgggagaaggaatgtccggtgaaacgggagcgactatcagagactagcccagcgttccgcattctcagtgtggagcccaggctgcaggccaacttcaccatccgggaagatgccaaccccagctcccgacagcgaggactcaagcgcttccaggctaacccggaggccaactggggtccccggcctcgtgcccggccagggggcaaggcggccgacgaagctatggaggagagacgcaggctgcttcagaacaagcggaaggagccgccggaagatgtggcccagcgggctgcccggctcaagacatttccttgcaagaggtttaaggagggcacctgtcaacgcggggaccagtgctgctactcccacagccccccgacacccagggtttctgctgatgctgcccctgactgtccagagacctccaaccagaccccccctggacctggggctgccgctgggccaggcatagactgaaccaataaagagatgtcacgtcaccttctcccg

SEQ ID NO: 32790 - DNA, 2964 bp, Homo sapiens
  source 1..2964: mol_type = unassigned DNA
ctagagctggctaaagtggttgggggttggatccggcgcgtgacgatgacgttgccagaagccaggatcatagagacgctcggcctccgccgcacgcgctggcggactaagagtggctggcgaagcgagcggccggcgcgggcccctggcgggcgggcggtacagccccaagcctgagacccggacctgagcatcgcaggttcgagtcccgccccgcctggggcgaagccgggggtggcggcgacctcgcggcgttgcaccggctctgtgagcacctcccctctgagcacttcccttgtgacaggccacttcccttgtgacaggcccaggacgaggtggccaggcggcccccatggcgtccctggtctaggcggagaaccgcctgggcgatgagtgagaacctcgacaacgagggcccgaagcccatggagagctgtggccaggagagcagcagtgccctgagctgccctaccgtctcggtgccccctgcagccccggcagccctggaggaggtggagaaagagggcgctggggcggctacagggccggggcctcagcccgggctctacagctacatcagggatgacttgtttacctctgagatctttaaactggagctgcagaacgtgcctcgccacgccagcttcagcgacgtccggcgcttcctgggccgctttggtctgcagccccacaaaaccaaactctttgggcaaccaccctgcgcctttgtgacattccgcagcgctgcagagagggacaaggccctgcgcgttttgcatggtgccctctggaaaggccgcccactcagtgtgcgcctggcccggcccaaggccgaccccatggccaggaggaggcgacaggagggtgagagtgagccaccagtaacacgagtggccgacgtggtgacccctctatggacagtgccctatgctgagcagcttgagcggaagcagctggagtgcgagcaggtgctgcagaaacttgccaaggaaatcgggagcaccaaccgtgccttgctgccctggctgctcgagcagaggcacaagcacaacaaggcctgctgcccgctggagggggtcaggccatcaccccagcagactgagtatcgtaataagtgtgagtttctggttggcgtcggggtggatggggaggataacaccgtgggctgtcggctcggcaagtacaagggcgggacgtgtgctgtggcagccccgtttgacaccgtgcacatccccgaagccaccaagcaggtggtgaaggccttccaggagttcatccggtccactccatactcggcatacgacccagagacgtacacaggccactggaagcagctgactgtgcgcaccagccgccgccaccaggccatggccattgcctacttccacccccagaagctgagccctgaggagctggcagagctgaagacctccctagcgcagcacttcacagcagggccaggcagggccagtggagtgacctgcctctacttcgtggaggagggacagcgaaagactcctagccaggagggcctgcccctggagcatgtggctggggaccggtgcatccacgaggacctgctagggctgaccttccggatctctccacacgccttcttccaggtgaacacacccgcagccgaggtgctctacacagtcatccaggactgggcccaattggatgcggggagcatggtgctggacgtgtgctgtggcaccggcaccattggcctggccctggcccggaaggtaaagagggtcattggggtcgagctatgcccagaggctgtggaggacgcccgggtgaacgcccaggacaatgagttgagtaatgtggagttccactgcgggagggccgaggacctggtgcccaccctggtgagcagactggcctcccagcacctcgtggccatcctggacccaccccgtgctggcttgcattccaaggtgatcctggccatccggagagctaagaacctcaggcggctgctgtacgtctcatgcaacccccgggcagccatgggcaactttgtggacctctgcagagccccatctaaccgggtgaagggcattcccttccggccggtcaaggctgtggcagtggacctgttcccgcagaccccgcactgtgagatgctcatcctgtttgagagggtggagcaccccaatggcacaggggtcttggggccccacagccctccagctcaacccacaccaggacccccagataacaccctacaagaaactgggaccttcccctcatcctaggcccaggacccattatggggacaggagctgaagggctcccagggccccaggggcggggaaggcatggcttgctggccaggatattcagaggtaggcagccaaagggcacagaaccctgtgccccaccaggattggcctgctgctaggggccaggggccctgaccaggaagacaggtgggttcctgtagcctgttgcccatccccagggcctttgtggactagccaaggctgtgagggccagaataaacaactgctcaacaaagggtgtttctgtgatgagagccaggggtctgaacacagggcctgggtgccagggaaagggccaaactaggcctaggcagctctgcaagcctctctgcatggctgggggagtcagggcagagcttactttaaaaaagaatgttcgatttgatacttaaacttgaggagaggcagagagaggtctgggaactgcaccagctgggggcatggggtggagaacactgggcagagttggcccctctgtggccagcctggccctcagcccagcagagagggcatcaaccaaggaaggggccatgctggggtgctgctcagctgttacaaaggcagggtccagcctgcagggaggccccaggaggggatctggccagtcaagggtccacagggtgccagcctctcaccctcagaataaagacatcagccattcccttctgga

SEQ ID NO: 32791 - DNA, 2928 bp, Homo sapiens
  source 1..2928: mol_type = unassigned DNA
aaaacgcccgcggcgcatgcccggcccgcccgtcagccagaggagcgcgcactcccggcgacacccgcgcgcacttccgtcccggccacgcgcgcctctagagctggctaaagtggttgggggttggatccggcgcgtgacgatgacgttgccagaagccaggatcatagagacgctcggcctccgccgcacgcgctggcggactaagagtggctggcgaagcgagcggccggcgcgggcccctggcgggcgggcggtacagccccaagcctgagacccggacctgagcatcgcaggcccaggacgaggtggccaggcggcccccatggcgtccctggtctaggcggagaaccgcctgggcgatgagtgagaacctcgacaacgagggcccgaagcccatggagagctgtggccaggagagcagcagtgccctgagctgccctaccgtctcggtgccccctgcagccccggcagccctggaggaggtggagaaagagggcgctggggcggctacagggccggggcctcagcccgggctctacagctacatcagggatgacttgtttacctctgagatctttaaactggagctgcagaacgtgcctcgccacgccagcttcagcgacgtccggcgcttcctgggccgctttggtctgcagccccacaaaaccaaactctttgggcaaccaccctgcgcctttgtgacattccgcagcgctgcagagagggacaaggccctgcgcgttttgcatggtgccctctggaaaggccgcccactcagtgtgcgcctggcccggcccaaggccgaccccatggccaggaggaggcgacaggagggtgagagtgagccaccagtaacacgagtggccgacgtggtgacccctctatggacagtgccctatgctgagcagcttgagcggaagcagctggagtgcgagcaggtgctgcagaaacttgccaaggaaatcgggagcaccaaccgtgccttgctgccctggctgctcgagcagaggcacaagcacaacaaggcctgctgcccgctggagggggtcaggccatcaccccagcagactgagtatcgtaataagtgtgagtttctggttggcgtcggggtggatggggaggataacaccgtgggctgtcggctcggcaagtacaagggcgggacgtgtgctgtggcagccccgtttgacaccgtgcacatccccgaagccaccaagcaggtggtgaaggccttccaggagttcatccggtccactccatactcggcatacgacccagagacgtacacaggccactggaagcagctgactgtgcgcaccagccgccgccaccaggccatggccattgcctacttccacccccagaagctgagccctgaggagctggcagagctgaagacctccctagcgcagcacttcacagcagggccaggcagggccagtggagtgacctgcctctacttcgtggaggagggacagcgaaagactcctagccaggagggcctgcccctggagcatgtggctggggaccggtgcatccacgaggacctgctagggctgaccttccggatctctccacacgccttcttccaggtgaacacacccgcagccgaggtgctctacacagtcatccaggactgggcccaattggatgcggggagcatggtgctggacgtgtgctgtggcaccggcaccattggcctggccctggcccggaaggtaaagagggtcattggggtcgagctatgcccagaggctgtggaggacgcccgggtgaacgcccaggacaatgagttgagtaatgtggagttccactgcgggagggccgaggacctggtgcccaccctggtgagcagactggcctcccagcacctcgtggccatcctggacccaccccgtgctggcttgcattccaaggtgatcctggccatccggagagctaagaacctcaggcggctgctgtacgtctcatgcaacccccgggcagccatgggcaactttgtggacctctgcagagccccatctaaccgggtgaagggcattcccttccggccggtcaaggctgtggcagtggacctgttcccgcagaccccgcactgtgagatgctcatcctgtttgagagggtggagcaccccaatggcacaggggtcttggggccccacagccctccagctcaacccacaccaggacccccagataacaccctacaagaaactgggaccttcccctcatcctaggcccaggacccattatggggacaggagctgaagggctcccagggccccaggggcggggaaggcatggcttgctggccaggatattcagaggtaggcagccaaagggcacagaaccctgtgccccaccaggattggcctgctgctaggggccaggggccctgaccaggaagacaggtgggttcctgtagcctgttgcccatccccagggcctttgtggactagccaaggctgtgagggccagaataaacaactgctcaacaaagggtgtttctgtgatgagagccaggggtctgaacacagggcctgggtgccagggaaagggccaaactaggcctaggcagctctgcaagcctctctgcatggctgggggagtcagggcagagcttactttaaaaaagaatgttcgatttgatacttaaacttgaggagaggcagagagaggtctgggaactgcaccagctgggggcatggggtggagaacactgggcagagttggcccctctgtggccagcctggccctcagcccagcagagagggcatcaaccaaggaaggggccatgctggggtgctgctcagctgttacaaaggcagggtccagcctgcagggaggccccaggaggggatctggccagtcaagggtccacagggtgccagcctctcaccctcagaataaagacatcagccattc

SEQ ID NO: 32792 - DNA, 2498 bp, Homo sapiens
  source 1..2498: mol_type = unassigned DNA
gttgccagaagccaggatcatagagacgctcggcctccgccgcacgcgctggcggactaagagtggctggcgaagcgagcggccggcgcgggcccctggcgggcgggcggtacagccccaagcctgagacccggacctgagcatcgcaggttcgagtcccgccccgcctggggcgaagccgggggtggcggcgacctcgcggcgttgcaccggctctgtgagcacctcccctctgagcacttcccttgtgacaggccacttcccttgtgacaggcccaggacgaggtggccaggcggcccccatggcgtccctggtctaggcggagaaccgcctgggcgatgagtgagaacctcgacaacgagggcccgaagcccatggagagctgtggccaggagagcagcagtgccctgagctgccctaccgtctcggtgccccctgcagccccggcagccctggaggaggtggagaaagagggcgctggggcggctacagggccggggcctcagcccgggctctacagctacatcagggatgacttgtttacctctgagatctttaaactggagctgcagaacgtgcctcgccacgccagcttcagcgacgtccggcgcttcctgggccgctttggtctgcagccccacaaaaccaaactctttgggcaaccaccctgcgcctttgtgacattccgcagcgctgcagagagggacaaggccctgcgcgttttgcatggtgccctctggaaaggccgcccactcagtgtgcgcctggcccggcccaaggccgaccccatggccaggaggaggcgacaggagggtgagagtgagccaccagtaacacgagtggccgacgtggtgacccctctatggacagtgccctatgctgagcagcttgagcggaagcagctggagtgcgagcaggtgctgcagaaacttgccaaggaaatcgggagcaccaaccgtgccttgctgccctggctgctcgagcagaggcacaagcacaacaaggcctgctgcccgctggagggggtcaggccatcaccccagcagactgagtatcgtaataagtgtgagtttctggttggcgtcggggtggatggggaggataacaccgtgggctgtcggctcggcaagtacaagggcgggacgtgtgctgtggcagccccgtttgacaccgtgcacatccccgaagccaccaagcaggtggtgaaggccttccaggagttcatccggtccactccatactcggcatacgacccagagacgtacacaggccactggaagcagctgactgtgcgcaccagccgccgccaccaggccatggccattgcctacttccacccccagaagctgagccctgaggagctggcagagctgaagacctccctagcgcagcacttcacagcagggccaggcagggccagtggagtgacctgcctctacttcgtggaggagggacagcgaaagactcctagccaggagggcctgcccctggagcatgtggctggggaccggtgcatccacgaggacctgctagggctgaccttccggatctctccacacgccttcttccaggtgaacacacccgcagccgaggtgctctacacagtcatccaggactgggcccaattggatgcggggagcatggtgctggacgtgtgctgtggcaccggcaccattggcctggccctggcccggaaggtaaagagggtcattggggtcgagctatgcccagaggctgtggaggacgcccgggtgaacgcccaggacaatgagttgagtaatgtggagttccactgcgggagggccgaggacctggtgcccaccctggtgagcagactggcctcccagcacctcgtggccatcctggacccaccccgtgctggcttgcattccaaggtgatcctggccatccggagagctaagaacctcaggcggctgctgtacgtctcatgcaacccccgggcagccatgggcaactttgtggacgccccccttttccccccacagcctctgcagagccccatctaaccgggtgaagggcattcccttccggccggtcaaggctgtggcagtggacctgttcccgcagaccccgcactgtgagatgctcatcctgtttgagagggtggagcaccccaatggcacaggggtcttggggccccacagccctccagctcaacccacaccaggacccccagataacaccctacaagaaactgggaccttcccctcatcctaggcccaggacccattatggggacaggagctgaagggctcccagggccccaggggcggggaaggcatggcttgctggccaggatattcagaggtaggcagccaaagggcacagaaccctgtgccccaccaggattggcctgctgctaggggccaggggccctgaccaggaagacaggtgggttcctgtagcctgttgcccatccccagggcctttgtggactagccaaggctgtgagggccagaataaacaactgctcaac

SEQ ID NO: 32793 - DNA, 5573 bp, Homo sapiens
  source 1..5573: mol_type = unassigned DNA
ttcggcctccgcttcttcaggctgctggacagagacataccagccccgctcagcgttgaagctcccccaggacgcctccatgctgctctccagctgactaccagttccatctacgagcctctacccctgccctgcgctccagtcgtcggtcgcgccagaggcggagctttgagcccggcccttccggcattccgtacttcaccagggcctggaaggagaggagcgagtcgacttgatctgatgacgcgcgccctcttcgcggcgaacagtgatgatgtcatagaagacccgcccatccacccgcgacccacatccgatcggtaccggagcgggaggtgaggggtcggctcgcggatccagctgcagagcgacgtggggaattggaatggtgctttggatcttatggaggccatttggattctcaggaagatttctgaaactggaaagccatagcataactgaatcaaaatcgttgattccagtagcttggacatccctgacacagatgcttttggaagcacctggtattttcttattgggtcaaagaaaaagattctcaaccatgccagaaacagaaacacatgagagagagactgaattgttttcaccaccttctgatgtccgaggcatgacaaaacttgatagaacagcttttaaaaagacagtcaacattccagtgcttaaagtgaggaaagaaatagtcagtaaattgatgcgatccctaaaaagggcagcattgcagcgcccaggcataagacgtgtgattgaagatccggaagataaagaaagtagactaatcatgttggatccctataaaatatttactcatgattcctttgagaaagcagaactcagtgttttagagcagcttaatgtcagtccacagatctctaaatacaatttggaactaacatatgaacactttaagtcagaagaaatcttgagagctgtgcttcctgaaggtcaagatgtaacttcagggtttagcaggattggacatattgcacacctaaaccttcgagatcatcagctgtctttcaaacatttaattggccaggttatgattgacaaaaatccaggaatcacctcagcagtaaataaaataaataatattgacaatatgtaccgaaatttccaaatggaagtgctatctggagagcagaacatgatgacaaaggttcgagaaaacaactacacctatgaatttgatttttcaaaagtctattggaatcctcgtctgtctacagaacacagccgtatcacagaacttctcaaacctggggatgtcctatttgatgtttttgctggggttgggccctttgccattccagtagcaaagaaaaactgcactgtatttgccaatgatctcaatcctgaatctcataaatggctgttgtacaactgtaaattaaataaagtggaccaaaaggtgaaagtcttcaacttggatgggaaagacttcctccaaggaccagtcaaagaagagttaatgcagctgctgggtctgtcaaaagaaagaaaaccctctgtgcacgttgtcatgaacttgccagcaaaagctatagagtttcttagtgctttcaagtggcttttagatgggcagccatgcagcagtgagttccttcccatagtgcattgttatagcttttccaaagatgctaaccctgctgaggatgttcggcaaagggctggagctgtgttaggcatttctctggaggcatgcagttcagttcacctggtaagaaatgtggccccaaacaaggaaatgctgtgcatcacgtttcagattcctgcctctgtcctctacaagaaccagaccagaaatccagagaatcatgaagatccacctcttaaaaggcagaggacggctgaagccttttcagacgaaaaaacacaaattgtttcaaacacttaattggaaatgttttctccatctccctaccagacttacatgtagtgaaatagaatttgtattatttaataaaattttagggtttggtttttactattgaacccttgtactttgccttattttacaaattgaggattaccaattaaactttaactgaactaaggctaccaaatacattccctgttatctaaattataacatacaattattttataacaaaatatatctaatttttattggataaatatgaataaatattttctctcagggaaaataatttttgaaagtagggtgattgagtactaactaggaaggtattaacaccactttgtagttgtcctttacgtaactactcctttactgccaattaactatcaccataaaagtaataaaaaatgaaattatttagaacggggcaggcaaactacatcctgcaggccaaatctgtcccaccacctgttttcatatggcctgtggcctaataatgttcttacgttttccattggttgaaaaataatcaaaagaacattttgtgacgtgaaaattttatgacatctattatgtatcagttttaaaaattagaattgtatgaaattaagagtttcagagttcataaagtttgattggaacataccatgctcatttgtttacatatcatctgcagctgttttttgtttttaatatggaacgcttcacgaatttgcatgtcatccttgcgcagggaccattctgatcttctctgtaccattccagttttttagtatatgtgctgctgaagtgaggactgcagctgctttcttgaacaatagcagagttgagtggttgcaacacacactgaatgtgactgtcatcacttcacactgctgtttgacacatcacaaatcactgatgtggttgtaacgacagcattttgagtgccatgtatatcacatgaacccacattttattttttattaccagagcatatctattatagcaaaacaagaaaagtggactttgttgttatttttaaagtacagtagggtgtgaattattttgatgttgaattagacgacaaagcatctatatagctaagctaaaagaataaccattgacattaccagacaaaccactcatcacagtattcccaactcacaggcaagcaactgttagaaaaattagaaaatttaaaatggaaataacaaagcagaatttcttcacaaaatgaaaatgaggctgcaacaacagtaagtctctaagtcaatcatttgttagccaagcaaagccatttattgatggtgtgaattaattatgtttggatgcagcagctgaatatatccagagaaaataaacttaagattactggcctttggcaagaacagttgcttaaagagttaaggacattgaaagcgacataaatagtcactttaaaaaggaaatgattctggatggttctttgactctatttttatttttacttagagacagggtcttgctctgttgcccaggctggagtgtagagacacagttacacctcaatgtaaccttgaactcctaggcttgagatcttcccatctcggcttcccaatgtgtgaaggttacaggtgtgagcccttatatgtggccctcgtgaatggtttagcactatccccttggtggtgtccttaagataatgagttatgagatcttgttgtttcaaagtatgtggcactcgccccccacactctcttgctcctgccttcgccatgtgaagtgccttctcctattttgccttctaccatgagtaaaagcttcctgaggcttccccagaagcagatgccagtgctatgcttcctatagcctggagaactgtgagccaattatacctcttttcttataaattacccagtatcaagtatttctttatagcaatgcaagaatggcctaaaacacaaggcaaaacaactttgatatggtacagtcattttgacaatcgatatttgaatcacaatatttgatgacaatatccttacacatttgtcatactatcaaagagaaagaaacaagatttccattcccacaaattttagtgagtatattttctgagttcagcatttttagggacctaggtgcaagtgcaaaggaaatttccctgtttcaaaatctatttaactgcaattgaggtgattcaacctaattttcagtaagaagtgattaaaataatgacatgctaaaaggcaaatttcaagggaagaaatgtaaaagaattttacaaatgctttccaagtgatgaatatgctcagttaatttcatatgctcctggattgatagcagtatttggcaatacctatctgtatgagaagacatttttaaagatgaaatgtgtaaaatcttattaccattagtattaatggttaatgatggttaatgataaccattaataggcaatcatttacaactgattttgatcacagggaacacttacttagaaccctgattagaggcaatgttattctcaccaaaaaaggcattacaaaaaattgggctatattttgaattttgtcaattaaaaaagcgtgggagcagtgtgaaggagaagaggcaagaacgacccctggaccgaccaaagcccgcgcgctgctgcgtcccacacccggtgcccacatcccgccgccgccgccgccgccatgcccaagagaaagactgaaggggatgctaaaggagataaagccaaggtgaaggatgaatcacagagaagatctgcgaggttgtctgctaaacctgctcctccaaagccagagcccaagcctaaaaaggcccctgcaaagaagggagagaaggtacccaaagggaaaaagagaaaagctgatgctggcaaggagcgggaaggtgctggagatcccaagtgaagtgtgtgcattttttataactgtacttctggtgactgtacagtttgaaatattctttatcaagttttataaaaatgcagaattttgttttactttttttaagctatgttgttagcacacagaacacttcattgttgtttttgggggaaggggtatgtgtcactaatagaatatctctgaagctggattgatacggggaaaacatctttcccttctagttttgagagacttcctcttggctcccaggaggagggatttcctgactttgacacacatggccaccttggcacaaaagccttgtggtatggaaaaacaaattcgtttttatgtcttcttttccctttccatctttcagcatagacttaatccccttaagcccagacatctgttgggacctgacccccggtcattggttaccagtgtgtctggcaatctggactttccagtgatgccactgagatggcacctgtcaaaagagcagtggttccatttctagattatggatcttcggataaattctgccattttcatttcacttcctgaaagtcagggttggcttgtgaaaagttgttaaacaacatgctaaatgtgaaatgttaaccctctaaactttccctgttcagagcatcagatgaggacttcattgggttttatagcggctgatttttggtagtccattgaagaagagagtttgaaagttgtatactgttaatgactgtctgcccatgtcctgcctgaaataccatgattgtttatggaaagtatctttaataaagctggatacagtttgaaag

SEQ ID NO: 32794 - DNA, 1940 bp, Homo sapiens
  source 1..1940: mol_type = unassigned DNA
ggctggggggcttagaattttatttttggtttacagcgcagaagaagagcagtgaggccggggcgcgggtggggagggcaaggcggcggctcaaaaaaaaagccagcccctcgcggcccgacagagtctcggcgccccgcgggtcggtggagcctcaggggtgagcgcaggccggagacaggggaacccgccgcgggacaggggaaggccggacggaacgcgggtaagctgccgcagcttccggccgggccactagcgcggaccctacggccggggcgggacttccggcaaggcgcggaagcggcggtagctgcagctggcgaagttgggcgactggcggatgcaggccttgcggcacgtcgtgtgcgccctgtccggcggcgtggacagcgccgtggccgcgctgctgctgaggcggagaggttaccaggtgacaggggtgtttatgaagaactgggactcactggatgaacatggggtctgtactgccgacaaagactgtgaagatgcttacagagtttgccagatcttagacatccctttccatcaagtgtcctacgtaaaggagtattggaatgatgtgttcagtgactttttgaatgagtatgaaaaaggaaggactcccaatcctgacatagtttgcaacaagcacatcaaatttagttgcttttttcattatgctgtggataatcttggggcagatgccattgccacaggtcactatgcaagaacttccctggaagatgaagaagtctttgagcagaagcacgttaagaagcccgaagggcttttcagaaatcggtttgaagttagaaatgcggtaaaactcctccaggcagctgacagctttaaagaccagaccttctttctcagccaggtttcccaggatgccctgaggagaaccatcttccctctggggggattaacgaaagagtttgtaaagaaaatcgctgctgagaatagacttcatcatgtgcttcagaagaaagagagcatgggcatgtgtttcatcgggaagaggaattttgaacatttccttcttcagtatctgcagcctcgacctggtcactttatttccatagaagacaataaggttctgggaacacataaaggttggttcctgtataccttgggccagagagcaaacataggtggcctgagagagccctggtacgtggtggagaaggacagcgtcaagggtgacgtgtttgtggccccccggacagaccacccagccctgtacagggacctgctgaggaccagccgcgtgcactggattgcggaggagcctcccgcagcactggtccgggacaagatgatggagtgccacttccgattccgccaccagatggcactagtgccctgtgtgctgaccctcaatcaagatggcaccgtgtgggtgacagctgtgcaggctgtgcgtgcccttgccacaggacagtttgctgtgttctacaagggggacgagtgcctgggcagcgggaagatcctgcggctggggccgtctgcctacacgctccagaagggccagcgcagagctgggatggccactgagagccccagtgacagcccagaagatggtccaggcctgagtcccttgctctgacagagatggatctgctagaaggaacctggagagcaggacccatggctgggcggctggtgagcagtccaggtgcccaagggccagcttgctgctgcccaaagcagaggaagccgggctggctgagggtccgaaaagcctgcaggggcccggcgagccccaggaagagcctcagctccaggctggggctctggctgctggagcatctgctggctggtggggtggcccgagttccccttcaccgcccccagggagggtttcccacctcagagtacaccgaggggacctgcagagggggctgtcgggacagcgtggaataaacattatttcaaggaca

SEQ ID NO: 32795 - DNA, 1830 bp, Homo sapiens
  source 1..1830: mol_type = unassigned DNA
ggctggggggcttagaattttatttttggtttacagcgcagaagaagagcagtgaggccggggcgcgggtggggagggcaaggcggcggctcaaaaaaaaagccagcccctcgcggcccgacagagtctcggcgccccgcgggtcggtggagcctcaggggtgagcgcaggccggagacaggggaacccgccgcgggacaggggaaggccggacggaacgcgggtaagctgccgcagcttccggccgggccactagcgcggaccctacggccggggcgggacttccggcaaggcgcggaagcggcggtagctgcagctggcgaagttgggcgactggcggatgcaggccttgcggcacgtcgtgtgcgccctgtccggcggcgtggacagcgccgtggccgcgctgctgctgaggcggagaggttaccaggtgacaggggtgtttatgaagaactgggactcactggatgaacatggggtctgtactgccgacaaagactgtgaagatgcttacagagtttgccagatcttagacatccctttccatcaagtgtcctacgtaaaggagtattggaatgatgtgttcaggggcagatgccattgccacaggtcactatgcaagaacttccctggaagatgaagaagtctttgagcagaagcacgttaagaagcccgaagggcttttcagaaatcggtttgaagttagaaatgcggtaaaactcctccaggcagctgacagctttaaagaccagaccttctttctcagccaggtttcccaggatgccctgaggagaaccatcttccctctggggggattaacgaaagagtttgtaaagaaaatcgctgctgagaatagacttcatcatgtgcttcagaagaaagagagcatgggcatgtgtttcatcgggaagaggaattttgaacatttccttcttcagtatctgcagcctcgacctggtcactttatttccatagaagacaataaggttctgggaacacataaaggttggttcctgtataccttgggccagagagcaaacataggtggcctgagagagccctggtacgtggtggagaaggacagcgtcaagggtgacgtgtttgtggccccccggacagaccacccagccctgtacagggacctgctgaggaccagccgcgtgcactggattgcggaggagcctcccgcagcactggtccgggacaagatgatggagtgccacttccgattccgccaccagatggcactagtgccctgtgtgctgaccctcaatcaagatggcaccgtgtgggtgacagctgtgcaggctgtgcgtgcccttgccacaggacagtttgctgtgttctacaagggggacgagtgcctgggcagcgggaagatcctgcggctggggccgtctgcctacacgctccagaagggccagcgcagagctgggatggccactgagagccccagtgacagcccagaagatggtccaggcctgagtcccttgctctgacagagatggatctgctagaaggaacctggagagcaggacccatggctgggcggctggtgagcagtccaggtgcccaagggccagcttgctgctgcccaaagcagaggaagccgggctggctgagggtccgaaaagcctgcaggggcccggcgagccccaggaagagcctcagctccaggctggggctctggctgctggagcatctgctggctggtggggtggcccgagttccccttcaccgcccccagggagggtttcccacctcagagtacaccgaggggacctgcagagggggctgtcgggacagcgtggaataaacattatttcaagg

SEQ ID NO: 32796 - DNA, 1401 bp, Homo sapiens
  source 1..1401: mol_type = unassigned DNA
gtgcacgtctcctccctccctgggccgctggttgcgcgcgggtcggcaggaggataccccgtcctctgactttggttcggaggctcctcgccctccacctgtgtagtcggaggtgtgcgcgactgcagctccgactacctgggagcagttccgcgcccctctccacccacgcgcgcccacccacagttaccaggtgacaggggtgtttatgaagaactgggactcactggatgaacatggggtctgtactgccgacaaagactgtgaagatgcttacagagtttgccagatcttagacatccctttccatcaagtgtcctacgtaaaggagtattggaatgatgtgttcagtgactttttgaatgagtatgaaaaaggaaggactcccaatcctgacatagtttgcaacaagcacatcaaatttagttgcttttttcattatgctgtggataatcttggggcagatgccattgccacaggtcactatgcaagaacttccctggaagatgaagaagtctttgagcagaagcacgttaagaagcccgaagggcttttcagaaatcggtttgaagttagaaatgccaggtttcccaggatgccctgaggagaaccatcttccctctggggggattaacgaaagagtttgtaaagaaaatcgctgctgagaatagacttcatcatgtgcttcagaagaaagagagcatgggcatgtgtttcatcgggaagaggaattttgaacatttccttcttcagtatctgcagcctcgacctggtcactttatttccatagaagacaataaggttctgggaacacataaaggtgaggtgcagactctgccacttgtcatctgaaatgcctagagctgtggcgtttcagctctgggagactagaccagagttcctgtcgtcccttccacttggctggagaattgtagaaggctctgtggggcggccgggggcgggcacggcctagggtggaacagttgccttgatggtggctgggtgcacttccagatgtggcctcagctgagatgctggagttcatgaaaagcgcgcctctgacttggaaggactatactctgtgagttacgtatcaagtccctgtaaaaagaatgatttccttcctgtgtaaggaaaatgttaaactacacaaaactccactctgattcagggagtaaggtggacgtcccggcatggtgtgaatgattaaggaccacatgcagcgatgggatcaggcgtccgcgctggccagagtgctgctcgctcatgtgcagacccttactgcggtgaggcctgcgtgagcctgtgctgtgcctggtgtcaggggacaggctccgagtcagtcacagtgtgcagtcctgctgtggggacagagtgcagccattgttgggttagtacagt

SEQ ID NO: 32797 - DNA, 1793 bp, Homo sapiens
  source 1..1793: mol_type = unassigned DNA
gccgagaggaggcctccaatggctggctggggggcttagaattttatttttggtttacagcgcagaagaagagcagtgaggccggggcgcgggtggggagggcaaggcggcggctcaaaaaaaaagccagcccctcgcggcccgacagagtctcggcgccccgcgggtcggtggagcctcaggggtgagcgcaggccggagacaggggaacccgccgcgggacaggggaaggccggacggaacgcgggtaagctgccgcagcttccggccgggccactagcgcggaccctacggccggggcgggacttccggcaaggcgcggaagcggcggtagctgcagctggcgaagttgggcgactggcggatgcaggccttgcggcacgtcgtgtgcgccctgtccggcggcgtggacagcgccgtggccgcgctgctgctgaggcggagaggttaccaggtgacaggggtgtttatgaagaactgggactcactggatgaacatggggtctgtactgccgacaaagactgtgaagatgcttacagagtttgccagatcttagacatccctttccatcaagtgtcctacgtaaaggagtattggaatgatgtgttcaggggcagatgccattgccacaggtcactatgcaagaacttccctggaagatgaagaagtctttgagcagaagcacgttaagaagcccgaagggcttttcagaaatcggtttgaagttagaaatggtttcccaggatgccctgaggagaaccatcttccctctggggggattaacgaaagagtttgtaaagaaaatcgctgctgagaatagacttcatcatgtgcttcagaagaaagagagcatgggcatgtgtttcatcgggaagaggaattttgaacatttccttcttcagtatctgcagcctcgacctggtcactttatttccatagaagacaataaggttctgggaacacataaaggttggttcctgtataccttgggccagagagcaaacataggtggcctgagagagccctggtacgtggtggagaaggacagcgtcaagggtgacgtgtttgtggccccccggacagaccacccagccctgtacagggacctgctgaggaccagccgcgtgcactggattgcggaggagcctcccgcagcactggtccgggacaagatgatggagtgccacttccgattccgccaccagatggcactagtgccctgtgtgctgaccctcaatcaagatggcaccgtgtgggtgacagctgtgcaggctgtgcgtgcccttgccacaggacagtttgctgtgttctacaagggggacgagtgcctgggcagcgggaagatcctgcggctggggccgtctgcctacacgctccagaagggccagcgcagagctgggatggccactgagagccccagtgacagcccagaagatggtccaggcctgagtcccttgctctgacagagatggatctgctagaaggaacctggagagcaggacccatggctgggcggctggtgagcagtccaggtgcccaagggccagcttgctgctgcccaaagcagaggaagccgggctggctgagggtccgaaaagcctgcaggggcccggcgagccccaggaagagcctcagctccaggctggggctctggctgctggagcatctgctggctggtggggtggcccgagttccccttcaccgcccccagggagggtttcccacctcagagtacaccgaggggacctgcagagggggctgtcgggacagcgtggaataaacattatttcaa

SEQ ID NO: 32798 - DNA, 1775 bp, Homo sapiens
  source 1..1775: mol_type = unassigned DNA
ggctggggggcttagaattttatttttggtttacagcgcagaagaagagcagtgaggccggggcgcgggtggggagggcaaggcggcggctcaaaaaaaaagccagcccctcgcggcccgacagagtctcggcgccccgcgggtcggtggagcctcaggggtgagcgcaggccggagacaggggaacccgccgcgggacaggggaaggccggacggaacgcgggtaagctgccgcagcttccggccgggccactagcgcggaccctacggccggggcgggacttccggcaaggcgcggaagcggcggtagctgcagctggcgaagttgggcgactggcggatgcaggccttgcggcacgtcgtgtgcgccctgtccggcggcgtggacagcgccgtggccgcgctgctgctgaggcggagaggttaccaggtgacaggggtgtttatgaagaactgggactcactggatgaacatggggtctgtactgccgacaaagactgtgaagatgcttacagagtttgccagatcttagacatccctttccatcaagtgtcctacgtaaaggagtattggaatgatgtgttcaggggcagatgccattgccacaggtcactatgcaagaacttccctggaagatgaagaagtctttgagcagaagcacgttaagaagcccgaagggcttttcagaaatcggtttgaagttagaaatgccaggtttcccaggatgccctgaggagaaccatcttccctctggggggattaacgaaagagtttgtaaagaaaatcgctgctgagaatagacttcatcatgtgcttcagaagaaagagagcatgggcatgtgtttcatcgggaagaggaattttgaacatttccttcttcagtatctgcagcctcgacctggtcactttatttccatagaagacaataaggttctgggaacacataaaggttggttcctgtataccttgggccagagagcaaacataggtggcctgagagagccctggtacgtggtggagaaggacagcgtcaagggtgacgtgtttgtggccccccggacagaccacccagccctgtacagggacctgctgaggaccagccgcgtgcactggattgcggaggagcctcccgcagcactggtccgggacaagatgatggagtgccacttccgattccgccaccagatggcactagtgccctgtgtgctgaccctcaatcaagatggcaccgtgtgggtgacagctgtgcaggctgtgcgtgcccttgccacaggacagtttgctgtgttctacaagggggacgagtgcctgggcagcgggaagatcctgcggctggggccgtctgcctacacgctccagaagggccagcgcagagctgggatggccactgagagccccagtgacagcccagaagatggtccaggcctgagtcccttgctctgacagagatggatctgctagaaggaacctggagagcaggacccatggctgggcggctggtgagcagtccaggtgcccaagggccagcttgctgctgcccaaagcagaggaagccgggctggctgagggtccgaaaagcctgcaggggcccggcgagccccaggaagagcctcagctccaggctggggctctggctgctggagcatctgctggctggtggggtggcccgagttccccttcaccgcccccagggagggtttcccacctcagagtacaccgaggggacctgcagagggggctgtcgggacagcgtggaataaacattatttcaagg

SEQ ID NO: 32799 - DNA, 1688 bp, Homo sapiens
  source 1..1688: mol_type = unassigned DNA
ggctggggggcttagaattttatttttggtttacagcgcagaagaagagcagtgaggccggggcgcgggtggggagggcaaggcggcggctcaaaaaaaaagccagcccctcgcggcccgacagagtctcggcgccccgcgggtcggtggagcctcaggggtgagcgcaggccggagacaggggaacccgccgcgggacaggggaaggccggacggaacgcgggtaagctgccgcagcttccggccgggccactagcgcggaccctacggccggggcgggacttccggcaaggcgcggaagcggcggtagctgcagctggcgaagttgggcgactggcggatgcaggccttgcggcacgtcgtgtgcgccctgtccggcggcgtggacagcgccgtggccgcgctgctgctgaggcggagaggttaccaggtgacaggggtgtttatgaagaactgggactcactggatgaacatggggtctgtactgccgacaaagactgtgaagatgcttacagagtttgccagatcttagacatccctttccatcaagtgtcctacgtaaaggagtattggaatgatgtgttcaggggcagatgccattgccacaggtcactatgcaagaacttccctggaagatgaagaagtctttgagcagaagcacgttaagaagcccgaagggcttttcagaaatcggtttgaagttagaaatggtttcccaggatgccctgaggagaaccatcttccctctggggggattaacgaaagagtttgtaaagaaaatcgctgctgagaatagacttcatcatgtgcttcagaagaaagagagcatgggcatgtgtttcatcgggaagaggaattttgaacatttccttcttcagtatctgcagcctcgacctggtcactttatttccatagaagacaataaggttctgggaacacataaaggttggttcctgtataccttgggccagagagcaaacataggtggcctgagagagccctggtacgtggtggagaaggacagcgtcaagggtgacgtgtttgtggccccccggacagaccacccagccctgtacagggacctgctgaggaccagccgcgtgcactggattgcggaggagcctcccgcagcactggtccgggacaagatgatggagtgccacttccgattccgccaccagatggcactagtttgctgtgttctacaagggggacgagtgcctgggcagcgggaagatcctgcggctggggccgtctgcctacacgctccagaagggccagcgcagagctgggatggccactgagagccccagtgacagcccagaagatggtccaggcctgagtcccttgctctgacagagatggatctgctagaaggaacctggagagcaggacccatggctgggcggctggtgagcagtccaggtgcccaagggccagcttgctgctgcccaaagcagaggaagccgggctggctgagggtccgaaaagcctgcaggggcccggcgagccccaggaagagcctcagctccaggctggggctctggctgctggagcatctgctggctggtggggtggcccgagttccccttcaccgcccccagggagggtttcccacctcagagtacaccgaggggacctgcagagggggctgtcgggacagcgtggaataaacattatttcaagg

SEQ ID NO: 32800 - DNA, 1882 bp, Homo sapiens
  source 1..1882: mol_type = unassigned DNA
ggctggggggcttagaattttatttttggtttacagcgcagaagaagagcagtgaggccggggcgcgggtggggagggcaaggcggcggctcaaaaaaaaagccagcccctcgcggcccgacagagtctcggcgccccgcgggtcggtggagcctcaggggtgagcgcaggccggagacaggggaacccgccgcgggacaggggaaggccggacggaacgcgggtaagctgccgcagcttccggccgggccactagcgcggaccctacggccggggcgggacttccggcaaggcgcggaagcggcggtagctgcagctggcgaagttgggcgactggcggatgcaggccttgcggcacgtcgtgtgcgccctgtccggcggcgtggacagcgccgtggccgcgctgctgctgaggcggagaggttaccaggtgacaggggtgtttatgaagaactgggactcactggatgaacatggggtctgtactgccgacaaagactgtgaagatgcttacagagtttgccagatcttagacatccctttccatcaagtgtcctacgtaaaggagtattggaatgatgtgttcagtgactttttgaatgagtatgaaaaaggaaggactcccaatcctgacatagtttgcaacaagcacatcaaatttagttgcttttttcattatgctgtggataatcttggggcagatgccattgccacaggtcactatgcaagaacttccctggaagatgaagaagtctttgagcagaagcacgttaagaagcccgaagggcttttcagaaatcggtttgaagttagaaatgccaggtttcccaggatgccctgaggagaaccatcttccctctggggggattaacgaaagagtttgtaaagaaaatcgctgctgagaatagacttcatcatgtgcttcagaagaaagagagcatgggcatgtgtttcatcgggaagaggaattttgaacatttccttcttcagtatctgcagcctcgacctggtcactttatttccatagaagacaataaggttctgggaacacataaaggttggttcctgtataccttgggccagagagcaaacataggtggcctgagagagccctggtacgtggtggagaaggacagcgtcaagggtgacgtgtttgtggccccccggacagaccacccagccctgtacagggacctgctgaggaccagccgcgtgcactggattgcggaggagcctcccgcagcactggtccgggacaagatgatggagtgccacttccgattccgccaccagatggcactagtgccctgtgtgctgaccctcaatcaagatggcaccgtgtgggtgacagctgtgcaggctgtgcgtgcccttgccacaggacagtttgctgtgttctacaagggggacgagtgcctgggcagcgggaagatcctgcggctggggccgtctgcctacacgctccagaagggccagcgcagagctgggatggccactgagagccccagtgacagcccagaagatggtccaggcctgagtcccttgctctgacagagatggatctgctagaaggaacctggagagcaggacccatggctgggcggctggtgagcagtccaggtgcccaagggccagcttgctgctgcccaaagcagaggaagccgggctggctgagggtccgaaaagcctgcaggggcccggcgagccccaggaagagcctcagctccaggctggggctctggctgctggagcatctgctggctggtggggtggcccgagttccccttcaccgcccccagggagggtttcccacctcagagtacaccgaggggacctgcagagggggctgtcgggacagcgtggaataaacattatttcaagg

SEQ ID NO: 32801 - DNA, 1208 bp, Homo sapiens
  source 1..1208: mol_type = unassigned DNA
cgcggggatggagcccctgcgggtgctggagctatacagcggcgtgggcggcatgcaccacgcgctgagagaaagctgtatacctgcacaagtggtggctgccattgatgtcaacactgtcgctaatgaagtatacaagtataattttcctcacacacagttacttgccaagacgattgaaggcattacactcgaagagtttgacagattatcttttgatatgattttaatgagccctccctgccagccattcacaagagacctcttgatacaaacaatagaaaattgtggctttcagtaccaagagtttctattatctccaacctctcttggcattccaaattcaaggctacgatattttcttattgcaaagcttcagtcagagccattaccctttcaagcccctggtcaggtactgatggagttccccaaaattgaatctgtacatccacaaaaatatgcaatggatgtagaaaataaaattcaagaaaagaacgttgaaccaaatattagctttgatggcagcatacagtgttctggaaaagatgccattctttttaagcttgaaactgcagaagaaattcacaggaaaaatcaacaagatagtgatctctctgtgaaaatgctaaaagattttcttgaagatgacactgacgtgaaccagtatcttttaccaccaaagtcattgctgcgatatgctcttctgttagacattgttcagcccacttgtagaaggtccgtgtgctttaccaaaggatatggaagctacatagaagggacagggtctgtgttacagactgcagaggatgtgcaggttgagaatatctacaaatcccttaccaatttgtcacaagaagaacagataacaaagctgttaatacttaaactgcgatatttcactcctaaagaaatagcaaatctccttggatttcctccagagttcggatttcctgagaagataacagtgaaacagcgttatcgcctacttggaaatagtctcaacgtgcatgtagtagctaaactaatcaaaatcttatatgaataattttgaaataactctgaaagatggtcatatgatattccttcattttcagagagtaattctgaaattctgttttgaactaattctggtgaaatttaactaaattattttaatctgtccttattaagaaatttggattttattaaaaaaatccatgtgtttcatc

SEQ ID NO: 32802 - DNA, 1197 bp, Homo sapiens
  source 1..1197: mol_type = unassigned DNA
cgcggggatggagcccctgcgggtgctggagctatacagcggcgtgggcggcatgcaccacgcgctgagagaaagctgtatacctgcacaagtggtggctgccattgatgtcaacactgtcgctaatgaagtatacaagtataattttcctcacacacagttacttgccaagacgattgaaattacaaaaattaccaaagtatattcttttggaaaatgttaaaggttttgaagtatcttctacaagagacctcttgatacaaacaatagaaaattgtggctttcagtaccaagagtttctattatctccaacctctcttggcattccaaattcaaggctacgatattttcttattgcaaagcttcagtcagagccattaccctttcaagcccctggtcaggtactgatggagttccccaaaattgaatctgtacatccacaaaaatatgcaatggatgtagaaaataaaattcaagaaaagaacgttgaaccaaatattagctttgatggcagcatacagtgttctggaaaagatgccattctttttaagcttgaaactgcagaagaaattcacaggaaaaatcaacaagatagtgatctctctgtgaaaatgctaaaagattttcttgaagatgacactgacgtgaaccagtatcttttaccaccaaagtcattgctgcgatatgctcttctgttagacattgttcagcccacttgtagaaggtccgtgtgctttaccaaaggatatggaagctacatagaagggacagggtctgtgttacagactgcagaggatgtgcaggttgagaatatctacaaatcccttaccaatttgtcacaagaagaacagataacaaagctgttaatacttaaactgcgatatttcactcctaaagaaatagcaaatctccttggatttcctccagagttcggatttcctgagaagataacagtgaaacagcgttatcgcctacttggaaatagtctcaacgtgcatgtagtagctaaactaatcaaaatcttatatgaataattttgaaataactctgaaagatggtcatatgatattccttcattttcagagagtaattctgaaattctgttttgaactaattctggtgaaatttaactaaattattttaatctgtccttattaagaaatttggattttattaaaaaaatccatgtgtttcatc

SEQ ID NO: 32803 - DNA, 1131 bp, Homo sapiens
  source 1..1131: mol_type = unassigned DNA
cgcggggatggagcccctgcgggtgctggagctatacagcggcgtgggcggcatgcaccacgcgctgagagaaagctgtatacctgcacaagtggtggctgccattgatgtcaacactgtcgctaatgaagtatacaagtataattttcctcacacacagttacttgccaagacgattgaaagacctcttgatacaaacaatagaaaattgtggctttcagtaccaagagtttctattatctccaacctctcttggcattccaaattcaaggctacgatattttcttattgcaaagcttcagtcagagccattaccctttcaagcccctggtcaggtactgatggagttccccaaaattgaatctgtacatccacaaaaatatgcaatggatgtagaaaataaaattcaagaaaagaacgttgaaccaaatattagctttgatggcagcatacagtgttctggaaaagatgccattctttttaagcttgaaactgcagaagaaattcacaggaaaaatcaacaagatagtgatctctctgtgaaaatgctaaaagattttcttgaagatgacactgacgtgaaccagtatcttttaccaccaaagtcattgctgcgatatgctcttctgttagacattgttcagcccacttgtagaaggtccgtgtgctttaccaaaggatatggaagctacatagaagggacagggtctgtgttacagactgcagaggatgtgcaggttgagaatatctacaaatcccttaccaatttgtcacaagaagaacagataacaaagctgttaatacttaaactgcgatatttcactcctaaagaaatagcaaatctccttggatttcctccagagttcggatttcctgagaagataacagtgaaacagcgttatcgcctacttggaaatagtctcaacgtgcatgtagtagctaaactaatcaaaatcttatatgaataattttgaaataactctgaaagatggtcatatgatattccttcattttcagagagtaattctgaaattctgttttgaactaattctggtgaaatttaactaaattattttaatctgtccttattaagaaatttggattttattaaaaaaatccatgtgtttcatc

SEQ ID NO: 32804 - DNA, 3527 bp, Homo sapiens
  source 1..3527: mol_type = unassigned DNA
acggaccggcaggcctagctccggggctgcggcggctgaggcgcggggatggagcccctgcgggtgctggagctatacagcggcgtgggcggcatgcaccacgcgctgagagaaagctgtatacctgcacaagtggtggctgccattgatgtcaacactgtcgctaatgaagtatacaagtataattttcctcacacacagttacttgccaagacgattgaaggcattacactcgaagagtttgacagattatcttttgatatgattttaatgagccctccctgccagccattcacaaggattggccggcagggtgatatgactgattcaaggacgaatagcttcttacatattctagatattctcccaagattacaaaaattaccaaagtatattcttttggaaaatgttaaaggttttgaagtatcttctacaagagacctcttgatacaaacaatagaaaattgtggctttcagtaccaagagtttctattatctccaacctctcttggcattccaaattcaaggctacgatattttcttattgcaaagcttcagtcagagccattaccctttcaagcccctggtcaggtactgatggagttccccaaaattgaatctgtacatccacaaaaatatgcaatggatgtagaaaataaaattcaagaaaagaacgttgaaccaaatattagctttgatggcagcatacagtgttctggaaaagatgccattctttttaagcttgaaactgcagaagaaattcacaggaaaaatcaacaagatagtgatctctctgtgaaaatgctaaaagattttcttgaagatgacactgacgtgaaccagtatcttttaccaccaaagtcattgctgcgatatgctcttctgttagacattgttcagcccacttgtagaaggtccgtgtgctttaccaaaggatatggaagctacatagaagggacagggtctgtgttacagactgcagaggatgtgcaggttgagaatatctacaaatcccttaccaatttgtcacaagaagaacagataacaaagctgttaatacttaaactgcgatatttcactcctaaagaaatagcaaatctccttggatttcctccagagttcggatttcctgagaagataacagtgaaacagcgttatcgcctacttggaaatagtctcaacgtgcatgtagtagctaaactaatcaaaatcttatatgaataattttgaaataactctgaaagatggtcatatgatattccttcattttcagagagtaattctgaaattctgttttgaactaattctggtgaaatttaactaaattattttaatctgtccttattaagaaatttggattttattaaaaaaatccatgtgtttcatcaaatttatattactgtattttataaaatacgaactattgttatgctttatggagagtatattttcatatgaaactgataaatatatatgtggaatattctttttaaaaacaattttataaacaaatcaaggagcactagagctttagtgtctacatgagtatcttgtgaagtgtcataacaggcataacatatttttatgttaattaaagaagttttttatttctaattttaaaataatgattctaattctagcccattgaatgttttacttaatttccaatcctgtaaatatttctttatttcatctaaacaaatgcatatgatatgtaaaccaaattatcatcattcagtttatacagcagactgaagaatatgtcaggaaaaataatcctaaatgtttgattacctctccatgaagcggccacagaaactgttggtgcacattatctacattttcctcagcctctatctgaaggacaaaactcatttttccttcttcattttgtatgtactttcctttagttgactattatcaaagcttgtttttgtcttctcagcttctgagttgaatttgcctttgcacgctgaggaatgtagcatgacgttaagatttcagggaggaagctgccctctgatcccatgtcatatgacagtactcccctccccccagttgttctttattgtagcaacatacactctcaatgaacttttatgacttttaactttctctgtctctcttcctcagcagacctcttggaattagggtttctaatcaaactaagtcttgcatcataaattctatggtttgtgataaaagcaagtgacaaagagaagagagatgaaaagaaacaagtccagaaatcatattacaagattttaattcaaatttttcttcttaaaaatcagctatttagaggtggataaattggaagtttgtgcattgcttgtgggaacgtaaaatggttcagctgctgttggaaaacgctatggaggttcgtcacaaaattcaacatagaattaccctatgattcagcgattccacctctggctatagatccaaaagaattgaaagcagggacttgaacagatatttgtacaccagcgtttataacaccattatttacagtagccaaaaggtagaagcagcccaagtgtcatcccattcacccatgaatggatgcaggaattgtgttccgtgcatgcagtggaatagtaccagccttccgcaggaaggaaattctgacatatgcggtgacatggatgaaccttgagtacattatgcgaagtgaaataagccaccctgtggggatggagaatgggtagttagtgcataatggatacaaagtttctgattggggtgatgagaaagttctggaggtggatggggaggatggttgcacaacagtgtgagtgtacttaatgccactgcaactgtatatttaaaaatagttaaaatgataaattttacattatgtatattttactgcaattgaaaaaatcatactctattaccaatttttcagaactcatagataaatatgaatgtagggaagctgtaagccagcccatatacagaaactatcactatctacatttttcatatgtgttcagacagagcctattacaagtctcataaatttcagtaaacaatcacaaattattttggcacactttcatgtaggttctgttcactgctgaaatattctaaataaaatggtttagagttttactgtaactatgaataattatgctataattatagtatcccacattcggttgagcaacattatacaaaataagtgtcgagttactgtgcaccaactataaatacttgaaaggtctgtagagacatttgcttacaaactggtagacagaatgtagcttagtggaattcttaaattatgggaatgtattcacaggaagacggtgattcttgcccttaattcataattgaaaatatgcagtaacaagcataaaactcacatcttaatgaagatgtatctaccagtgtcattcaattagcagatgtatatgtatgcataattaatttggaaaatgttattttatggaatgtctgctatatgcttttggtaataatgctgtatataaaatttgcactggaaattctgtttcctgata

SEQ ID NO: 32805 - DNA, 1274 bp, Homo sapiens
  source 1..1274: mol_type = unassigned DNA
cgcggggatggagcccctgcgggtgctggagctatacagcggcgtgggcggcatgcaccacgcgctgagagaaagctgtatacctgcacaagtggtggctgccattgatgtcaacactgtcgctaatgaagtatacaagtataattttcctcacacacagttacttgccaagacgattgaaggcattacactcgaagagtttgacagattatcttttgatatgattttaatgagccctccctgccagccattcacaagattacaaaaattaccaaagtatattcttttggaaaatgttaaaggttttgaagtatcttctacaagagacctcttgatacaaacaatagaaaattgtggctttcagtaccaagagtttctattatctccaacctctcttggcattccaaattcaaggctacgatattttcttattgcaaagcttcagtcagagccattaccctttcaagcccctggtcaggtactgatggagttccccaaaattgaatctgtacatccacaaaaatatgcaatggatgtagaaaataaaattcaagaaaagaacgttgaaccaaatattagctttgatggcagcatacagtgttctggaaaagatgccattctttttaagcttgaaactgcagaagaaattcacaggaaaaatcaacaagatagtgatctctctgtgaaaatgctaaaagattttcttgaagatgacactgacgtgaaccagtatcttttaccaccaaagtcattgctgcgatatgctcttctgttagacattgttcagcccacttgtagaaggtccgtgtgctttaccaaaggatatggaagctacatagaagggacagggtctgtgttacagactgcagaggatgtgcaggttgagaatatctacaaatcccttaccaatttgtcacaagaagaacagataacaaagctgttaatacttaaactgcgatatttcactcctaaagaaatagcaaatctccttggatttcctccagagttcggatttcctgagaagataacagtgaaacagcgttatcgcctacttggaaatagtctcaacgtgcatgtagtagctaaactaatcaaaatcttatatgaataattttgaaataactctgaaagatggtcatatgatattccttcattttcagagagtaattctgaaattctgttttgaactaattctggtgaaatttaactaaattattttaatctgtccttattaagaaatttggattttattaaaaaaatccatgtgtttcatc

SEQ ID NO: 32806 - DNA, 1374 bp, Homo sapiens
  source 1..1374: mol_type = unassigned DNA
attcgggaagccttattgttttccgtcctttgttcccctctagacccttgccaatccccaggccgcgaggccctctgaagccctgagcctggagcggtaggagacgggggaactgaaacgccgcggaaccagaggctgagggagcggcgcgatggagggaggaggagcgacggaccggcaggcctagctccggggctgcggcggctgaggcgcggggatggagcccctgcgggtgctggagctatacagcggcgtgggcggcatgcaccacgcgctgagagaaagctgtatacctgcacaagtggtggctgccattgatgtcaacactgtcgctaatgaagtatacaagtataattttcctcacacacagttacttgccaagacgattgaagattggccggcagggtgatatgactgattcaaggacgaatagcttcttacatattctagatattctcccaagagacctcttgatacaaacaatagaaaattgtggctttcagtaccaagagtttctattatctccaacctctcttggcattccaaattcaaggctacgatattttcttattgcaaagcttcagtcagagccattaccctttcaagcccctggtcaggtactgatggagttccccaaaattgaatctgtacatccacaaaaatatgcaatggatgtagaaaataaaattcaagaaaagaacgttgaaccaaatattagctttgatggcagcatacagtgttctggaaaagatgccattctttttaagcttgaaactgcagaagaaattcacaggaaaaatcaacaagatagtgatctctctgtgaaaatgctaaaagattttcttgaagatgacactgacgtgaaccagtatcttttaccaccaaagtcattgctgcgatatgctcttctgttagacattgttcagcccacttgtagaaggtccgtgtgctttaccaaaggatatggaagctacatagaagggacagggtctgtgttacagactgcagaggatgtgcaggttgagaatatctacaaatcccttaccaatttgtcacaagaagaacagataacaaagctgttaatacttaaactgcgatatttcactcctaaagaaatagcaaatctccttggatttcctccagagttcggatttcctgagaagataacagtgaaacagcgttatcgcctacttggaaatagtctcaacgtgcatgtagtagctaaactaatcaaaatcttatatgaataattttgaaataactctgaaagatggtcatatgatattccttcattttcagagagtaattctgaaattctgttttgaactaattctggtgaaatttaactaaattattttaatctgtccttattaa

SEQ ID NO: 32807 - DNA, 2276 bp, Homo sapiens
  source 1..2276: mol_type = unassigned DNA
gttggtgacgtcaccgcgttcaccagcccggaagtgcgcgtggcggcggtggcggctgcggcaacagcggggccgatgtgtagttggtgactgcctctccagatgctgaggtgcctgtatcattggcacaggccagtgctgaaccgtaggtggagtaggctgtgccttccgaagcagtatctattcacaatgaagttgcagtctcccgaattccagtcacttttcacagaaggactgaagagtctgacagaattatttgtcaaagagaatcacgaattaagaatagcaggaggagcagtgagggatttattaaatggagtaaagcctcaggatatagattttgccaccactgctacccctactcaaatgaaggagatgtttcagtcggctgggattcggatgataaacaacagaggagaaaagcacggaacaattactgccaggcttcatgaagaaaattttgagattactacactacggattgatgtcaccactgatggaagacatgctgaggtagaatttacaactgactggcagaaagatgcggaacgcagagatctcactataaattctatgtttttaggttttgatggcactttatttgactactttaatggttatgaagatttaaaaaataagaaagttagatttgttggacatgctaaacagagaatacaagaggattatcttagaattttaagatacttcaggttttatgggagaattgtagacaaacctggtgaccatgatcctgagactttggaagcaattgcagaaaatgcaaaaggcttggctggaatatcaggagaaaggatttgggtggaactgaaaaaaattcttgttggtaaccatgtaaatcatttgattcaccttatctatgatcttgatgtggctccttatataggtttacctgctaatgcaagtttagaagaatttgacaaagtcagtaaaaatgttgatggtttttcaccaaagccagtgactcttttggcctcattattcaaagtacaagatgatgtcacaaaattggatttgaggttgaagatcgcaaaagaggagaaaaaccttggcttatttatagttaaaaataggaaagatttaattaaagcaacagatagttcagacccattgaaaccctatcaagacttcattatagattctagggaacctgatgcaactactcgtgtatgtgaactactgaagtaccaaggagagcactgtctcctaaaggaaatgcagcagtggtccattcctccatttcctgtaagtggccatgacatcagaaaagtgggcatttcttcaggaaaagaaattggggctctattacaacagttgcgagaacagtggaaaaaaagtggttaccaaatggaaaaagatgaacttctgagttacataaagaagacctaaaactgatggctactaaaaagcagagcatttctggtaagactaaattttctcccctccctcttaatgaggttttagagactacaccagaataaaagacagtttaggggacctctgtagaacaacaagggtcttattttgtgaattatatatttcaagaactaaacagagatccacctttctggatctgatttatatcactgaaatgtacagttcttttggaatagtttcacctgagaaaacatagttggctattatctatcttaacctgttcaggcttttaaaaaaaactgtttttgcatagggtagtactaagatcttaaaaagtggtaactgtcttgaagaaaaaacgtttattgtttgtttgcaattgaaataacagggttaccttaacaatgactgtctatgatgtgtcagttcttatctgaattccaaaataaacctgtgcttaaaaaagaaataattgaccaagtaagtttgcataaaatgtgaatactaaatgtgtccccagttgctggcattcatatgtacaggatttgttctagcaagctatgcttcagtatgtggttgatatttttctgtcacaatgatttctttatgcatgcagagcctggggaagtcatgggattaacttgagggtcactattgagcctattaattaattattgttttaataaaacaaacattggtattggaagataaatatgtttatgtggtatctgacaatgtgtattaggtgtcatatacaatggtaatatgcctgtctttaaagtgttattttattaattaaaaggatatggctattattatatattctctaaagatttgagtcctaaatgctttcatcaggtaaataaaatgtataatacaaa

SEQ ID NO: 32808 - DNA, 2180 bp, Homo sapiens
  source 1..2180: mol_type = unassigned DNA
cgcgtggcggcggtggcggctgcggcaacagcggggccgatgtgtagttggtgactgcctctccagatgctgaggtgcctgtatcattggcacaggccagtgctgaaccgtaggtggagtaggctgtgccttccgaagcagtatctattcacaatgaagttgcagtctcccgaattccagtcacttttcacagaaggactgaagagtctgacagaattatttgtcaaagagaatcacgaattaagaatagcaggaggagcagtgagggatttattaaatggagtaaagcctcaggatatagattttgccaccactgctacccctactcaaatgaaggagatgtttcagtcggctgggattcggatgataaacaacagaggagaaaagcacggaacaattactgccaggcttcatgaagaaaattttgagattactacactacggattgatgtcaccactgatggaagacatgctgaggtagaatttacaactgactggcagaaagatgcggaacgcagagatctcactataaattctatgtttttaggttttgatggcactttatttgactactttaatggttatgaagatttaaaaaataagaaagttagatttgttggacatgctaaacagagaatacaagaggattatcttagaattttaagatacttcaggttttatgggagaattgtagacaaacctggtgaccatgatcctgagactttggaagcaattgcagaaaatgcaaaaggcttggctggaatatcaggagaaaggatttgggtggaactgaaaaaaattcttgttggtttacctgctaatgcaagtttagaagaatttgacaaagtcagtaaaaatgttgatggtttttcaccaaagccagtgactcttttggcctcattattcaaagtacaagatgatgtcacaaaattggatttgaggttgaagatcgcaaaagaggagaaaaaccttggcttatttatagttaaaaataggaaagatttaattaaagcaacagatagttcagacccattgaaaccctatcaagacttcattatagattctagggaacctgatgcaactactcgtgtatgtgaactactgaagtaccaaggagagcactgtctcctaaaggaaatgcagcagtggtccattcctccatttcctgtaagtggccatgacatcagaaaagtgggcatttcttcaggaaaagaaattggggctctattacaacagttgcgagaacagtggaaaaaaagtggttaccaaatggaaaaagatgaacttctgagttacataaagaagacctaaaactgatggctactaaaaagcagagcatttctggtaagactaaattttctcccctccctcttaatgaggttttagagactacaccagaataaaagacagtttaggggacctctgtagaacaacaagggtcttattttgtgaattatatatttcaagaactaaacagagatccacctttctggatctgatttatatcactgaaatgtacagttcttttggaatagtttcacctgagaaaacatagttggctattatctatcttaacctgttcaggcttttaaaaaaaactgtttttgcatagggtagtactaagatcttaaaaagtggtaactgtcttgaagaaaaaacgtttattgtttgtttgcaattgaaataacagggttaccttaacaatgactgtctatgatgtgtcagttcttatctgaattccaaaataaacctgtgcttaaaaaagaaataattgaccaagtaagtttgcataaaatgtgaatactaaatgtgtccccagttgctggcattcatatgtacaggatttgttctagcaagctatgcttcagtatgtggttgatatttttctgtcacaatgatttctttatgcatgcagagcctggggaagtcatgggattaacttgagggtcactattgagcctattaattaattattgttttaataaaacaaacattggtattggaagataaatatgtttatgtggtatctgacaatgtgtattaggtgtcatatacaatggtaatatgcctgtctttaaagtgttattttattaattaaaaggatatggctattattatatattctctaaagatttgagtcctaaatgctttcatcaggtaaataaaatgtataatacaaa

SEQ ID NO: 32809 - DNA, 976 bp, Homo sapiens
  source 1..976: mol_type = unassigned DNA
gcgcgtggcggcggtggcggctgcggcaacagcggggccgatgtgtagttggtgactgcctctccagatgctgaggtgcctgtatcattggcacaggccagtgctgaaccgtaggtggagtaggctgtgccttccgaagcagtatctattcacaatgaagttgcagtctcccgaattccagtcacttttcacagaaggactgaagagtctgacaggtataaatgctttccatgagaactgaaggaagaaggaaataggagttgcctccattgtgcacgttgcaaaacctgtctggaaggagcataggaaatggctttagctaagtgccagtagcttcttgctgttgccacagtttcattagtgttgattctcaatgttgtctgctgatgttgctaaagcagccacacagtagcattacaaagcctgtgggaattttaatagcaccttcataaatatatttagtagtatatgtagaaatatgacctatacagcactggctatctattagattcacctggggagcttttaaagcacacatgctcgggttctacctgcagcctactgaattagaatctctgggtgggatgaccatctatatttttaataaaagctccacaagttaattctgatgcacagaagatagacgaaccattactttaacatgactcaccttgtattagcttattctcaaagctactttcccattcttgaaattggatgatggctttttaggtacgtgccagagataaatggcccagaatatgttgattcttttagattgttttaggcagactttaagtagagggcttaaatgcatgtttggttttgccgatgcttcactatcttttttaattggagagagtgaaaattgctaaaaattgctgtccaatagaaatttatgagcccatatgtaatataaacttttttactaaccacattaaaaagatagaaatggtgaaataaattttaataatta

SEQ ID NO: 32810 - DNA, 1935 bp, Homo sapiens
  source 1..1935: mol_type = unassigned DNA
agagttggtggcgtgagttgctgccccttccttcctgctgtgggccagaggcgccaccgcgcccggtcctcgaggaagacgggagcgggacgtggcgagaggcctcctcagcagtgggcaaaatagccccgacgcggaggtcgtgtccccgccacgtttccggcgaccgcaggcgcggattccttggcttccctcagcactttcccctccgcgcggacggccccgagacgctttttcactgggccttgtcgccagcacccggcgtggggggtgagacgcgccttttcagggctggggttccccagagcgttttcctaagtcgaggcggaggtgcgaggaaactgagtgggtctttccgccccacgtggcctgccgggaagcgcggctcctccacccgcttccgtggaatggaatggtttttctctgcaggtttacaccggggtcactcgagagctgctgcggcctccttatgggcaggacccccgtatggggagaacgaggatgtgatatgtagaagggaaggccgcggtgtgccagaaatcagaggagattgcaagatggcaggaaaagaatcaggaaaatgggggcagcaaaactaaattcatgggaaaatacaatgtctaggagctatcccagggtcgtgaatcctcgagtgcaggtggggaagtagggtgatacccacctgtgaccatgacaagttttggagaccagaaactcggttagagtttctagaaccccgcatccctctcatactgcctgaagccctgctctggggagagtgtcatcacagtaccatgtggcatgcgagtgtcgtggtaatgctccccgaccaaaccaccaaaccgagggttgggctgcttattctcgctgcccaataatgagatgcagataaactaggaaagaaaggagtttatttctgtaaccaggtacggggcgaaggcgtggaaaatatcccagaccgactcagaattacagagctttccagagcttatataccttatgtgtagttggtgactgcctctccagatgctgaggtgcctgtatcattggcacaggccagtgctgaaccgtaggtggagtaggctgtgccttccgaagcagtatctattcacaatgaagttgcagtctcccgaattccagtcacttttcacagaaggactgaagagtctgacaggtataaatgctttccatgagaactgaaggaagaaggaaataggagttgcctccattgtgcacgttgcaaaacctgtctggaaggagcataggaaatggctttagctaagtgccagtagcttcttgctgttgccacagtttcattagtgttgattctcaatgttgtctgctgatgttgctaaagcagccacacagtagcattacaaagcctgtgggaattttaatagcaccttcataaatatatttagtagtatatgtagaaatatgacctatacagcactggctatctattagattcacctggggagcttttaaagcacacatgctcgggttctacctgcagcctactgaattagaatctctgggtgggatgaccatctatatttttaataaaagctccacaagttaattctgatgcacagaagatagacgaaccattactttaacatgactcaccttgtattagcttattctcaaagctactttcccattcttgaaattggatgatggctttttaggtacgtgccagagataaatggcccagaatatgttgattcttttagattgttttaggcagactttaagtagagggcttaaatgcatgtttggttttgccgatgcttcactatcttttttaattggagagagtgaaaattgctaaaaattgctgtccaatagaaatttatgagcccatatgtaatataaacttttttactaaccacattaaaaagatagaaatggtgaaataaattttaataatta

SEQ ID NO: 32811 - DNA, 483 bp, Homo sapiens
  source 1..483: mol_type = unassigned DNA
agagttggtggcgtgagttgctgccccttccttcctgctgtgggccagaggcgccaccgcgcccggtcctcgaggaagacgggagcgggacgtggcgagaggcctcctcagcagtgggcaaaatagccccgacgcggaggtcgtgtccccgccacgtttccggcgaccgcaggcgcggattccttggcttccctcagcactttcccctccgcgcggacggccccgagacgctttttcactgggccttgtcgccagcacccggcgtgggggatgtgtagttggtgactgcctctccagatgctgaggtgcctgtatcattggcacaggccagtgctgaaccgtaggtggagtaggctgtgccttccgaagcagtatctattcacaatgaagttgcagtctcccgaattccagtcacttttcacagaaggactgaagagtctgacagaattatttgtcaaagagaatcacgaattaagaatagca

SEQ ID NO: 32812 - DNA, 854 bp, Homo sapiens
  source 1..854: mol_type = unassigned DNA
cagcggggccggtaagcgggcgcgcgccgctcagaggggcagagttggtggcgtgagttgctgccccttccttcctgctgtgggccagaggcgccaccgcgcccggtcctcgaggaagacgggagcgggacgtggcgagaggcctcctcagcagtgggcaaaatagccccgacgcggaggtcgtgtccccgccacgtttccggcgaccgcaggcgcggattccttggcttccctcagcactttcccctccgcgcggacggccccgagacgctttttcactgggccttgtcgccagcacccggcgtggggggtacggggcgaaggcgtggaaaatatcccagaccgactcagaattacagagctttccagagcttatataccttatgtgtagttggtgactgcctctccagatgctgaggtgcctgtatcattggcacaggccagtgctgaaccgtaggtggagtaggctgtgccttccgaagcagtatctattcacaatgaagttgcagtctcccgaattccagtcacttttcacagaaggactgaagagtctgacaggtataaatgctttccatgagaactgaaggaagaaggaaataggagttgcctccattgtgcacgttgcaaaacctgtctggaaggagcataggaaatggctttagctaagtgccagtagcttcttgctgttgccacagtttcattagtgttgattctcaatgttgtctgctgatgttgctaaagcagccacacagtagcattacaaagcctgtgggaattttaatagcaccttcataaatatatttagtagtatatgtagaaatatgacctatacagcactggctatctattagatt

SEQ ID NO: 32813 - DNA, 1871 bp, Homo sapiens
  source 1..1871: mol_type = unassigned DNA
tggcggctgcggcaacagcggggccgatgtgtagttggtgactgcctctccagatgctgaggtgcctgtatcattggcacaggccagtgctgaaccgtaggtggagtaggctgtgccttccgaagcagtatctattcacaatgaagttgcagtctcccgaattccagtcacttttcacagaaggactgaagagtctgacagaattatttgtcaaagagaatcacgaattaagaatagcaggaggagcagtgagggatttattaaatggagtaaagcctcaggatatagattttgccaccactgctacccctactcaaatgaaggagatgtttcagtcggctgggattcggatgataaacaacagaggagaaaagcacggaacaattactgccaggcttcatgaagaaaattttgagattactacactacggattgatgtcaccactgatggaagacatgctgaggtagaatttacaactgactggcagaaagatgcggaacgcagagatctcactataaattctatgtttttaggttttgatggcactttatttgactactttaatggttatgaagatttaaaaaataagaaagttagatttgttggacatgctaaacagagaatacaagaggattatcttagaattttaagatacttcaggttttatgggagaattgtagacaaacctggtgaccatgatcctgagactttggaagcaattgcagaaaatgcaaaaggcttggctggaatatcaggagaaaggatttgggtggaactgaaaaaaattcttgttggtaaccatgtaaatcatttgattcaccttatctatgatcttgatgtggctccttatataggtttacctgctaatgcaagtttagaagaatttgacaaagtcagtaaaaatgttgatggtttttcaccaaagccagtgactcttttggcctcattattcaaagtacaagatgatgtcacaaaattggatttgaggttgaagatcgcaaaagaggagaaaaaccttggcttatttatagttaaaaataggaaagatttaattaaagcaacagatagttcagacccattgaaaccctatcaagacttcattatagattctagggaacctgatgcaactactcgtgtatgtgaactactgaagtaccaaggagagcactgtctcctaaaggaaatgcagcagtggtccattcctccatttcctgtaagtggccatgacatcagaaaagtgggcatttcttcaggaaaagaaattggggctctattacaacagttgcgagaacagtggaaaaaaagtggttaccaaatggaaaaagatgaacttctgagttacataaagaagacctaaaactgatggctactaaaaagcagagcatttctgccagtcataacatctttgtactctatgagcaaatagtaattttggaccttgataaaacaattttgtagagtgtaatatttctaagaggaaatgtcacaggggctatgatgcaagaaagcctcagaaatgactgcatacaggaaataatctcatcatttccaaagatgtcttcatgtcccatcaatgacatgctaccagacatatcagattccacaggataatggcaccaagctacccaagtagatgtttctggtattctagactgccgttcatgcttgtttcctaaagtatacttaaaagtttcaaatacagtttcacttagaaactgcaaccctccaagtaatgttatgtttacttaggtattaatgttatgtttacttaggtatgtatcagaggcaataatttccaaagcagatcttagaatataaccaatttgttagataactttatctctatcacatctgtttacaagcaaagtat

SEQ ID NO: 32814 - DNA, 962 bp, Homo sapiens
  source 1..962: mol_type = unassigned DNA
gcggtcgaggatcctggaggtttgtccccgccgccccgacgcttccgcccggtccgtcggcacgtcggccctgcctcccggaccaccctgcggggcgcaccagcgatctggggtgcggggctcggcctccctgcgctcctggctgaccgtgtgaccttgggtcttaaccatgaacttctctggaggagggaggcaggaagcagcagggtccaggggtagaagggctcccagaccccgagaacaggaccgagacgtgcagctgtccaaggctctgtcctatgccctgcgccatggggccttgaagctggggcttcccatgggagctgatggcttcgtgcccctgggcaccctcctgcagttgccccagttccgcggcttctctgctgaagatgtgcagcgcgtggtggacaccaataggaagcagcggttcgccctgcagctgggggatcccagcactggccttctcatccgggccaaccagggccattccctgcaggtacctaagttggagctgatgcccctggagacaccgcaggccctgcccccgatgctagtccatggtacattctggaagcactggccatccatcctactcaaaggcctgtcctgccagggaaggacgcacattcacctggccccaggactgcctggagaccccggtatcatcagtggcatgcggtcccattgtgaaatagctgtgttcatcgatggacccctggctctggcagatggaatacccttcttccgctctgccaatggggtgattctgactccagggaatactgatggcttcctccttcccaagtacttcaaggaggccctgcagctacgccctacccgaaagcccctttccttggctggtgatgaagagacagagtgtcagagtagccccaagcacagctccagagaaaggaggaggatccaacaataaaatattaatttataaaaaagaaattttaaaa

SEQ ID NO: 32815 - DNA, 1058 bp, Homo sapiens
  source 1..1058: mol_type = unassigned DNA
agtgcccgccccctttccacgcggcttttcattggcgggtccgccgcggtcgaggatcctggaggtttgtccccgccgccccgacgcttccgcccggtccgtcggcacgtcggccctgcctcccggaccaccctgcggggcgcaccagcgatctggggtgcggggctcggcctccctgcgctcctggctgaccgtgtgaccttgggtcttaaccatgaacttctctggaggagggaggcaggaagcagcagggtccaggggtagaagggctcccagaccccgagaacaggaccgagacgtgcagctgtccaaggctctgtcctatgccctgcgccatggggccttgaagctggggcttcccatgggagctgatggcttcgtgcccctgggcaccctcctgcagttgccccagttccgcggcttctctgctgaagatgtgcagcgcgtggtggacaccaataggaagcagcggttcgccctgcagctgggggatcccagcactggccttctcatccgggccaaccagggccattccctgcaggtcggggtacctaagttggagctgatgcccctggagacaccgcaggccctgcccccgatgctagtccatggtacattctggaagcactggccatccatcctactcaaaggcctgtcctgccagggaaggacgcacattcacctggccccaggactgcctggagaccccggtatcatcagtggcatgcggtcccattgtgaaatagctgtgttcatcgatggacccctggctctggcagatggaatacccttcttccgctctgccaatggggtgattctgactccagggaatactgatggcttcctccttcccaagtacttcaaggaggccctgcagctacgccctacccgaaagcccctttccttggctggtgatgaagagacagagtgtcagagtagccccaagcacagctccagagaaaggaggaggatccaacaataaaatattaatttataaaaaagaaattttaaaaagtaacaagaaagaactcgtttgaaaccatgtttcatcatcctgt

SEQ ID NO: 32816 - DNA, 865 bp, Homo sapiens
  source 1..865: mol_type = unassigned DNA
gcacgtcggccctgcctcccggaccaccctgcggggcgcaccagcgatctggggtgcggggctcggcctccctgcgctcctggctgaccgtgtgaccttgggaccgagacgtgcagctgtccaaggctctgtcctatgccctgcgccatggggccttgaagctggggcttcccatgggagctgatggcttcgtgcccctgggcaccctcctgcagttgccccagttccgcggcttctctgctgaagatgtgcagcgcgtggtggacaccaataggaagcagcggttcgccctgcagctgggggatcccagcactggccttctcatccgggccaaccagggccattccctgcaggtacctaagttggagctgatgcccctggagacaccgcaggccctgcccccgatgctagtccatggtacattctggaagcactggccatccatcctactcaaaggcctgtcctgccagggaaggacgcacattcacctggccccaggactgcctggagaccccggtatcatcagtggcatgcggtcccattgtgaaatagctgtgttcatcgatggacccctggctctggcagatggaatacccttcttccgctctgccaatggggtgattctgactccagggaatactgatggcttcctccttcccaagtacttcaaggaggccctgcagctacgccctacccgaaagcccctttccttggctggtgatgaagagacagagtgtcagagtagccccaagcacagctccagagaaaggaggaggatccaacaataaaatattaatttataaaaaagaaattttaaaaagtaacaagaaagaactcgtttgaaaccatgtttcatcatcctgta

SEQ ID NO: 32817 - DNA, 941 bp, Homo sapiens
  source 1..941: mol_type = unassigned DNA
agtgcccgccccctttccacgcggcttttcattggcgggtccgccgcggtcgaggatcctggaggtttgtccccgccgccccgacgcttccgcccggtccgtcggcacgtcggccctgcctcccggaccaccctgcggggcgcaccagcgatctggggtgcggggctcggcctccctgcgctcctggctgaccgtgtgaccttgggtcttaaccatgaacttctctggaggagggaggcaggaagcagcagggtccaggggtagaagggctcccagaccccgagaacaggaccgagacgtgcagctgtccaaggctctgtcctatgccctgcgccatggggccttgaagctggggcttcccatgggagctgatggcttcgtgcccctgggcaccctcctgcagttgccccagttccgcggcttctctgctgaagatgtgcagcgcgtggtggacaccaataggaagcagcggttcgccctgcagctgggggatcccagcactggccttctcatccgggccaaccagggccattccctgcaggtacctaagttggagctgatgcccctggagacaccgcaggccctgcccccgatgctagtccatggtacattctggaagcactggccatccatcctactcaaaggcctgtcctgccagggaaggacgcacattcacctggccccaggactgcctggagaccccggtatcatcagtggcatgcggtcccattgtgaaatagctgtgttcatcgatggacccctggctctggcaggaaagcccctttccttggctggtgatgaagagacagagtgtcagagtagccccaagcacagctccagagaaaggaggaggatccaacaataaaatattaatttataaaaaagaaattttaaaaagtaacaagaaagaactcgtttgaaaccatgtttcatcatcctgt

SEQ ID NO: 32818 - DNA, 684 bp, Homo sapiens
  source 1..684: mol_type = unassigned DNA
ggtcttaaccatgaacttctctggaggagggaggcaggaagcagcagggtccaggggtagaagggctcccagaccccgagaacaggaccgagacgtgcagctgtccaaggctctgtcctatgccctgcgccatggggccttgaagctggggcttcccatgggagctgatggcttcgtgcccctgggcaccctcctgcagttgccccagttccgcggcttctctgctgaagatgtgcagcgcgtggtggacaccaataggaagcagcggttcgccctgcagctgggggatcccagcactggccttctcatccgggccaaccagggccattccctgcaggtacctaagttggagctgatgcccctggagacaccgcaggccctgcccccgatgctagtccatggtacattctggaagcactggccatccatcctactcaaaggcctgtcctgccagggaaggacgcacattcacctggccccaggactgcctggagaccccggtatcatcagtggcatgcggtcccattgtgaaatagctgtgttcatcgatggacccctggctctggcaggaaagcccctttccttggctggtgatgaagagacagagtgtcagagtagccccaagcacagctccagagaaaggaggaggatccaacaataaaatattaatttataaaaaagaaa

SEQ ID NO: 32819 - DNA, 1960 bp, Homo sapiens
  source 1..1960: mol_type = unassigned DNA
ggaacccacaggcgcgcgcgccgctgcttctggccgggcgcgggtcgtggtgcaccacgggagcgccgcaccggccggcatggaggagcgcggcgattccgagccgacccccggctgcagcggcctgggtccgggcggtgttcgcggctttggcgacggcggtggagctccttcgtgggcccctgaggacgcctggatgggcactcaccctaagtatctagaaatgatggaattagatataggagatgccacccaagtttatgtagcgttcttggtttacctggacctcatggaaagcaaaagctggcatgaagtaaactgtgtaggattaccagaactccagctcatctgccttgttggtactgagatagaaggggaggggttacagactgtggtgcctacccccatcactgcttccctcagccataacaggataagggagatcttgaaggcatctcgaaagttgcaaggtgatccagatttgccgatgtcttttactttggccatagtggagtctgattctacaatagtctattataaacttactgatggatttatgctgccagaccctcagaatatttctcttagaagatgacatccatgtttcctgatgcttgttttattcatacaagattggatttgagacccatcagactgcttcatcttttatctcagaaatagggttgacgtacatagtgagggttgacttccccattccataaggttttcattctgaagagtaaaacttccccaggtagaagactttctccttcttaaaaaatatagggtgatttctttaaaactttgttatctagagacagtttaattacagttatatacaggtttatgcctaggatgtattcagatgggtgggacctgtgtgctgcttttgtcatcccacactcaaagttgtctctttgtttcttgctgccactgccagctcattgttgagactgccatttctttctcttactcagctctccccagtgccttttggccactgcagctaccgtagaatggcattttatatgtaccttgtcacccacttctgtttactttttcctctccagtaaaaagtaaaagatttctttcaattggtcttcccattgcagttactgttatttctcttttttggttaactttaaatcaaaactcaaaatatgttcatccagagtgtgtcttaagtaacttacgtgtcttaagtaacagggaccagagacatgttacctacaagagttctgggctatccttttcattcttatcacatatcatagcttgaatattacaacagtgtgggagagaatcaaccgtaaaaatgtcttcattaattagacccagttattccacttttgttaatgtctctcaaattgtacaaagtataaaaaattatatgcacaaagatgttccaagtgacattacttttagtagcccaaattataaaccactttaaagtttggggtaaagattggcaaactttttctataaagggccagaaagtaactattttaggtttttaaacctactgtctctgtcataacttgtcaacactgctgtatgaagcacaaaagcagccatagacaatacataaacaatacgggcgtggctttgttccagtaaaactttgtttacaaatgtggtgccatagtttgtcatccctgggtctaggaaatagtcaataaacagatatatacaaatgatacataatgtacttattaaaaattagtaatgaatattattaaaaacatgaaaatattaccttaagtaaaaattgcaagacggaaaagtgtataagtgggtgtaatcatggctgaaataacagaccaagcatatgataaaaagataacaaagtaaatcaaattactaactggttatagtgggataggaggcagaaaatggatgactttgtcttttctcaatgtttttatttgtattttataataaaaatgttttaaaattaaaa

SEQ ID NO: 32820 - DNA, 1743 bp, Homo sapiens
  source 1..1743: mol_type = unassigned DNA
accggccggcatggaggagcgcggcgattccgagccgacccccggctgcagcggcctgggtccgggcggtgttcgcggctttggcgacggcggtggagctccttcgtgggcccctgaggacgcctggatgggcactcaccctaagtatctagaaatgatggaattagatataggagatgccacccaagtttatgtagcgttcttggtttacctggacctcatggaaagcaaaagctggcatgaagtaaactgtgtaggattaccagaactccagctcatctgccttgttggtactgagatagaaggggaggggttacagactgtggtgcctacccccatcactgcttccctcagccataacagaatatttctcttagaagatgacatccatgtttcctgatgcttgttttattcatacaagattggatttgagacccatcagactgcttcatcttttatctcagaaatagggttgacgtacatagtgagggttgacttccccattccataaggttttcattctgaagagtaaaacttccccaggtagaagactttctccttcttaaaaaatatagggtgatttctttaaaactttgttatctagagacagtttaattacagttatatacaggtttatgcctaggatgtattcagatgggtgggacctgtgtgctgcttttgtcatcccacactcaaagttgtctctttgtttcttgctgccactgccagctcattgttgagactgccatttctttctcttactcagctctccccagtgccttttggccactgcagctaccgtagaatggcattttatatgtaccttgtcacccacttctgtttactttttcctctccagtaaaaagtaaaagatttctttcaattggtcttcccattgcagttactgttatttctcttttttggttaactttaaatcaaaactcaaaatatgttcatccagagtgtgtcttaagtaacttacgtgtcttaagtaacagggaccagagacatgttacctacaagagttctgggctatccttttcattcttatcacatatcatagcttgaatattacaacagtgtgggagagaatcaaccgtaaaaatgtcttcattaattagacccagttattccacttttgttaatgtctctcaaattgtacaaagtataaaaaattatatgcacaaagatgttccaagtgacattacttttagtagcccaaattataaaccactttaaagtttggggtaaagattggcaaactttttctataaagggccagaaagtaactattttaggtttttaaacctactgtctctgtcataacttgtcaacactgctgtatgaagcacaaaagcagccatagacaatacataaacaatacgggcgtggctttgttccagtaaaactttgtttacaaatgtggtgccatagtttgtcatccctgggtctaggaaatagtcaataaacagatatatacaaatgatacataatgtacttattaaaaattagtaatgaatattattaaaaacatgaaaatattaccttaagtaaaaattgcaagacggaaaagtgtataagtgggtgtaatcatggctgaaataacagaccaagcatatgataaaaagataacaaagtaaatcaaattactaactggttatagtgggataggaggcagaaaatggatgactttgtcttttctcaatgtttttatttgtattttataataaaaatgttttaaaa

SEQ ID NO: 32821 - DNA, 2381 bp, Homo sapiens
  source 1..2381: mol_type = unassigned DNA
aagaaaggtaagggccctgggcgaggaaagcgcggccctttccgagtttggtgttttgcagcgaaaggaaatctcgctcttccgaaagtcctccagggcgagagaggaaagggcctaggtactgtgctggggtcgcacagccggccgagacagtgccgggacggggagccaggcttccgagtgcgcccggtcactgactcctccgcgctttcctcgtgcgcctgcagcccttggttcttggaaacgccggcgccttgttcagggctggtggggctggggcgcaaggtgcagctgacaatgcccgagaggagccgcagcctctggtggagttcggtcgggtgtgggggtagtcaaggaaagaagcaaagggaatacctcctctgaaaaatggcagaagcagttttccatgccccaaagaggaaaagaagagtgtatgagacttacgagtctccattgccaatcccttttggtcaggaccatggtcctctgaaagaattcaagatattccgtgctgaaatgattaacaacaatgtgattgtgaggaatgcggaggacattgagcagctctatgggaaaggttattttggaaaaggtattctttcaagaagccgtccaagcttcacaatttcagatcctaaactggttgctaaatggaaagatatgaagacaaacatgcctatcatcacatcaaagaggtatcagcatagtgttgagtgggcagcagagctgatgcgtagacaggggcaggatgagagtacagtgcgcagaatcctcaaggattacacgaaaccgcttgagcatcctcctgtgaaaaggaatgaagaggctcaagtgcatgacaagcttaactctggaatggtttccaacatggaaggcacagcagggggagagagaccttctgtggtaaacggggactctggaaagtcaggtggtgtgggtgatccccgtgagccattaggctgcctgcaggagggctctggctgccacccaacaacagagagctttgagaaaagcgtgcgagaggatgcctcacctctgccccatgtctgttgctgcaaacaagatgctctcatcctccagcgtggccttcatcatgaagacggcagccagcacatcggcctcctgcatcctggggacagagggcctgaccatgagtacgtgctggtcgaggaagcggagtgtgccatgagcgagagggaggctgccccaaatgaggaattggtgcaaagaaacaggttaatatgcagaagaaatccatataggatctttgagtatttgcaactcagcctagaagaggcctttttcttggtctatgctctgggatgtttaagtatttactatgagaaggagcctttaacgatagtgaagctctggaaagctttcactgtagttcagcccacgttcagaaccacctacatggcctaccattactttcgaagcaagggctgggtgcccaaagtgggactcaagtacgggacagatttactgctatatcggaaaggccctccattttaccatgcaagttattctgtcattatcgagctagttgatgaccattttgaaggctctctccgcaggcctctcagttggaagtccctggctgccttgagcagagtttccgttaatgtctctaaggaacttatgctgtgctatttgattaaaccctctactatgactgacaaggaaatggagtcaccagaatgtatgaaaaggattaaagttcaggaggtgattctgagtcgatgggtttcttcacgagagaggagtgaccaagacgatctttaacaattcaacctcaaatttctaatttcaccaacaactatttattgagggctaggtaaaaagttctttttgttgtaatcgtccattaattcataagttttaaagggcatggtgctcccagcaccagaaaactatcagtgtttttaaagataaattacacaagggaggagaaagatccctgtgctaggactgcagattctatacttgcgttggcctctaactctccaatccagagcctcctgcctctggcgtcagtcttttccctcatccactcactggggagattggactagaggagtcctgagaggacacttccaacaagagacatttattctctgattttacctgaaaatggtagtagtttacatttatacagtacagtttatgaagcactttcatacgcaggcatctcttgttacctacatctaagctgttcccgaaagagtgttacagaacacaacagtattgtacaatattcgataagcatatcttcactgcacttgttataaaaatgagtggtgaaataatgtttggagacataatgaaagcgattaacatttggcaaaatataataaagcctttttgtaattggtgagaaa

SEQ ID NO: 32822 - DNA, 2023 bp, Homo sapiens
  source 1..2023: mol_type = unassigned DNA
tttgcggccgcactgcttgacggcagcggtgtccgccccacggccggcgttgccggggtaacggcgagcgcgtggggccaagaaagaatacctcctctgaaaaatggcagaagcagttttccatgccccaaagaggaaaagaagagtgtatgagacttacgagtctccattgccaatcccttttggtcaggaccatggtcctctgaaagaattcaagatattccgtgctgaaatgattaacaacaatgtgattgtgaggaatgcggaggacattgagcagctctatgggaaaggttattttggaaaaggtattctttcaagaagccgtccaagcttcacaatttcagatcctaaactggttgctaaatggaaagatatgaagacaaacatgcctatcatcacatcaaagaggtatcagcatagtgttgagtgggcagcagagctgatgcgtagacaggggcaggatgagagtacagtgcgcagaatcctcaaggattacacgaaaccgcttgagcatcctcctgtgaaaaggaatgaagaggctcaagtgcatgacaagcttaactctggaatggtttccaacatggaaggcacagcagggggagagagaccttctgtggtaaacggggactctggaaagtcaggtggtgtgggtgatccccgtgagccattaggctgcctgcaggagggctctggctgccacccaacaacagagagctttgagaaaagcgtgcgagaggatgcctcacctctgccccatgtctgttgctgcaaacaagatgctctcatcctccagcgtggccttcatcatgaagacggcagccagcacatcggcctcctgcatcctggggacagagggcctgaccatgagtacgtgctggtcgaggaagcggagtgtgccatgagcgagagggaggctgccccaaatgaggaagcctttttcttggtctatgctctgggatgtttaagtatttactatgagaaggagcctttaacgatagtgaagctctggaaagctttcactgtagttcagcccacgttcagaaccacctacatggcctaccattactttcgaagcaagggctgggtgcccaaagtgggactcaagtacgggacagatttactgctatatcggaaaggccctccattttaccatgcaagttattctgtcattatcgagctagttgatgaccattttgaaggctctctccgcaggcctctcagttggaagtccctggctgccttgagcagagtttccgttaatgtctctaaggaacttatgctgtgctatttgattaaaccctctactatgactgacaaggaaatggagtcaccagaatgtatgaaaaggattaaagttcaggaggtgattctgagtcgatgggtttcttcacgagagaggagtgaccaagacgatctttaacaattcaacctcaaatttctaatttcaccaacaactatttattgagggctaggtaaaaagttctttttgttgtaatcgtccattaattcataagttttaaagggcatggtgctcccagcaccagaaaactatcagtgtttttaaagataaattacacaagggaggagaaagatccctgtgctaggactgcagattctatacttgcgttggcctctaactctccaatccagagcctcctgcctctggcgtcagtcttttccctcatccactcactggggagattggactagaggagtcctgagaggacacttccaacaagagacatttattctctgattttacctgaaaatggtagtagtttacatttatacagtacagtttatgaagcactttcatacgcaggcatctcttgttacctacatctaagctgttcccgaaagagtgttacagaacacaacagtattgtacaatattcgataagcatatcttcactgcacttgttataaaaatgagtggtgaaataatgtttggagacataatgaaagcgattaacatttggcaaaatataataaagcctttttgtaattggtgagaaagtca

SEQ ID NO: 32823 - DNA, 2028 bp, Homo sapiens
  source 1..2028: mol_type = unassigned DNA
actgcttgacggcagcggtgtccgccccacggccggcgttgccggggtaacggcgagcgcgtggggccaagaaagaatacctcctctgaaaaatggcagaagcagttttccatgccccaaagaggaaaagaagagtgtatgagacttacgagtctccattgccaatcccttttggtcaggaccatggtcctctgaaagaattcaagatattccgtgctgaaatgattaacaacaatgtgattgtgaggaatgcggaggacattgagcagctctatgggaaaggttattttggaaaaggtattctttcaagaagccgtccaagcttcacaatttcagatcctaaactggttgctaaatggaaagatatgaagacaaacatgcctatcatcacatcaaagaggtatcagcatagtgttgagtgggcagcagagctgatgcgtagacaggggcaggatgagagtacagtgcgcagaatcctcaaggattacacgaaaccgcttgagcatcctcctgtgaaaaggaatgaagaggctcaagtgcatgacaagcttaactctggaatggtttccaacatggaaggcacagcagggggagagagaccttctgtggtaaacggggactctggaaagtcaggtggtgtgggtgatccccgtgagccattaggctgcctgcaggagggctctggctgccacccaacaacagagagctttgagaaaagcgtgcgagaggatgcctcacctctgccccatgtctgttgctgcaaacaagatgctctcatcctccagcgtggccttcatcatgaagacggcagccagcacatcggcctcctgcatcctggggacagagggcctgaccatgagtacgtgctggtcgaggaagcggagtgtgccatgagcgagagggaggctgccccaaatgaggaattggtgcaaagaaacaggttaatatgcagaagaaatccatataggatctttgagtatttgcaactcagcctagaagaggagcctttaacgatagtgaagctctggaaagctttcactgtagttcagcccacgttcagaaccacctacatggcctaccattactttcgaagcaagggctgggtgcccaaagtgggactcaagtacgggacagatttactgctatatcggaaaggccctccattttaccatgcaagttattctgtcattatcgagctagttgatgaccattttgaaggctctctccgcaggcctctcagttggaagtccctggctgccttgagcagagtttccgttaatgtctctaaggaacttatgctgtgctatttgattaaaccctctactatgactgacaaggaaatggagtcaccagaatgtatgaaaaggattaaagttcaggaggtgattctgagtcgatgggtttcttcacgagagaggagtgaccaagacgatctttaacaattcaacctcaaatttctaatttcaccaacaactatttattgagggctaggtaaaaagttctttttgttgtaatcgtccattaattcataagttttaaagggcatggtgctcccagcaccagaaaactatcagtgtttttaaagataaattacacaagggaggagaaagatccctgtgctaggactgcagattctatacttgcgttggcctctaactctccaatccagagcctcctgcctctggcgtcagtcttttccctcatccactcactggggagattggactagaggagtcctgagaggacacttccaacaagagacatttattctctgattttacctgaaaatggtagtagtttacatttatacagtacagtttatgaagcactttcatacgcaggcatctcttgttacctacatctaagctgttcccgaaagagtgttacagaacacaacagtattgtacaatattcgataagcatatcttcactgcacttgttataaaaatgagtggtgaaataatgtttggagacataatgaaagcgattaacatttggcaaaatataataaagcctttttgtaattgg

SEQ ID NO: 32824 - DNA, 2149 bp, Homo sapiens
  source 1..2149: mol_type = unassigned DNA
aacggcgagcgcgtggggccaagaaaggtaagggccctgggcgaggaaagcgcggccctttccgagtttggtgttttgcagcgaaaggaaatctcgctcttccgaaagtcctccagggcgagagaggaaagggcctagaatacctcctctgaaaaatggcagaagcagttttccatgccccaaagaggaaaagaagagtgtatgagacttacgagtctccattgccaatcccttttggtcaggaccatggtcctctgaaagaattcaagatattccgtgctgaaatgattaacaacaatgtgattgtgaggaatgcggaggacattgagcagctctatgggaaaggttattttggaaaaggtattctttcaagaagccgtccaagcttcacaatttcagatcctaaactggttgctaaatggaaagatatgaagacaaacatgcctatcatcacatcaaagaggtatcagcatagtgttgagtgggcagcagagctgatgcgtagacaggggcaggatgagagtacagtgcgcagaatcctcaaggattacacgaaaccgcttgagcatcctcctgtgaaaaggaatgaagaggctcaagtgcatgacaagcttaactctggaatggtttccaacatggaaggcacagcagggggagagagaccttctgtggtaaacggggactctggaaagtcaggtggtgtgggtgatccccgtgagccattaggctgcctgcaggagggctctggctgccacccaacaacagagagctttgagaaaagcgtgcgagaggatgcctcacctctgccccatgtctgttgctgcaaacaagatgctctcatcctccagcgtggccttcatcatgaagacggcagccagcacatcggcctcctgcatcctggggacagagggcctgaccatgagtacgtgctggtcgaggaagcggagtgtgccatgagcgagagggaggctgccccaaatgaggaattggtgcaaagaaacaggttaatatgcagaagaaatccatataggatctttgagtatttgcaactcagcctagaagaggcctttttcttggtctatgctctgggatgtttaagtatttactatgagaaggagcctttaacgatagtgaagctctggaaagctttcactgtagttcagcccacgttcagaaccacctacatggcctaccattactttcgaagcaagggctgggtgcccaaagtgggactcaagtacgggacagatttactgctatatcggaaaggccctccattttaccatgcaagttattctgtcattatcgagctagttgatgaccattttgaaggctctctccgcaggcctctcagttggaagtccctggctgccttgagcagagtttccgttaatgtctctaaggaacttatgctgtgctatttgattaaaccctctactatgactgacaaggaaatggagtcaccagaatgtatgaaaaggattaaagttcaggaggtgattctgagtcgatgggtttcttcacgagagaggagtgaccaagacgatctttaacaattcaacctcaaatttctaatttcaccaacaactatttattgagggctaggtaaaaagttctttttgttgtaatcgtccattaattcataagttttaaagggcatggtgctcccagcaccagaaaactatcagtgtttttaaagataaattacacaagggaggagaaagatccctgtgctaggactgcagattctatacttgcgttggcctctaactctccaatccagagcctcctgcctctggcgtcagtcttttccctcatccactcactggggagattggactagaggagtcctgagaggacacttccaacaagagacatttattctctgattttacctgaaaatggtagtagtttacatttatacagtacagtttatgaagcactttcatacgcaggcatctcttgttacctacatctaagctgttcccgaaagagtgttacagaacacaacagtattgtacaatattcgataagcatatcttcactgcacttgttataaaaatgagtggtgaaataatgtttggagacataatgaaagcgattaacatttggcaaaatataataaagcctttttgtaattggtgagaaa

SEQ ID NO: 32825 - DNA, 2279 bp, Homo sapiens
  source 1..2279: mol_type = unassigned DNA
aaagaatacctcctctgaaaaatggcagaagcagttttccatgccccaaagaggaaaagaagagtgtatgagacttacgagtctccattgccaatcccttttggtcaggaccatggtcctctgaaagaattcaagatattccgtgctgaaatgattaacaacaatgtgattgtgaggaatgcggaggacattgagcagctctatgggaaaggttattttggaaaaggtattctttcaagaagccgtccaagcttcacaatttcagatcctaaactggttgctaaatggaaagatatgaagacaaacatgcctatcatcacatcaaagaggtatcagcatagtgttgagtgggcagcagagctgatgcgtagacaggggcaggatgagagtacagtgcgcagaatcctcaaggattacacgaaaccgcttgagcatcctcctgtgaaaaggaatgaagaggctcaagtgcatgacaagcttaactctggaatggtttccaacatggaaggcacagcagggggagagagaccttctgtggtaaacggggactctggaaagtcaggtggtgtgggtgatccccgtgagccattaggctgcctgcaggagggctctggctgccacccaacaacagagagctttgagaaaagcgtgcgagaggatgcctcacctctgccccatgtctgttgctgcaaacaagatgctctcatcctccagcgtggccttcatcatgaagacggcagccagcacatcggcctcctgcatcctggggacagagggcctgaccatgagtacgtgctggtcgaggaagcggagtgtgccatgagcgagagggaggctgccccaaatgaggaagcctttttcttggtctatgctctgggatgtttaagtatttactatgagaaggagcctttaacgatagtgaagctctggaaagctttcactgtagttcagcccacgttcagaaccacctacatggcctaccattactttcgaagcaagggctgggtgcccaaagtgggactcaagtacgggacagatttactgctatatcggaaaggccctccattttaccatgcaagttattctgtcattatcgagctagttgatgaccattttgaaggctctctccgcaggcctctcagttggaagtccctggctgccttgagcagagtttccgttaatgtctctaaggaacttatgctgtgctatttgattaaaccctctactatgactgacaaggaaatggagtcaccagaatgtatgaaaaggattaaagttcaggaggtgattctgagtcgatgggtttcttcacgagagaggagtgaccaagacgatctttaacaattcaacctcaaatttctaatttcaccaacaactatttattgagggctaggtaaaaagttctttttgttgtaatcgtccattaattcataagttttaaagggcatggtgctcccagcaccagaaaactatcagtgtttttaaagataaattacacaagggaggagaaagatccctgtgctaggactgcagattctatacttgcgttggcctctaactctccaatccagagcctcctgcctctggcgtcagtcttttccctcatccactcactggggagattggactagaggagtcctgagaggacacttccaacaagagacatttattctctgattttacctgaaaatggtagtagtttacatttatacagtacagtttatgaagcactttcatacgcaggcatctcttgttacctacatctaagctgttcccgaaagagtgttacagaacacaacagtattgtacaatattcgataagcatatcttcactgcacttgttataaaaatgagtggtgaaataatgtttggagacataatgaaagcgattaacatttggcaaaatataataaagcctttttgtaattggtgagaaagtcatgaagacttaagttgcctcagggcatctggtggcaagaggagggagatgggtggctgggcatggtggcccatacctataatcccagcacttgggaggccttgggaggccaaggcgcatggatcgcttgagcccaggagttggagaccagcttgggcaacatggtgaaacctcctctctactaacaaaaattatccaagcattgtagcacatgcctgtaattccagctgctcaggagactaaggtaggaggatcgcttgagcccaggaggaagaggttgcagtgagcggagattgtgccactgcaatccagcctgagcaatagagcaaggtcctgtctc

SEQ ID NO: 32826 - DNA, 2697 bp, Homo sapiens
  source 1..2697: mol_type = unassigned DNA
aagaaaggtaagggccctgggcgaggaaagcgcggccctttccgagtttggtgttttgcagcgaaaggaaatctcgctcttccgaaagtcctccagggcgagagaggaaagggcctaggtactgtgctggggtcgcacagccggccgagacagtgccgggacggggagccaggcttccgagtgcgcccggtcactgactcctccgcgctttcctcgtgcgcctgcagcccttggttcttggaaacgccggcgccttgttcagggctggtggggctggggcgcaaggtgcagctgacaatgcccgagaggagccgcagcctctggtggagttcggtcgggtgtgggggtagtcaaggaaagaagcaaagggaatacctcctctgaaaaatggcagaagcagttttccatgccccaaagaggaaaagaagagtgtatgagacttacgagtctccattgccaatcccttttggtcaggaccatggtcctctgaaagaattcaagatattccgtgctgaaatgattaacaacaatgtgattgtgaggaatgcggaggacattgagcagctctatgggaaaggttattttggaaaaggtattctttcaagaagccgtccaagcttcacaatttcagatcctaaactggttgctaaatggaaagatatgaagacaaacatgcctatcatcacatcaaagaggtatcagcatagtgttgagtgggcagcagagctgatgcgtagacaggggcaggatgagagtacagtgcgcagaatcctcaaggattacacgaaaccgcttgagcatcctcctgtgaaaaggaatgaagaggctcaagtgcatgacaagcttaactctggaatggtttccaacatggaaggcacagcagggggagagagaccttctgtggtaaacggggactctggaaagtcaggtggtgtgggtgatccccgtgagccattaggctgcctgcaggagggctctggctgccacccaacaacagagagctttgagaaaagcgtgcgagaggatgcctcacctctgccccatgtctgttgctgcaaacaagatgctctcatcctccagcgtggccttcatcatgaagacggcagccagcacatcggcctcctgcatcctggggacagagggcctgaccatgagtacgtgctggtcgaggaagcggagtgtgccatgagcgagagggaggctgccccaaatgaggaagcctttttcttggtctatgctctgggatgtttaagtatttactatgagaaggagcctttaacgatagtgaagctctggaaagctttcactgtagttcagcccacgttcagaaccacctacatggcctaccattactttcgaagcaagggctgggtgcccaaagtgggactcaagtacgggacagatttactgctatatcggaaaggccctccattttaccatgcaagttattctgtcattatcgagctagttgatgaccattttgaaggctctctccgcaggcctctcagttggaagtccctggctgccttgagcagagtttccgttaatgtctctaaggtaacacaacatcagctttgccattggagtgtcacttaaatggttcagtttttttttttttcttaaatgtagtagaatcaaaaaagttagttgtagaaacttcataacattcctgccagtgacatgctggaagatttggggtcattcgtacccttcccttattgcgctagaagttgtcctcccctcatgttacattttattgtcccctccctcccaactgctgctgagctccaatgacggagctttggagtgtcccatggtgatctgatctgggtaggcattgcttctcttcccaggggtatcgttgctatgtgacttgttttatactgcaatttaacattcactcatacacatattcacaaaggagtcaaaacattgaaagtttgcagatctcttagagaggaagggacttgatatttgttgctaagcactttcccaccctgttgttatcctcatcctgaggatgagaaaccaaggttggagccgttgagtggctaatccaagatcacacagctcatgtgcatactcgggatccaaacccacagctctctggctccctggcttttgtttcactatatccttcgtgttgccatcagagataggagggactcagcttacacaaggactatcaagaaagaaagctgtgtgtgttctcattactcagtgatttgctggctgaaaacaaattgtagataccctctaatttcatcctcatgctgctggaggtgaggtggggctgaggccagagggtcttgcagggctagagatgactgccctttagagcaggttaggttgcctaggctttagcttggtcctatagaaaattagggagcctatactgtttctagaatttttatgcccattttaggggacttgtagcatatacttaatatgtcctcacttaacattgttgatatgttcttggaaactgcaactttaatgtcgtataacaaaaccgttttttcttctcatcatttcaagaaaacaatgttgaagtttatttgaagacctgctgtacatctgtattagtccattctcatgctgctataaagaaatacttgagactgggtaatttataatgaaaagaggtttaattgactcacagttccatgtggctggggaggcctcaggaaacttaca

SEQ ID NO: 32827 - DNA, 1239 bp, Homo sapiens
  source 1..1239: mol_type = unassigned DNA
tttgcggccgcactgcttgacggcagcggtgtccgccccacggccggcgttgccggggtaacggcgagcgcgtggggccaagaaagaatacctcctctgaaaaatggcagaagcagttttccatgccccaaagaggaaaagaagagtgtatgagacttacgagtctccattgccaatcccttttggtcaggaccatggtcctctgaaagaattcaagatattccgtgctgaaatgattaacaacaatgtgattgtgaggaatgcggaggacattgagcagctctatgggaaaggttattttggaaaaggtattctttcaagaagccgtccaagcttcacaatttcagatcctaaactggttgctaaatggaaagatatgaagacaaacatgcctatcatcacatcaaagaggtatcagcatagtgttgagtgggcagcagagctgatgcgtagacaggggcaggatgagagtacagtgcgcagaatcctcaaggattacacgaaaccgcttgagcatcctcctgtgaaaaggaatgaagaggctcaagtgcatgacaagcttaactctggaatggtttccaacatggaaggcacagcagggggagagagaccttctgtggtaaacggggactctggaaagtcaggtggtgtgggtgatccccgtgagccattaggctgcctgcaggagggctctggctgccacccaacaacagagagctttgagaaaagcgtgcgagaggatgcctcacctctgccccatgtctgttgctgcaaacaagatgctctcatcctccagcgtggccttcatcatgaagacggcagccagcacatcggcctcctgcatcctggggacagagggcctgaccatgagtacgtgctggtcgaggaagcggagtgtgccatgagcgagagggaggctgccccaaatgaggaattggtgcaaagaaacaggttaatatgcagaagaaatccatataggatctttgagtatttgcaactcagcctagaagaggcctttttcttggtctatgctctgggatgtttaagtatttactatgagaaggagcctttaacgatagtgaagctctggaaagctttcactgtagttcagcccacgttcagaaccacctacatggcctaccattactttcgaagcaagggctgggtgcccaaagtgggactcaagtacgggacagatttactgctatatcggaaaggccctccattttaccatgcaag

SEQ ID NO: 32828 - DNA, 1712 bp, Homo sapiens
  source 1..1712: mol_type = unassigned DNA
agtttggtgttttgcagcgaaaggaaatctcgctcttccgaaagtcctccagggcgagagaggaaagggcctaggtactgtgctggggtcgcacagccggccgagacagtgccgggacggggagccaggcttccgagtgcgcccggtcactgactcctccgcgctttcctcgtgcgcctgcagcccttggttcttggaaacgccggcgccttgttcagggctggtggggctggggcgcaaggtgcagctgacaatgcccgagaggagccgcagcctctggtggagttcggtcgggtgtgggggtagtcaaggaaagaagcaaagggaatacctcctctgaaaaatggcagaagcagttttccatgccccaaagaggaaaagaagagtgtatgagacttacgagtctccattgccaatcccttttggtcaggaccatggtcctctgaaagaattcaagatattccgtgctgaaatgattaacaacaatgtgattgtgaggaatgcggaggacattgagcagctctatgggaaagatatgaagacaaacatgcctatcatcacatcaaagaggtatcagcatagtgttgagtgggcagcagagctgatgcgtagacaggggcaggatgagagtacagtgcgcagaatcctcaaggattacacgaaaccgcttgagcatcctcctgtgaaaaggaatgaagaggctcaagtgcatgacaagcttaactctggaatggtttccaacatggaaggcacagcagggggagagagaccttctgtggtaaacggggactctggaaagtcaggtggtgtgggtgatccccgtgagccattaggctgcctgcaggagggctctggctgccacccaacaacagagagctttgagaaaagcgtgcgagaggatgcctcacctctgccccatgtctgttgctgcaaacaagatgctctcatcctccagcgtggccttcatcatgaagacggcagccagcacatcggcctcctgcatcctggggacagagggcctgaccatgagtacgtgctggtcgaggaagcggagtgtgccatgagcgagagggaggctgccccaaatgaggaattggtgcaaagaaacaggttaatatgcagaagaaatccatataggatctttgagtatttgcaactcagcctagaagaggcctttttcttggtctatgctctgggatgtttaagtatttactatgagaaggagcctttaacgatagtgaagctctggaaagctttcactgtagttcagcccacgttcagaaccacctacatggcctaccattactttcgaagcaagggctgggtgcccaaagtgggactcaagtacgggacagatttactgctatatcggaaaggccctccattttaccatgcaagttattctgtcattatcgagctagttgatgaccattttgaaggctctctccgcaggcctctcagttggaagtccctggctgccttgagcagagtttccgttaatgtctctaaggaacttatgctgtgctatttgattaaaccctctactatgactgacaaggaaatggagtcaccagaatgtatgaaaaggattaaagttcaggaggtgattctgagtcgatgggtttcttcacgagagaggagtgaccaagacgatctttaacaattcaacctcaaatttctaatttcaccaacaactatttattgagggctag

SEQ ID NO: 32829 - DNA, 1909 bp, Homo sapiens
  source 1..1909: mol_type = unassigned DNA
actgcttgacggcagcggtgtccgccccacggccggcgttgccggggtaacggcgagcgcgtggggccaagaaagaatacctcctctgaaaaatggcagaagcagttttccatgccccaaagaggaaaagaagagtgtatgagacttacgagtctccattgccaatcccttttggtcaggaccatggtcctctgaaagaattcaagatattccgtgctgaaatgattaacaacaatgtgattgtgaggaatgcggaggacattgagcagctctatgggaaaggttattttggaaaaggtattctttcaagaagccgtccaagcttcacaatttcagatcctaaactggttgctaaatggaaagatatgaagacaaacatgcctatcatcacatcaaagaggtatcagcatagtgttgagtgggcagcagagctgatgcgtagacaggggcaggatgagagtacagtgcgcagaatcctcaaggattacacgaaaccgcttgagcatcctcctgtgaaaaggaatgaagaggctcaagtgcatgacaagcttaactctggaatggtttccaacatggaaggcacagcagggggagagagaccttctgtgcgtggccttcatcatgaagacggcagccagcacatcggcctcctgcatcctggggacagagggcctgaccatgagtacgtgctggtcgaggaagcggagtgtgccatgagcgagagggaggctgccccaaatgaggaattggtgcaaagaaacaggttaatatgcagaagaaatccatataggatctttgagtatttgcaactcagcctagaagaggcctttttcttggtctatgctctgggatgtttaagtatttactatgagaaggagcctttaacgatagtgaagctctggaaagctttcactgtagttcagcccacgttcagaaccacctacatggcctaccattactttcgaagcaagggctgggtgcccaaagtgggactcaagtacgggacagatttactgctatatcggaaaggccctccattttaccatgcaagttattctgtcattatcgagctagttgatgaccattttgaaggctctctccgcaggcctctcagttggaagtccctggctgccttgagcagagtttccgttaatgtctctaaggaacttatgctgtgctatttgattaaaccctctactatgactgacaaggaaatggagtcaccagaatgtatgaaaaggattaaagttcaggaggtgattctgagtcgatgggtttcttcacgagagaggagtgaccaagacgatctttaacaattcaacctcaaatttctaatttcaccaacaactatttattgagggctaggtaaaaagttctttttgttgtaatcgtccattaattcataagttttaaagggcatggtgctcccagcaccagaaaactatcagtgtttttaaagataaattacacaagggaggagaaagatccctgtgctaggactgcagattctatacttgcgttggcctctaactctccaatccagagcctcctgcctctggcgtcagtcttttccctcatccactcactggggagattggactagaggagtcctgagaggacacttccaacaagagacatttattctctgattttacctgaaaatggtagtagtttacatttatacagtacagtttatgaagcactttcatacgcaggcatctcttgttacctacatctaagctgttcccgaaagagtgttacagaacacaacagtattgtacaatattcgataagcatatcttcactgcacttgttataaaaatgagtggtgaaataatgtttggagacataatgaaagcgattaacatttggcaaaatataataaagcctttttgtaattggtgagaaa

SEQ ID NO: 32830 - DNA, 1424 bp, Homo sapiens
  source 1..1424: mol_type = unassigned DNA
tgacgaagttgacgagggtgtcggcatgagggggtggagcaaggagcgcgtggcgcggtgcgcagtgggtggctccacctcgactgcgaattactgtttatgaggtgactcgctggttctatcggtggacagtgggacattctgaagggaggcaaggaggcggactgagcgctcccaattggggaggatgctggtggtggaggtggcgaacggccgctccctggtgtggggagccgaggcggtgcaggccctccgggagcgcctgggtgtggggggccgcacggtaggcgccctgccccgcgggccccgccagaactcgcgcctgggcctcccgctgctgctgatgcccgaagaggcgcggctcttggccgagatcggcgccgtgactctggtcagcgccccgcgtccagactctcggcaccacagcctggccctgacatccttcaagcgccagcaagaggagagcttccaggagcagagcgccttggcagctgaggcccgggagacccgtcgtcaggagctcctggagaagattacggagggccaggctgctaagaagcagaaactagaacaggcttcaggggccagctcaagccaggaggccggctcgagccaggctgccaaagaggatgagaccagtgatggccaggcttcgggagagcaggaggaagctggcccctcgtcttcccaagcaggaccctcaaatggggtagcccccttgcccagatctgctctccttgtccagctggccactgccaggcctcgaccggtcaaggccaggcccctggactggcgtgtccagtctaaagactggccccacgccggccgccctgcccacgagctgcgctacagtatctacagagacctgtgggagcgaggcttcttcctcagtgcggctggcaagttcggaggtgacttcctggtctatcctggtgaccccctccgcttccacgcccattatatcgctcagtgctgggcccccgaggacaccatcccactccaagacctggttgctgctgggcgccttggaaccagcgtcagaaagaccctgctcctctgttctccgcagcctgatggtaaggtggtctacacctccctgcaatgggccagcctgcagtgaactccagagacctaggggatgtggctgtgtcggcagcaagagcctttctggatgttccccagctcttctctgggagtctagaacatcctcctacctttctccgcggttagtttttgattccaggttttcgaacactacatcttttttatgttcttccttgtttcaaagcacttattggctgtgtttttgtagttacctattttcacactgtgagcttcccgagaatggggcctgggtttgattcatctgttttctacagggtttaagtctcaggaggtctcaataaacttggtatataaatgtt

SEQ ID NO: 32831 - DNA, 1548 bp, Homo sapiens
  source 1..1548: mol_type = unassigned DNA
cgaggacgcccgaacgccgaacttcctgtgctcgggagggggcagggttttgtactgtgggagtctgagagcgaggaggtccgaaagccgaatcacagtcgttcggaaagaggaggagcgaaggctcgagcgtccggaagagggtgtggcctcggcggtgccttagcctccagagcttctgaccgctgacgggaacacccgaagggggacgcccactttgcaagagggtggtgccaaaatggacctttgtaagggggcgtgtcgccgcgcttgcggaggtttgtttttcacgctccaaggcgcaatggaggatgctggtggtggaggtggcgaacggccgctccctggtgtggggagccgaggcggtgcaggccctccgggagcgcctgggtgtggggggccgcacggtaggcgccctgccccgcgggccccgccagaactcgcgcctgggcctcccgctgctgctgatgcccgaagaggcgcggctcttggccgagatcggcgccgtgactctggtcagcgccccgcgtccagactctcggcaccacagcctggccctgacatccttcaagcgccagcaagaggagagcttccaggagcagagcgccttggcagctgaggcccgggagacccgtcgtcaggagctcctggagaagattacggagggccaggctgctaagaagcagaaactagaacaggcttcaggggccagctcaagccaggaggccggctcgagccaggctgccaaagaggatgagaccagtgatggccaggcttcgggagagcaggaggaagctggcccctcgtcttcccaagcaggaccctcaaatggggtagcccccttgcccagatctgctctccttgtccagctggccactgccaggcctcgaccggtcaaggccaggcccctggactggcgtgtccagtctaaagactggccccacgccggccgccctgcccacgagctgcgctacagtatctacagagacctgtgggagcgaggcttcttcctcagtgcggctggcaagttcggaggtgacttcctggtctatcctggtgaccccctccgcttccacgcccattatatcgctcagtgctgggcccccgaggacaccatcccactccaagacctggttgctgctgggcgccttggaaccagcgtcagaaagaccctgctcctctgttctccgcagcctgatggtaaggtggtctacacctccctgcaatgggccagcctgcagtgaactccagagacctaggggatgtggctgtgtcggcagcaagagcctttctggatgttccccagctcttctctgggagtctagaacatcctcctacctttctccgcggttagtttttgattccaggttttcgaacactacatcttttttatgttcttccttgtttcaaagcacttattggctgtgtttttgtagttacctattttcacactgtgagcttcccgagaatggggcctgggtttgattcatctgttttctacagggtttaagtctcaggaggtctcaataaacttggtatataaatgtt

SEQ ID NO: 32832 - DNA, 1349 bp, Homo sapiens
  source 1..1349: mol_type = unassigned DNA
gaggcctaggggcggggcttcgccgagaccccggaggctttgggtgcgctgcagcggtctgcggcgcgcagctgtttcggtaactgctttgcctcccggctcccgcaggaggatgctggtggtggaggtggcgaacggccgctccctggtgtggggagccgaggcggtgcaggccctccgggagcgcctgggtgtggggggccgcacggtaggcgccctgccccgcgggccccgccagaactcgcgcctgggcctcccgctgctgctgatgcccgaagaggcgcggctcttggccgagatcggcgccgtgactctggtcagcgccccgcgtccagactctcggcaccacagcctggccctgacatccttcaagcgccagcaagaggagagcttccaggagcagagcgccttggcagctgaggcccgggagacccgtcgtcaggagctcctggagaagattacggagggccaggctgctaagaagcagaaactagaacaggcttcaggggccagctcaagccaggaggccggctcgagccaggctgccaaagaggatgagaccagtgatggccaggcttcgggagagcaggaggaagctggcccctcgtcttcccaagcaggaccctcaaatggggtagcccccttgcccagatctgctctccttgtccagctggccactgccaggcctcgaccggtcaaggccaggcccctggactggcgtgtccagtctaaagactggccccacgccggccgccctgcccacgagctgcgctacagtatctacagagacctgtgggagcgaggcttcttcctcagtgcggctggcaagttcggaggtgacttcctggtctatcctggtgaccccctccgcttccacgcccattatatcgctcagtgctgggcccccgaggacaccatcccactccaagacctggttgctgctgggcgccttggaaccagcgtcagaaagaccctgctcctctgttctccgcagcctgatggtaaggtggtctacacctccctgcaatgggccagcctgcagtgaactccagagacctaggggatgtggctgtgtcggcagcaagagcctttctggatgttccccagctcttctctgggagtctagaacatcctcctacctttctccgcggttagtttttgattccaggttttcgaacactacatcttttttatgttcttccttgtttcaaagcacttattggctgtgtttttgtagttacctattttcacactgtgagcttcccgagaatggggcctgggtttgattcatctgttttctacagggtttaagtctcaggaggtctcaataaacttggtatataaatgtt

SEQ ID NO: 32833 - DNA, 1087 bp, Homo sapiens
  source 1..1087: mol_type = unassigned DNA
gtcggcatgagggggtggagcaaggagcgcgtggcgcggtgcgcagtgggtggctccacctcgactgcgaattactgtttatgaggaggatgctggtggtggaggtggcgaacggccgctccctggtgtggggagccgaggcggtgcaggccctccgggagcgcctgggtgtggggggccgcacggtaggcgccctgccccgcgggccccgccagaactcgcgcctgggcctcccgctgctgctgatgcccgaagaggcgcggctcttggccgagatcggcgccgtgactctggtcagcgccccgcgtccagactctcggcaccacagcctggccctgacatccttcaagcgccagcaagaggagagcttccaggagcagagcgccttggcagctgaggcccgggagacccgtcgtcaggagctcctggagaagattacggagggccaggctgctaagaagcagaaactagaacaggcttcaggggccagctcaagccaggaggccggctcgagccaggctgccaaagaggatgagaccagtgatggccaggcttcgggagagcaggaggaagctggcccctcgtcttcccaagcaggaccctcaaatggggtagcccccttgcccagatctgctctccttgtccagctggccactgccaggcctcgaccggtcaaggccaggcccctggactggcgtgtccagtctaaagactggccccacgccggccgccctgcccacgagctgcgctacagtatctacagagacctgtgggagcgaggcttcttcctcagtgcggctggcaagttcggaggtgacttcctggtctatcctggtgaccccctccgcttccacgcccattatatcgctcagtgctgggcccccgaggacaccatcccactccaagacctggttgctgctgggcgccttggaaccagcgtcagaaagaccctgctcctctgttctccgcagcctgatgggtttaagtctcaggaggtctcaataaacttggtatataaatgttcatgatttgaatgtttgcgacagtcctggaacccgtggatggtctcatctgcatgtacaggtga

SEQ ID NO: 32834 - DNA, 956 bp, Homo sapiens
  source 1..956: mol_type = unassigned DNA
cacaagcttcggtttacttcgtagatagttgggtacaagtgacgctaggatgataggcggagtcaacaggttcgccagatacccatgagtatttacaagggggcggggcgaaagcgacttgccctcaaaggggcggaaccccgagggccggcgtgcgcctacgggaccgggccagggtgacgatcctcaagttcccaagtagaggagaggaagcggcagagggaggaggatgctggtggtggaggtggcgaacggccgctccctggtgtggggagccgaggcggtgcaggccctccgggagcgcctgggtgtggggggccgcacggtaggcgccctgccccgcgggccccgccagaactcgcgcctgggcctcccgctgctgctgatgcccgaagaggcgcggctcttggccgagatcggcgccgtgactctggtcagcgccccgcgtccagactctcggcaccacagcctggccctgacatccttcaagcgccagcaagaggagagcttccaggagcagagcgccttggcagctgaggcccgggagacccgtcgtcaggagctcctggagaagattacggagggccaggctgctaagaagcagaaactagaacaggcttcaggggccagctcaagccaggaggccggctcgagccaggctgccaaagaggatgagaccagtgatggccaggcttcgggagagcaggaggaagctggcccctcgtcttcccaagcaggaccctcaaatggggtagcccccttgcccagatctgctctccttgtccagctggccactgccaggcctcgaccggtcaaggccaggcccctggactggcgtgtccagtctaaagactggccccacgccggccgccctgcccacgagctgcgctacagtatctacagagacctgtgggagcgaggcttcttcctcagtgcggctggcaagttcggaggtg

SEQ ID NO: 32835 - DNA, 1941 bp, Homo sapiens
  source 1..1941: mol_type = unassigned DNA
gtggcggcgcgcgcagcggcaggcggcggcgggatggagcccgagcccgagcccgcggccgtggaggttcccgcggggcgcgtgctcagcgcccgggagctcttcgccgcccgctcgcggtcgcagaagctgccccagcgctcgcatggccccaaggactttctgcccgacggctcggcagctcaggccgagcggctgcgccggtgccgggaagagctctggcagctgctggcagagcagcgcgtggagcgcctgggcagcttggtggctgccgagtggaggccagaagagggcttcgtggagttgaagtctcccgcgggcaaattctggcagaccatgggcttctcagagcagggccggcagcgccttcacccggaagaggccttgtatcttctggagtgtggctccatccacctcttccaccaagacctgccactgtctatccaggaagcttaccagctgctgctgaccgaccacactgtgaccttcctgcagtaccaggtcttcagccacctgaagaggttgggttatgtggttcgacgattccaaccaagctctgtcctgtccccgtatgagaggcagcttaacctggatgccagcgtgcagcacttggaggatggagatggcaagagaaagaggagcagctccagccctcggtccattaataagaaggccaaggccctggacaactccctgcaacccaagagtctggcagcctccagcccacctccctgcagccagcccagccaatgcccagaggagaaaccccaggagtcaagccccatgaagggcccagggggcccctttcagcttctggggtccctgggccccagccctggcccggccagggagggggtggggtgcagctgggagagtggcagagccgagaacggagtcacgggagccggtaagcggcgctggaacttcgagcagatctccttccccaacatggcttcagacagccgccacacccttctgcgcgccccagccccagagctgctcccggccaacgtggctgggcgggagacagacgctgagtcctggtgccagaagctgaaccagcgcaaggagaagctctccaggcgggaacgggagcaccacgcggaggccgcgcagttccaggaagatgtcaacgccgatcccgaggtgcagcggtgctccagctggcgggagtacaaggagctgctgcagcggcggcaggtgcagaggagccagcgccgggcccctcacctgtggggccagcccgtcaccccgctgctgagtcctggccaggccagctccccagccgtggtccttcagcatatctctgtgctgcagacaacacaccttcctgatggaggtgcccggctgttggagaagtctgggggcttggaaatcatctttgatgtttaccaggccgacgctgtggccacattccgaaagaataaccctggcaaaccctatgcccggatgtgcattagtggatttgatgagcctgtcccagacctctgcagcctcaagcggttgtcttaccagagtggggatgtccctctgatctttgccctggtggatcatggtgacatctccttctacagcttcagggacttcacgttgccccaggatgtggggcactgacctcacagctctgcagaggatggagcttgctccgggggaccgggactgtctgttctcagggaccatctcggctgcctcctgtacccagactctaacctgtagcttcagaggccagtctgggccttggccctgggtgtctgatactcacagagtgaaactgtgaccctctcccttccctgctgccttgcagtgacccctctggaactcaggactcgattttaaggacccaggaggtggggcagaagagaggactgtgtgcctttaacgagagggtgcctgcttcgtgctataaagccaaagccattaaaaatagatttcttttctgct

SEQ ID NO: 32836 - DNA, 1682 bp, Homo sapiens
  source 1..1682: mol_type = unassigned DNA
gaaacggaggggcggggggcgcgggggcagaggtgacctggggctctggacttagacccaagggctagacaccccgggtctgactggtgggagagaagacgtaatgtgaagggggttggcaaccaagacgcgggaccccacttgcagtaccccccgtctgcggccggcgtcgcccacccgcagccgccggccgggcaatggcaccacctagcggacggcaccagtgcggggaccccagcctcgaggaggcgctcgtgccgggcggaggtggcgcttcagcaccgtcgtgggccggacagcgcctcccgcccccggccctcgaaacctggcttcggagcccagccgtagggaccggacggaagacaccgaaggaatggcgaacctccccggaccgctcctgacagttcccgggtggccttcggcctgcaaagtcggaatttgcacaccctccgctcgtccttccctgagcccttctgccctccttgcccagcccgggcggtggggactaagcagcgcgaggctgcagaggggcggtcacaagtgtgaccattcgcactgcactccagacgccggctcctcaggctttactggagagaagccccgaggagggctaggggcaaaagaggggccttctgcatctccagcaacctgcgggctgagctcccagacccggcgtcgggcgcccgggagctcttcgccgcccgctcgcggtcgcagaagctgccccagcgctcgcatggccccaaggactttctgcccgacggctcggcagctcaggccgagcggctgcgccggtgccgggaagagctctggcagctgctggcagagcagcgcgtggagcgcctgggcagcttggtggctgccgagtggaggccagaagagggcttcgtggagttgaagtctcccgcgggcaaattctggcagaccatgggcttctcagagcagggccggcagcgccttcacccggaagaggccttgtatcttctggagtgtggctccatccacctcttccaccaagacctgccactgtctatccaggaagcttaccagctgctgctgaccgaccacactgtgaccttcctgcagtaccaggtcttcagccacctgaagaggttgggttatgtggttcgacgattccaaccaagctctgtcctgtccccgtatgagaggcagcttaacctggatgccagcgtgcagcacttggaggatggagatggcaagagaaagaggagcagctccagccctcggtccattaataagaaggccaaggccctggacaactccctgcaacccaagagtctggcagcctccagcccaccttcagggacttcacgttgccccaggatgtggggcactgacctcacagctctgcagaggatggagcttgctccgggggaccgggactgtctgttctcagggaccatctcggctgcctcctgtacccagactctaacctgtagcttcagaggccagtctgggccttggccctgggtgtctgatactcacagagtgaaactgtgaccctctcccttccctgctgccttgcagtgacccctctggaactcaggactcgattttaaggacccaggaggtggggcagaagagaggactgtgtgcctttaacgagagggtgcctgcttcgtgctataaagccaaagccattaaaaatagatttcttttct

SEQ ID NO: 32837 - DNA, 1856 bp, Homo sapiens
  source 1..1856: mol_type = unassigned DNA
cggcgggatggagcccgagcccgagcccgcggccgtggaggttcccgcggggcgcgtgctcagcgcccgggagctcttcgccgcccgctcgcggtcgcagaagctgccccagcgctcgcatggccccaaggactttctgcccgacggctcggcagctcaggccgagcggctgcgccggtgccgggaagagctctggcagctgctggcagagcagcgcgtggagcgcctgggcagcttggtggctgccgagtggaggccagaagagggcttcgtggagttgaagtctcccgcgggcaaattctggcagaccatgggcttctcagagcagggccggcagcgccttcacccggaagaggccttgtatcttctggagtgtggctccatccacctcttccaccaagacctgccactgtctatccaggaagcttaccagctgctgctgaccgaccacactgtgaccttcctgcagtaccagccacctgaagaggttgggttatgtggttcgacgattccaaccaagctctgtcctgtccccgtatgagaggcagcttaacctggatgccagcgtgcagcacttggaggatggagatggcaagagaaagaggagcagctccagccctcggtccattaataagaaggccaaggccctggacaactccctgcaacccaagagtctggcagcctccagcccacctccctgcagccagcccagccaatgcccagaggagaaaccccaggagtcaagcccccagccctggcccggccagggagggggtggggtgcagctgggagagtggcagagccgagaacggagtcacgggagccggtaagcggcgctggaacttcgagcagatctccttccccaacatggcttcagacagccgccacacccttctgcgcgccccagccccagagctgctcccggccaacgtggctgggcgggagacagacgctgagtcctggtgccagaagctgaaccagcgcaaggagaagctctccaggcgggaacgggagcaccacgcggaggccgcgcagttccaggaagatgtcaacgccgatcccgaggtgcagcggtgctccagctggcgggagtacaaggagctgctgcagcggcggcaggtgcagaggagccagcgccgggcccctcacctgtggggccagcccgtcaccccgctgctgagtcctggccaggccagctccccagccgtggtccttcagcatatctctgtgctgcagacaacacaccttcctgatggaggtgcccggctgttggagaagtctgggggcttggaaatcatctttgatgtttaccaggccgacgctgtggccacattccgaaagaataaccctggcaaaccctatgcccggatgtgcattagtggatttgatgagcctgtcccagacctctgcagcctcaagcggttgtcttaccagagtggggatgtccctctgatctttgccctggtggatcatggtgacatctccttctacagcttcagggacttcacgttgccccaggatgtggggcactgacctcacagctctgcagaggatggagcttgctccgggggaccgggactgtctgttctcagggaccatctcggctgcctcctgtacccagactctaacctgtagcttcagaggccagtctgggccttggccctgggtgtctgatactcacagagtgaaactgtgaccctctcccttccctgctgccttgcagtgacccctctggaactcaggactcgattttaaggacccaggaggtggggcagaagagaggactgtgtgcctttaacgagagggtgcctgcttcgtgctataaagccaaagccattaaaaatagatttcttttc

SEQ ID NO: 32838 - DNA, 4647 bp, Homo sapiens
  source 1..4647: mol_type = unassigned DNA
gggggataggctcagacacaaggagaggcttggagagagcagacgccttctggattcaagaagacgaggcccattcccctcaggctcacctgttactcggcctcccagaaagatggataggagaaatgactacggatatagggtgcctctatttcagggccctctgcctcccccggggagcctggggcttcccttccctccagatatacagactgagaccacagaagaggacagtgtcctgctgatgcataccctgttggcggcaaccaaggactccctggccatggacccaccagttgtcaaccggcctaagaaaagcaagaccaagaaggcccctataaagactattactaaggctgcacctgctgcccctccagtcccagctgccaatgagattgccaccaacaagcccaaaataacttggcaggctttaaacctgccagtcattacccagatcagccaggctttacctaccactgaggtaaccaatactcaggcttcttcagtcactgctcagcctaagaaagccaacaagatgaagagagttactgccaaggcagcccaaggctcccaatccccaactggccatgagggtggcactatacagctgaagtcacccttgcaggtcctaaagctaccagtcatctcacagaatattcacgctccaattgccaatgagtcagccagttcccaagccttgataacctctatcaagcctaagaaagcttccaaggctaagaaggctgcaaataaggccatagctagtgccaccgaggtctcgctggctgcaactgccacccatacagctaccacccaaggccaaattaccaatgagacagccagtatccacaccacagcagcctccatccgaaccaagaaagcctccaaagccaggaagacaattgctaaggtcataaatactgacactgagcatatagaggctctaaatgtcactgacgcagctaccaggcagattgaggcctcagtagtggctatcaggcccaaaaaatccaagggcaagaaggctgccagcaggggcccaaattctgtctctgagatctctgaggccccacttgccactcagatagtcacaaaccaagccctggcagccaccctgcgggtcaagagagggtctagggctcggaaggctgccactaaggctcgggcaactgaaagccagactccaaatgctgaccaaggggcccaggccaagatagcctctgctcagaccaacgtaagtgcccttgagactcaggttgctgctgctgtccaggccctggcagatgactatctggctcagttgagcctggagcccacaaccaggacccggggcaaaagaaaccgaaagtccaagcatctgaatggggatgagagaagtggcagtaattacaggcggatcccatggggccggaggcctgcaccaccgcgagatgtggccattttacaagaaagggctaataagttggtgaaatacctgttggttaaggaccagacaaagatccccatcaaacgctcagacatgctgagggatgtcatccaagaatatgatgaatatttcccagaaatcattgaacgagcaagctacactctggagaagatgtttcgagtcaatctgaaagaaattgataagcaaagtagcttgtatattctcatcagcactcaggaatcctctgcaggcatactgggaacgaccaaggacacacccaagctgggtctcctcatggtgattctgagtgtcatttttatgaatggcaacaaggccagtgaggctgtcatctgggaggtgctgcgcaagttggggctgcgccctggggtgaggcattcactctttggggaagtgaggaagctcatcacagacgagtttgtgaagcagaagtacctggagtacaagagggtccctaacagcagaccacctgaatatgagttcttctggggcttgcgctcctaccacgagactagcaagatgaaagtcctcaagtttgcatgcagggtgcagaagaaagaccccaaggactgggctgtgcagtaccgcgaggcagtggagatggaagtccaagctgcagctgtggctgtggctgaggctgaagccagggctgaggcaagagcccaaatggggattggagaggaagctgtggctgggccctggaattgggatgacatggatatcgactgcctaacaagggaagagttaggcgatgatgctcaggcctggagcagattttcatttgaaattgaggccagagcccaagaaaatgcagatgccagcaccaacgtcaacttcagcagaggagctagtaccagggctggcttcagcgatggtgctagtattagcttcaatggtgcacccagctccagtggtggcttcagtggtggacctggcattacctttggtgttgcacccagcaccagtgccagcttcagcaatacagccagcattagctttggtggtacactgagcactagctccagcttcagcagcgcagccagcattagctttggttgtgcacacagcaccagcactagtttcagcagtgaagccagcattagctttggtggcatgccttgtaccagtgccagctttagtggtggagtcagctctagttttagtggcccactcagcaccagtgccactttcagtggtggagccagctctggctttggaggcacactcagcaccacggctggctttagtggtgtactcagcactagcaccagctttggcagtgcacccacaacgagcacagtcttcagtagtgcgcttagcaccagcactggctttggaggcatactcagcaccagtgtctgttttggtggctctcccagctccagtggtagctttggtggtacactcagtaccagtatctgcttcggtggctctccctgcaccagcactggctttggaggcacacttagcaccagtgtctcctttggtggctcttccagcaccagtgccaattttggtggtacactaagtaccagcatctgctttgatggctctcccagcactggtgctggctttggtggtgctctcaacaccagtgccagctttggcagtgtgctcaacaccagtactggttttggtggtgctatgagcaccagtgctgactttggcggtacactaagcaccagtgtctgctttggtggctctcctggcaccagtgtcagctttggcagtgcactcaacaccaatgctggttatggtggtgctgtcagcaccaacactgactttggtggtacactaagcaccagcgtctgttttggtggctctcccagcaccagtgctggctttggtggtgcactcaacaccaatgccagctttggctgtgccgtcagcaccagtgccagcttcagtggtgctgtcagcaccagtgcttgcttcagtggtgcaccaatcaccaaccctggctttggcggtgcatttagcaccagtgctggcttcggtggggcacttagtaccgctgctgacttcggtggtactcccagcaacagcattggctttggtgctgctcccagcaccagtgtcagctttggtggtgctcatggcaccagcctctgttttggtggagctcccagcaccagcctctgctttggcagtgcatctaatactaacctatgctttggtggccctcctagcaccagtgcctgctttagtggtgctaccagccctagtttttgtgatggacccagcaccagtaccggtttcagctttggcaatgggttaagcaccaatgctggatttggtggtggactgaacaccagtgctggctttggtggtggcctaggcaccagtgctggcttcagtggtggcctaagcacaagttctggctttgatggtgggctaggtaccagcgctggcttcggtggaggaccaggcaccagcactggttttggtggtggactgggcaccagtgctggcttcagtggcggactgggcaccagtgctggctttggtggtggactggtcactagtgatggctttggtggtggactgggcaccaatgctagtttcggcagcacacttggcaccagtgctggctttagtggtggcctcagcaccagcgatggctttggcagtaggcctaatgccagcttcgacagaggactgagtaccatcattggctttggcagtggttccaacaccagcactggctttactggcgaacccagcaccagcacgggcttcagtagtggacccagttctattgttggcttcagcggtggaccaagcactggtgttggcttctgcagtggaccaagcaccagtggcttcagcggtggaccgagcacaggagctggcttcggcggtggaccaaacactggtgctggctttggtggtggaccgagcaccagtgctggctttggcagtggagccgccagtcttggtgcctgtggcttctcgtatggctagtgaggtttcagatttattccccatgtttacagataccgctaataaattgcagtagtccttcccatggagccaaagtacatccttggaatctttgtccacacagcagtcaaggcagttatggccaatcagctgagggtgtcatgtgatggaaaaatctgtttgctgttcctgctttattgtttgctttctgtgtgctgtcatattttggtatcagagttacattaaatttgcaaaatgaa

SEQ ID NO: 32839 - DNA, 2326 bp, Homo sapiens
  source 1..2326: mol_type = unassigned DNA
gggggataggctcagacacaaggagaggcttggagagagcagacgccttctggattcaagaagacgaggcccattcccctcaggctcacctgttactcggcctcccagaaagatggataggagaaatgactacggatatagggtgcctctatttcagggccctctgcctcccccggggagcctggggcttcccttccctccagatatacagactgagaccacagaagaggacagtgtcctgctgatgcataccctgttggcggcaaccaaggactccctggccatggacccaccagttgtcaaccggcctaagaaaagcaagaccaagaaggcccctataaagactattactaaggctgcacctgctgcccctccagtcccagctgccaatgagattgccaccaacaagcccaaaataacttggcaggctttaaacctgccagtcattacccagatcagccaggctttacctaccactgaggtaaccaatactcaggcttcttcagtcactgctcagcctaagaaagccaacaagatgaagagagttactgccaaggcagcccaaggctcccaatccccaactggccatgagggtggcactatacagctgaagtcacccttgcaggtcctaaagctaccagtcatctcacagaatattcacgctccaattgccaatgagtcagccagttcccaagccttgataacctctatcaagcctaagaaagcttccaaggctaagaaggctgcaaataaggccatagctagtgccaccgaggtctcgctggctgcaactgccacccatacagctaccacccaaggccaaattaccaatgagacagccagtatccacaccacagcagcctccatccgaaccaagaaagcctccaaagccaggaagacaattgctaaggtcataaatactgacactgagcatatagaggctctaaatgtcactgacgcagctaccaggcagattgaggcctcagtagtggctatcaggcccaaaaaatccaagggcaagaaggctgccagcaggggcccaaattctgtctctgagatctctgaggccccacttgccactcagatagtcacaaaccaagccctggcagccaccctgcgggtcaagagagggtctagggctcggaaggctgccactaaggctcgggcaactgaaagccagactccaaatgctgaccaaggggcccaggccaagatagcctctgctcagaccaacgtaagtgcccttgagactcaggttgctgctgctgtccaggccctggcagatgactatctggctcagttgagcctggagcccacaaccaggacccggggcaaaagaaaccgaaagtccaagcatctgaatggggatgagagaagtggcagtaattacaggcggatcccatggggccggaggcctgcaccaccgcgagatgtggccattttacaagaaagggctaataagttggtgaaatacctgttggttaaggaccagacaaagatccccatcaaacgctcagacatgctgagggatgtcatccaagaatatgatgaatatttcccagaaatcattgaacgagcaagctacactctggagaagatgtttcgagtcaatctgaaagaaattgataagcaaagtagcttgtatattctcatcagcactcaggaatcctctgcaggcatactgggaacgaccaaggacacacccaagctgggtctcctcatggtgattctgagtgtcatttttatgaatggcaacaaggccagtgaggctgtcatctgggaggtgctgcgcaagttggggctgcgccctggggtgaggcattcactctttggggaagtgaggaagctcatcacagacgagtttgtgaagcagaagtacctggagtacaagagggtccctaacagcagaccacctgaatatgagttcttctggggcttgcgctcctaccacgagactagcaagatgaaagtcctcaagtttgcatgcagggtgcagaagaaagaccccaaggactgggctgtgcagtaccgcgaggcagtggagatggaagtccaagctgcagctgtggctgtggctgaggctgaagccagggctgagatttattccccatgtttacagataccgctaataaattgcagtagtccttcccatggagccaaagtacatccttggaatctttgtccacacagcagtcaaggcagttatggccaatcagctgagggtgtcatgtgatggaaaaatctgtttgctgttcctgctttattgtttgctttctgtgtgctgtcatattttggtatcagagttacattaaatttgcaaaatgaa

SEQ ID NO: 32840 - DNA, 1403 bp, Homo sapiens
  source 1..1403: mol_type = unassigned DNA
ataggctcagacacaaggagaggcttggagagagcagacgccttctggattcaagaagacgaggctcacctgttactcggcctcccagaaagatggataggagaaatgactacggatatagggtgcctctatttcagtccaagcatctgaatggggatgagagaagtggcagtaattacaggcggatcccatggggccggaggcctgcaccaccgcgagatgtggccattttacaagaaagggctaataagttggtgaaatacctgttggttaaggaccagacaaagatccccatcaaacgctcagacatgctgagggatgtcatccaagaatatgatgaatatttcccagaaatcattgaacgagcaagctacactctggagaagatgtttcgagtcaatctgaaagaaattgataagcaaagtagcttgtatattctcatcagcactcaggaatcctctgcaggcatactgggaacgaccaaggacacacccaagctgggtctcctcatggtgattctgagtgtcatttttatgaatggcaacaaggccagtgaggctgtcatctgggaggtgctgcgcaagttggggctgcgccctggggtgaggcattcactctttggggaagtgaggaagctcatcacagacgagtttgtgaagcagaagtacctggagtacaagagggtccctaacagcagaccacctgaatatgagttcttctggggcttgcgctcctaccacgagactagcaagatgaaagtcctcaagtttgcatgcagggtgcagaagaaagaccccaaggactgggctgtgcagtaccgcgaggcagtggagatggaagtccaactgcagctgtggctgtggctgaggctgaagccagggctgagtggttccaacaccagcactggctttactggcgaacccagcaccagcacgggcttcagtagtggacccagttctattgttggcttcagcggtggaccaagcactggtgttggcttctgcagtggaccaagcaccagtggcttcagcggtggaccgagcacaggagctggcttcggcggtggaccaaacactggtgctggctttggtggtggaccgagcaccagtgctggctttggcagtggagccgccagtcttggtgcctgtggcttctcgtatggctagtgaggtttcagatttattccccatgtttacagataccgctaataaattgcagtagtccttcccatggagccaaagtacatccttggaatctttgtccacacagcagtcaaggcagttatggccaatcagctgagggtgtcatgtgatggaaaaatctgtttgctgttcctgctttattgtttgctttctgtgtgctgtcatattttggtatcagagttacattaaatttgcaaaatg

SEQ ID NO: 32841 - DNA, 2306 bp, Homo sapiens
  source 1..2306: mol_type = unassigned DNA
ataggctcagacacaaggagaggcttggagagagcagacgccttctggattcaagaagacgaggctcacctgttactcggcctcccagaaagatggataggagaaatgactacggatatagggtgcctctatttcagggccctctgcctcccccggggagcctggggcttcccttccctccagatatacagactgagaccacagaagaggacagtgtcctgctgatgcataccctgttggcggcaaccaaggactccctggccatggacccaccagttgtcaaccggcctaagaaaagcaagaccaagaaggcccctataaagactattactaaggctgcacctgctgcccctccagtcccagctgccaatgagattgccaccaacaagcccaaaataacttggcaggctttaaacctgccagtcattacccagatcagccaggctttacctaccactgaggtaaccaatactcaggcttcttcagtcactgctcagcctaagaaagccaacaagatgaagagagttactgccaaggcagcccaaggctcccaatccccaactggccatgagggtggcactatacagctgaagtcacccttgcaggtcctaaagctaccagtcatctcacagaatattcacgctccaattgccaatgagtcagccagttcccaagccttgataacctctatcaagcctaagaaagcttccaaggctaagaaggctgcaaataaggccatagctagtgccaccgaggtctcgctggctgcaactgccacccatacagctaccacccaaggccaaattaccaatgagacagccagtatccacaccacagcagcctccatccgaaccaagaaagcctccaaagccaggaagacaattgctaaggtcataaatactgacactgagcatatagaggctctaaatgtcactgacgcagctaccaggcagattgaggcctcagtagtggctatcaggcccaaaaaatccaagggcaagaaggctgccagcaggggcccaaattctgtctctgagatctctgaggccccacttgccactcagatagtcacaaaccaagccctggcagccaccctgcgggtcaagagagggtctagggctcggaaggctgccactaaggctcgggcaactgaaagccagactccaaatgctgaccaaggggcccaggccaagatagcctctgctcagaccaacgtaagtgcccttgagactcaggttgctgctgctgtccaggccctggcagatgactatctggctcagttgagcctggagcccacaaccaggacccggggcaaaagaaaccgaaagtccaagcatctgaatggggatgagagaagtggcagtaattacaggcggatcccatggggccggaggcctgcaccaccgcgagatgtggccattttacaagaaagggctaataagttggtgaaatacctgttggttaaggaccagacaaagatccccatcaaacgctcagacatgctgagggatgtcatccaagaatatgatgaatatttcccagaaatcattgaacgagcaagctacactctggagaagatgtttcgagtcaatctgaaagaaattgataagcaaagtagcttgtatattctcatcagcactcaggaatcctctgcaggcatactgggaacgaccaaggacacacccaagctgggtctcctcatggtgattctgagtgtcatttttatgaatggcaacaaggccagtgaggctgtcatctgggaggtgctgcgcaagttggggctgcgccctggggtgaggcattcactctttggggaagtgaggaagctcatcacagacgagtttgtgaagcagaagtacctggagtacaagagggtccctaacagcagaccacctgaatatgagttcttctggggcttgcgctcctaccacgagactagcaagatgaaagtcctcaagtttgcatgcagggtgcagaagaaagaccccaaggactgggctgtgcagtaccgcgaggcagtggagatggaagtccaagctgcagctgtggctgtggctgaggctgaagccagggctgagatttattccccatgtttacagataccgctaataaattgcagtagtccttcccatggagccaaagtacatccttggaatctttgtccacacagcagtcaaggcagttatggccaatcagctgagggtgtcatgtgatggaaaaatctgtttgctgttcctgctttattgtttgctttctgtgtgctgtcatattttggtatcagagttacattaaatttgcaaaatgaa

SEQ ID NO: 32842 - DNA, 3488 bp, Homo sapiens
  source 1..3488: mol_type = unassigned DNA
agacgccttctggattcaagaagacgaggtgagctgaggtacctggctttagtgaagaccctgtgggggcttcctggctgcggcttcgacgtgcctgactccacacgcccctaaggctcacctgttactcggcctcccagaaagatggataggagaaatgactacggatatagggtgcctctatttcagtccaagcatctgaatggggatgagagaagtggcagtaattacaggcggatcccatggggccggaggcctgcaccaccgcgagatgtggccattttacaagaaagggctaataagttggtgaaatacctgttggttaaggaccagacaaagatccccatcaaacgctcagacatgctgagggatgtcatccaagaatatgatgaatatttcccagaaatcattgaacgagcaagctacactctggagaagatgtttcgagtcaatctgaaagaaattgataagcaaagtagcttgtatattctcatcagcactcaggaatcctctgcaggcatactgggaacgaccaaggacacacccaagctgggtctcctcatggtgattctgagtgtcatttttatgaatggcaacaaggccagtgaggctgtcatctgggaggtgctgcgcaagttggggctgcgccctggggtgaggcattcactctttggggaagtgaggaagctcatcacagacgagtttgtgaagcagaagtacctggagtacaagagggtccctaacagcagaccacctgaatatgagttcttctggggcttgcgctcctaccacgagactagcaagatgaaagtcctcaagtttgcatgcagggtgcagaagaaagaccccaaggactgggctgtgcagtaccgcgaggcagtggagatggaagtccaagctgcagctgtggctgtggctgaggctgaagccagggctgaggcaagagcccaaatggggattggagaggaagctgtggctgggccctggaattgggatgacatggatatcgactgcctaacaagggaagagttaggcgatgatgctcaggcctggagcagattttcatttgaaattgaggccagagcccaagaaaatgcagatgccagcaccaacgtcaacttcagcagaggagctagtaccagggctggcttcagcgatggtgctagtattagcttcaatggtgcacccagctccagtggtggcttcagtggtggacctggcattacctttggtgttgcacccagcaccagtgccagcttcagcaatacagccagcattagctttggtggtacactgagcactagctccagcttcagcagcgcagccagcattagctttggttgtgcacacagcaccagcactagtttcagcagtgaagccagcattagctttggtggcatgccttgtaccagtgccagctttagtggtggagtcagctctagttttagtggcccactcagcaccagtgccactttcagtggtggagccagctctggctttggaggcacactcagcaccacggctggctttagtggtgtactcagcactagcaccagctttggcagtgcacccacaacgagcacagtcttcagtagtgcgcttagcaccagcactggctttggaggcatactcagcaccagtgtctgttttggtggctctcccagctccagtggtagctttggtggtacactcagtaccagtatctgcttcggtggctctccctgcaccagcactggctttggaggcacacttagcaccagtgtctcctttggtggctcttccagcaccagtgccaattttggtggtacactaagtaccagcatctgctttgatggctctcccagcactggtgctggctttggtggtgctctcaacaccagtgccagctttggcagtgtgctcaacaccagtactggttttggtggtgctatgagcaccagtgctgactttggcggtacactaagcaccagtgtctgctttggtggctctcctggcaccagtgtcagctttggcagtgcactcaacaccaatgctggttatggtggtgctgtcagcaccaacactgactttggtggtacactaagcaccagcgtctgttttggtggctctcccagcaccagtgctggctttggtggtgcactcaacaccaatgccagctttggctgtgccgtcagcaccagtgccagcttcagtggtgctgtcagcaccagtgcttgcttcagtggtgcaccaatcaccaaccctggctttggcggtgcatttagcaccagtgctggcttcggtggggcacttagtaccgctgctgacttcggtggtactcccagcaacagcattggctttggtgctgctcccagcaccagtgtcagctttggtggtgctcatggcaccagcctctgttttggtggagctcccagcaccagcctctgctttggcagtgcatctaatactaacctatgctttggtggccctcctagcaccagtgcctgctttagtggtgctaccagccctagtttttgtgatggacccagcaccagtaccggtttcagctttggcaatgggttaagcaccaatgctggatttggtggtggactgaacaccagtgctggctttggtggtggcctaggcaccagtgctggcttcagtggtggcctaagcacaagttctggctttgatggtgggctaggtaccagcgctggcttcggtggaggaccaggcaccagcactggttttggtggtggactgggcaccagtgctggcttcagtggcggactgggcaccagtgctggctttggtggtggactggtcactagtgatggctttggtggtggactgggcaccaatgctagtttcggcagcacacttggcaccagtgctggctttagtggtggcctcagcaccagcgatggctttggcagtaggcctaatgccagcttcgacagaggactgagtaccatcattggctttggcagtggttccaacaccagcactggctttactggcgaacccagcaccagcacgggcttcagtagtggacccagttctattgttggcttcagcggtggaccaagcactggtgttggcttctgcagtggaccaagcaccagtggcttcagcggtggaccgagcacaggagctggcttcggcggtggaccaaacactggtgctggctttggtggtggaccgagcaccagtgctggctttggcagtggagccgccagtcttggtgcctgtggcttctcgtatggctagtgaggtttcagatttattccccatgtttacagataccgctaataaattgcagtagtccttcccatggagccaaagtacatccttggaatctttgtccacacagcagtcaaggcagttatggccaatcagctgagggtgtcatgtgatggaaaaatctgtttgctgttcctgctttattgtttgctttctgtgtgctgtcatattttggtatcagagttacattaaatttgcaaaatgaa

SEQ ID NO: 32843 - DNA, 1196 bp, Homo sapiens
  source 1..1196: mol_type = unassigned DNA
agagcagctctagggaagagagacatagacacaaggtataacaacactatgtaaatagtgttgggatagagggtctgtaggaagggttggtgtgggagttcagagaactacattcctcctaggggaaacaggagaatcaaataggaacggagatacagagtggggaatagagaagtcaaatggagaataagagggagtgataactgaataggggtagtaagaagaaaaagggagctacattgaggagaatggaaagttgaaagtaggtatggaggggaggagactgacaggcaggaacggagacccccctctggaggcggaaagaggcaggaccacttccggccagggagggggataggctcagacacaaggagaggcttggagagagcagacgccttctggattcaagaagacgagggccctctgcctcccccggggagcctggggcttcccttccctccagatatacagactgagaccacagaagaggacagtgtcctgctgatgcataccctgttggcggcaaccaaggactccctggccatggacccaccagttgtcaaccggcctaagaaaagcaagaccaagaaggcccctataaagactattactaaggctgcacctgctgcccctccagtcccagctgccaatgagattgccaccaacaagcccaaaataacttggcaggctttaaacctgccagtcattacccagatcagccaggctttacctaccactgaggtaaccaatactcaggcttcttcagtcactgctcagcctaagaaagccaacaagatgaagagagttactgccaaggcagcccaaggctcccaatccccaactggccatgagggtggcactatacagctgaagtcacccttgcaggtcctaaagctaccagtcatctcacagaatattcacgctccaattgccaatgagtcagccagttcccaagccttgataacctctatcaagcctaagaaagcttccaaggctaagaaggctgcaaataaggccatagctagtgccaccgaggtctcgctggctgcaactgccacccatacagctaccacccaaggccaaattaccaatgagacagccagtatccacaccacagcagcctccatccgaaccaagaaagcctccaaagccaggaagacaattgctaaggtcataaatactgacactgagcatat

SEQ ID NO: 32844 - DNA, 594 bp, Homo sapiens
  source 1..594: mol_type = unassigned DNA
ccggtttgaaagggaagagacaggacctggtagggtttgagaacaggaatacacagaaggctcacctgttactcggcctcccagaaagatggataggagaaatgactacggatatagggtgcctctatttcagggccctctgcctcccccggggagcctggggcttcccttccctccagatatacagactgagaccacagaagaggacagtgtcctgctgatgcataccctgttggcggcaaccaaggactccctggccatggacccaccagttgtcaaccggcctaagaaaagcaagaccaagaaggcccctataaagactattactaaggctgcacctgctgcccctccagtcccagctgccaatgagattgccaccaacaagcccaaaataacttggcaggctttaaacctgccagtcattacccagatcagccaggctttacctaccactgaggtaaccaatactcaggcttcttcagtcactgctcagcctaagaaagccaacaagatgaagagagttactgccaaggcagcccaaggctcccaatccccaactggccatgagggtggcactatacagctgaagtcacc

SEQ ID NO: 32845 - DNA, 3352 bp, Homo sapiens
  source 1..3352: mol_type = unassigned DNA
agacacaaggagaggcttggagagagcagacgccttctggattcaagaagacgagtccaagcatctgaatggggatgagagaagtggcagtaattacaggcggatcccatggggccggaggcctgcaccaccgcgagatgtggccattttacaagaaagggctaataagttggtgaaatacctgttggttaaggaccagacaaagatccccatcaaacgctcagacatgctgagggatgtcatccaagaatatgatgaatatttcccagaaatcattgaacgagcaagctacactctggagaagatgtttcgagtcaatctgaaagaaattgataagcaaagtagcttgtatattctcatcagcactcaggaatcctctgcaggcatactgggaacgaccaaggacacacccaagctgggtctcctcatggtgattctgagtgtcatttttatgaatggcaacaaggccagtgaggctgtcatctgggaggtgctgcgcaagttggggctgcgccctggggtgaggcattcactctttggggaagtgaggaagctcatcacagacgagtttgtgaagcagaagtacctggagtacaagagggtccctaacagcagaccacctgaatatgagttcttctggggcttgcgctcctaccacgagactagcaagatgaaagtcctcaagtttgcatgcagggtgcagaagaaagaccccaaggactgggctgtgcagtaccgcgaggcagtggagatggaagtccaagctgcagctgtggctgtggctgaggctgaagccagggctgaggcaagagcccaaatggggattggagaggaagctgtggctgggccctggaattgggatgacatggatatcgactgcctaacaagggaagagttaggcgatgatgctcaggcctggagcagattttcatttgaaattgaggccagagcccaagaaaatgcagatgccagcaccaacgtcaacttcagcagaggagctagtaccagggctggcttcagcgatggtgctagtattagcttcaatggtgcacccagctccagtggtggcttcagtggtggacctggcattacctttggtgttgcacccagcaccagtgccagcttcagcaatacagccagcattagctttggtggtacactgagcactagctccagcttcagcagcgcagccagcattagctttggttgtgcacacagcaccagcactagtttcagcagtgaagccagcattagctttggtggcatgccttgtaccagtgccagctttagtggtggagtcagctctagttttagtggcccactcagcaccagtgccactttcagtggtggagccagctctggctttggaggcacactcagcaccacggctggctttagtggtgtactcagcactagcaccagctttggcagtgcacccacaacgagcacagtcttcagtagtgcgcttagcaccagcactggctttggaggcatactcagcaccagtgtctgttttggtggctctcccagctccagtggtagctttggtggtacactcagtaccagtatctgcttcggtggctctccctgcaccagcactggctttggaggcacacttagcaccagtgtctcctttggtggctcttccagcaccagtgccaattttggtggtacactaagtaccagcatctgctttgatggctctcccagcactggtgctggctttggtggtgctctcaacaccagtgccagctttggcagtgtgctcaacaccagtactggttttggtggtgctatgagcaccagtgctgactttggcggtacactaagcaccagtgtctgctttggtggctctcctggcaccagtgtcagctttggcagtgcactcaacaccaatgctggttatggtggtgctgtcagcaccaacactgactttggtggtacactaagcaccagcgtctgttttggtggctctcccagcaccagtgctggctttggtggtgcactcaacaccaatgccagctttggctgtgccgtcagcaccagtgccagcttcagtggtgctgtcagcaccagtgcttgcttcagtggtgcaccaatcaccaaccctggctttggcggtgcatttagcaccagtgctggcttcggtggggcacttagtaccgctgctgacttcggtggtactcccagcaacagcattggctttggtgctgctcccagcaccagtgtcagctttggtggtgctcatggcaccagcctctgttttggtggagctcccagcaccagcctctgctttggcagtgcatctaatactaacctatgctttggtggccctcctagcaccagtgcctgctttagtggtgctaccagccctagtttttgtgatggacccagcaccagtaccggtttcagctttggcaatgggttaagcaccaatgctggatttggtggtggactgaacaccagtgctggctttggtggtggcctaggcaccagtgctggcttcagtggtggcctaagcacaagttctggctttgatggtgggctaggtaccagcgctggcttcggtggaggaccaggcaccagcactggttttggtggtggactgggcaccagtgctggcttcagtggcggactgggcaccagtgctggctttggtggtggactggtcactagtgatggctttggtggtggactgggcaccaatgctagtttcggcagcacacttggcaccagtgctggctttagtggtggcctcagcaccagcgatggctttggcagtaggcctaatgccagcttcgacagaggactgagtaccatcattggctttggcagtggttccaacaccagcactggctttactggcgaacccagcaccagcacgggcttcagtagtggacccagttctattgttggcttcagcggtggaccaagcactggtgttggcttctgcagtggaccaagcaccagtggcttcagcggtggaccgagcacaggagctggcttcggcggtggaccaaacactggtgctggctttggtggtggaccgagcaccagtgctggctttggcagtggagccgccagtcttggtgcctgtggcttctcgtatggctagtgaggtttcagatttattccccatgtttacagataccgctaataaattgcagtagtccttcccatggagccaaagtacatccttggaatctttgtccacacagcagtcaaggcagttatggccaatcagctgagggtgtcatgtgatggaaaaatctgtttgctgttcctgctttattgtttgctttctgtgtgctgtcatattttggtatcagagttacattaaatttgcaaaatg

SEQ ID NO: 32846 - DNA, 562 bp, Homo sapiens
  source 1..562: mol_type = unassigned DNA
gcgcactatcgagttgcggagggggcgtgtaaaggggtggggtcgtagaactgactctctcggaggcaaaaggagctgggccttggaaaccagatggcctgggttttttagggccctctgcctcccccggggagcctggggcttcccttccctccagatatacagactgagaccacagaagaggacagtgtcctgctgatgcataccctgttggcggcaaccaaggactccctggccatggacccaccagttgtcaaccggcctaagaaaagcaagaccaagaaggcccctataaagactattactaaggctgcacctgctgcccctccagtcccagctgccaatgagattgccaccaacaagcccaaaataacttggcaggctttaaacctgccagtcattacccagatcagccaggctttacctaccactgaggtaaccaatactcaggcttcttcagtcactgctcagcctaagaaagccaacaagatgaagagagttactgccaaggcagcccaaggctcccaatccccaactggccatgagggtggcactatacagc

SEQ ID NO: 32847 - DNA, 868 bp, Homo sapiens
  source 1..868: mol_type = unassigned DNA
acttccggccagggagggggataggctcagacacaaggagaggcttggagagagcagacgccttctggattcaagaagacgaggtttgaagaaaacctgctggaggtttgggacctaaccgcatcaaagtcgcctttagcggtgcctggacccagttcgcacgggaggaagtaggaggctcacctgttactcggcctcccagaaagatggataggagaaatgactacggatatagggtgcctctatttcagatatacagactgagaccacagaagaggacagtgtcctgctgatgcataccctgttggcggcaaccaaggactccctggccatggacccaccagttgtcaaccggcctaagaaaagcaagaccaagaaggcccctataaagactattactaaggctgcacctgctgcccctccagtcccagctgccaatgagattgccaccaacaagcccaaaataacttggcaggctttaaacctgccagtcattacccagatcagccaggctttacctaccactgaggtaaccaatactcaggcttcttcagtcactgctcagcctaagaaagccaacaagatgaagagagttactgccaaggcagcccaaggctcccaatccccaactggccatgagggtggcactatacagctgaagtcacccttgcaggtcctaaagctaccagtcatctcacagaatattcacgctccaattgccaatgagtcagccagttcccaagccttgataacctctatcaagcctaagaaagcttccaaggctaagaaggctgcaaataaggccatagctagtgccaccgaggtctcgctggctgcaactgccacccatacagctaccacccaaggc

SEQ ID NO: 32848 - DNA, 672 bp, Homo sapiens
  source 1..672: mol_type = unassigned DNA
agacgccttctggattcaagaagacgaggtgagctgaggtacctggctttagtgaagaccctgtgggggcttcctggctgcggcttcgacgtgcctgactccacacgcccctaaggctcacctgttactcggcctcccagaaagatggataggagaaatgactacggatatagggtgcctctatttcagggccctctgcctcccccggggagcctggggcttcccttccctccagatatacagactgagaccacagaagaggacagtgtcctgctgatgcataccctgttggcggcaaccaaggactccctggccatggacccaccagttgtcaaccggcctaagaaaagcaagaccaagaaggcccctataaagactattactaaggctgcacctgctgcccctccagtcccagctgccaatgagattgccaccaacaagcccaaaataacttggcaggctttaaacctgccagtcattacccagatcagccaggctttacctaccactgaggtaaccaatactcaggcttcttcagtcactgctcagcctaagaaagccaacaagatgaagagagttactgccaaggcagcccaaggctcccaatccccaactggccatgagggtggcactatacagctgaagtcacccttgcaggtcctaaagctacca

SEQ ID NO: 32849 - DNA, 626 bp, Homo sapiens
  source 1..626: mol_type = unassigned DNA
acttccggccagggagggggataggctcagacacaaggagaggcttggagagagcagacgccttctggattcaagaagacgaggtgagctgaggctcacctgttactcggcctcccagaaagatggataggagaaatgactacggatatagggtgcctctatttcagggccctctgcctcccccggggagcctggggcttcccttccctccagatatacagactgagaccacagaagaggacagtgtcctgctgatgcataccctgttggcggcaaccaaggactccctggccatggacccaccagttgtcaaccggcctaagaaaagcaagaccaagaaggcccctataaagactattactaaggctgcacctgctgcccctccagtcccagctgccaatgagattgccaccaacaagcccaaaataacttggcaggctttaaacctgccagtcattacccagatcagccaggctttacctaccactgaggtaaccaatactcaggcttcttcagtcactgctcagcctaagaaagccaacaagatgaagagagttactgccaaggcagcccaaggctcccaatccccaactggccatgagggtggcactatacagctgaagtca

SEQ ID NO: 32850 - DNA, 2597 bp, Homo sapiens
  source 1..2597: mol_type = unassigned DNA
ataggctcagacacaaggagaggcttggagagagcagacgccttctggattcaagaagacgaggctcacctgttactcggcctcccagaaagatggataggagaaatgactacggatatagggtgcctctatttcagggccctctgcctcccccggggagcctggggcttcccttccctccagatatacagactgagaccacagaagaggacagtgtcctgctgatgcataccctgttggcggcaaccaaggactccctggccatggacccaccagttgtcaaccggcctaagaaaagcaagaccaagaaggcccctataaagactattactaaggctgcacctgctgcccctccagtcccagctgccaatgagattgccaccaacaagcccaaaataacttggcaggctttaaacctgccagtcattacccagatcagccaggctttacctaccactgaggtaaccaatactcaggcttcttcagtcactgctcagcctaagaaagccaacaagatgaagagagttactgccaaggcagcccaaggctcccaatccccaactggccatgagggtggcactatacagctgaagtcacccttgcaggtcctaaagctaccagtcatctcacagaatattcacgctccaattgccaatgagtcagccagttcccaagccttgataacctctatcaagcctaagaaagcttccaaggctaagaaggctgcaaataaggccatagctagtgccaccgaggtctcgctggctgcaactgccacccatacagctaccacccaaggccaaattaccaatgagacagccagtatccacaccacagcagcctccatccgaaccaagaaagcctccaaagccaggaagacaattgctaaggtcataaatactgacactgagcatatagaggctctaaatgtcactgacgcagctaccaggcagattgaggcctcagtagtggctatcaggcccaaaaaatccaagggcaagaaggctgccagcaggggcccaaattctgtctctgagatctctgaggccccacttgccactcagatagtcacaaaccaagccctggcagccaccctgcgggtcaagagagggtctagggctcggaaggctgccactaaggctcgggcaactgaaagccagactccaaatgctgaccaaggggcccaggccaagatagcctctgctcagaccaacgtaagtgcccttgagactcaggttgctgctgctgtccaggccctggcagatgactatctggctcagttgagcctggagcccacaaccaggacccggggcaaaagaaaccgaaagtccaagcatctgaatggggatgagagaagtggcagtaattacaggcggatcccatggggccggaggcctgcaccaccgcgagatgtggccattttacaagaaagggctaataagttggtgaaatacctgttggttaaggaccagacaaagatccccatcaaacgctcagacatgctgagggatgtcatccaagaatatgatgaatatttcccagaaatcattgaacgagcaagctacactctggagaagatgtttcgagtcaatctgaaagaaattgataagcaaagtagcttgtatattctcatcagcactcaggaatcctctgcaggcatactgggaacgaccaaggacacacccaagctgggtctcctcatggtgattctgagtgtcatttttatgaatggcaacaaggccagtgaggctgtcatctgggaggtgctgcgcaagttggggctgcgccctggggtgaggcattcactctttggggaagtgaggaagctcatcacagacgagtttgtgaagcagaagtacctggagtacaagagggtccctaacagcagaccacctgaatatgagttcttctggggcttgcgctcctaccacgagactagcaagatgaaagtcctcaagtttgcatgcagggtgcagaagaaagaccccaaggactgggctgtgcagtaccgcgaggcagtggagatggaagtccaagctgcagctgtggctgtggctgaggctgaagccagggctgagtggttccaacaccagcactggctttactggcgaacccagcaccagcacgggcttcagtagtggacccagttctattgttggcttcagcggtggaccaagcactggtgttggcttctgcagtggaccaagcaccagtggcttcagcggtggaccgagcacaggagctggcttcggcggtggaccaaacactggtgctggctttggtggtggaccgagcaccagtgctggctttggcagtggagccgccagtcttggtgcctgtggcttctcgtatggctagtgaggtttcagatttattccccatgtttacagataccgctaataaattgcagtagtccttcccatggagccaaagtacatccttggaatctttgtccacacagcagtcaaggcagttatggccaatcagctgagggtgtcatgtgatggaaaaatctgtttgctgttcctgctttattgtttgctttctgtgtgctgtcatattttggtatcagagttacattaaatttgcaaaatgaa

SEQ ID NO: 32851 - DNA, 578 bp, Homo sapiens
  source 1..578: mol_type = unassigned DNA
aagtaacgatctggactcggttcgggccgtgaaagggagggatgcagacctagttgggaccgcagaaaggaaggatcgagaaatccttcagacggctcacctgttactcggcctcccagaaagatggataggagaaatgactacggatatagggtgcctctatttcagatatacagactgagaccacagaagaggacagtgtcctgctgatgcataccctgttggcggcaaccaaggactccctggccatggacccaccagttgtcaaccggcctaagaaaagcaagaccaagaaggcccctataaagactattactaaggctgcacctgctgcccctccagtcccagctgccaatgagattgccaccaacaagcccaaaataacttggcaggctttaaacctgccagtcattacccagatcagccaggctttacctaccactgaggtaaccaatactcaggcttcttcagtcactgctcagcctaagaaagccaacaagatgaagagagttactgccaaggcagcccaaggctcccaatccccaactggccatgagggtggcactatacagctgaag

SEQ ID NO: 32852 - DNA, 976 bp, Homo sapiens
  source 1..976: mol_type = unassigned DNA
agagaactacattcctcctaggggaaacaggagaatcaaataggaacggagatacagagtggggaatagagaagtcaaatggagaataagagggagtgataactgaataggggtagtaagaagaaaaagggagctacattgaggagaatggaaagttgaaagtaggtatggaggggaggagactgacaggcaggaacggagacccccctctggaggcggaaagaggcaggaccacttccggccagggagggggataggctcagacacaaggagaggcttggagagagcagacgccttctggattcaagaagacgaggctcacctgttactcggcctcccagaaagatggataggagaaatgactacggatatagggtgcctctatttcaggtgaggcctctctgcattctctctaggccatctgccccatcctgagttcacttactgctcttcagaccccttccaccgtgtagtttcataattccctgcctaactcgtctcagtcctcccttacatggtgaaggagaggagaggaaaacctgcctgactctattccttccttgctccctaccccattttaattaaccactgctcagaggaagggaaggcctttgtggaaagggatgggctttagcgaggccaaatggcccagaggatggtaatcctaagtgtgtagggccctctgcctcccccggggagcctggggcttcccttccctccagatatacagactgagaccacagaagaggacagtgtcctgctgatgcataccctgttggcggcaaccaaggactccctggccatggacccaccagttgtcaaccggcctaagaaaagcaagaccaagaaggcccctataaagactattactaaggctgcacctgctgcccctccagtcccagctgccaatgagattgccaccaacaagcccaaaataacttggcaggctttaaacctgccagtcattacccagatc

SEQ ID NO: 32853 - DNA, 722 bp, Homo sapiens
  source 1..722: mol_type = unassigned DNA
gggggataggctcagacacaaggagaggcttggagagagcagacgccttctggattcaagaagacgaggcccattcccctcaggctcacctgttactcggcctcccagaaagatggataggagaaatgactacggatatagggtgcctctatttcaggtgaggcctctctgcattctctctaggccatctgccccatcctgagttcacttactgctcttcagaccccttccaccgtgtagtttcataattccctgcctaactcgtctcagtcctcccttacatggtgaaggagaggagaggaaaacctgcctgactctattccttccttgctccctaccccattttaattaaccactgctcagaggaagggaaggcctttgtggaaagggatgggctttagcgaggccaaatggcccagaggatggtaatcctaagtgtgtagggccctctgcctcccccggggagcctggggcttcccttccctccagatatacagactgagaccacagaagaggacagtgtcctgctgatgcataccctgttggcggcaaccaaggactccctggccatggacccaccagttgtcaaccggcctaagaaaagcaagaccaagaaggcccctataaagactattactaaggctgcacctgctgcccctccagtcccagctgccaatgagattgccaccaacaagcccaaaataacttggcaggctttaaac

SEQ ID NO: 32854 - DNA, 1115 bp, Homo sapiens
  source 1..1115: mol_type = unassigned DNA
ataggctcagacacaaggagaggcttggagagagcagacgccttctggattcaagaagacgaggctcacctgttactcggcctcccagaaagatggataggagaaatgactacggatatagggtgcctctatttcagtccaagcatctgaatggggatgagagaagtggcagtaattacaggcggatcccatggggccggaggcctgcaccaccgcgagatgtggccattttacaagaaagggctaataagttggtgaaatacctgttggttaaggaccagacaaagatccccatcaaacgctcagacatgctgagggatgtcatccaagaatatgatgaatatttcccagaaatcattgaacgagcaagctacactctggagaagatgtttcgagtcaatctgaaagaaattgataagcaaagtagcttgtatattctcatcagcactcaggaatcctctgcaggcatactgggaacgaccaaggacacacccaagctgggtctcctcatggtgattctgagtgtcatttttatgaatggcaacaaggccagtgaggctgtcatctgggaggtgctgcgcaagttggggctgcgccctggggtgaggcattcactctttggggaagtgaggaagctcatcacagacgagtttgtgaagcagaagtacctggagtacaagagggtccctaacagcagaccacctgaatatgagttcttctggggcttgcgctcctaccacgagactagcaagatgaaagtcctcaagtttgcatgcagggtgcagaagaaagaccccaaggactgggctgtgcagtaccgcgaggcagtggagatggaagtccaagctgcagctgtggctgtggctgaggctgaagccagggctgagatttattccccatgtttacagataccgctaataaattgcagtagtccttcccatggagccaaagtacatccttggaatctttgtccacacagcagtcaaggcagttatggccaatcagctgagggtgtcatgtgatggaaaaatctgtttgctgttcctgctttattgtttgctttctgtgtgctgtcatattttggtatcagagttacattaaatttgcaaaatgaa

SEQ ID NO: 32855 - DNA, 6484 bp, Homo sapiens
  source 1..6484: mol_type = unassigned DNA
gttaatttccaccaggaggaggcgcgcagcccagctcccctagtctctcttcttaaatccccctacctacggctgccgaggttggccgcgcgtcgggaatctccccgacagtcctggccctcccccgccccccgggttggtttttcccagctgcggaggttgggaggttgggccaggggctggggtgcgaagagagtcggcgcccgcaacgcggagccgggaagtcgtcgctactctggtggaactcagagttggttctggaggcggcggacgcggaggtccctcagaggatccagcgaggggcgccaacaagaggcgaagaggtggcaccagggcggcggcaggaagaggagcgggagcaggagcgcggagcggagcgtcccgacccgccgtgcgtactttctggagggaaggggcgggggaatcggcccctgagggaagcgcccggtggcgagggggttagccaagttccggctgcggcgccactccctcggttccacgagaggaaagttttttttttccagacgcttccgccggctcgcgccctccgggcccagcctcccgagccttcggagcgggcgccgtcccagcccagctccggggaaacgcgagccgcgatgcctggggggtgctcccggggccccgccgccggggacgggcgtctgcggctggcgcgactagcgctggtactcctgggctgggtctcctcgtcttctcccacctcctcggcatcctccttctcctcctcggcgccgttcctggcttccgccgtgtccgcccagcccccgctgccggaccagtgccccgcgctgtgcgagtgctccgaggcagcgcgcacagtcaagtgcgttaaccgcaatctgaccgaggtgcccacggacctgcccgcctacgtgcgcaacctcttccttaccggcaaccagctggccgtgctccctgccggcgccttcgcccgccggccgccgctggcggagctggccgcgctcaacctcagcggcagccgcctggacgaggtgcgcgcgggcgccttcgagcatctgcccagcctgcgccagctcgacctcagccacaacccactggccgacctcagtcccttcgctttctcgggcagcaatgccagcgtctcggcccccagtccccttgtggaactgatcctgaaccacatcgtgccccctgaagatgagcggcagaaccggagcttcgagggcatggtggtggcggccctgctggcgggccgtgcactgcaggggctccgccgcttggagctggccagcaaccacttcctttacctgccgcgggatgtgctggcccaactgcccagcctcaggcacctggacttaagtaataattcgctggtgagcctgacctacgtgtccttccgcaacctgacacatctagaaagcctccacctggaggacaatgccctcaaggtccttcacaatggcaccctggctgagttgcaaggtctaccccacattagggttttcctggacaacaatccctgggtctgcgactgccacatggcagacatggtgacctggctcaaggaaacagaggtagtgcagggcaaagaccggctcacctgtgcatatccggaaaaaatgaggaatcgggtcctcttggaactcaacagtgctgacctggactgtgacccgattcttcccccatccctgcaaacctcttatgtcttcctgggtattgttttagccctgataggcgctattttcctcctggttttgtatttgaaccgcaaggggataaaaaagtggatgcataacatcagagatgcctgcagggatcacatggaagggtatcattacagatatgaaatcaatgcggaccccagattaacgaacctcagttctaactcggatgtctgagaaatattagaggacagaccaaggacaactctgcatgagatgtagacttaagctttatccctactaggcttgctccactttcatcctccactatagatacaacggactttgactaaaagcagtgaaggggatttgcttccttgttatgtaaagtttctcggtgtgttctgttaatgtaagacgatgaacagttgtgtatagtgttttaccctcttctttttcttggaactcctcaacacgtatggagggatttttcaggtttcagcatgaacatgggcttcttgctgtctgtctctctctcagtacagttcaaggtgtagcaagtgtacccacacagatagcattcaacaaaagctgcctcaactttttcgagaaaaatactttattcataaatatcagttttattctcatgtacctaagttgtggagaaaataattgcatcctataaactgcctgcagacgttagcaggctcttcaaaataactccatggtgcacaggagcacctgcatccaagagcatgcttacattttactgttctgcatattacaaaaaataacttgcaacttcataacttctttgacaaagtaaattacttttttgattgcagtttatatgaaaatgtactgatttttttttaataaactgcatcgagatccaaccgactgaattgttaaaaaaaaaaaaaataaagattcttaaaagaattacagtgtgtgcaagtttgctttgaaaaaaggatgaagggcaggagtattcaatggtcttggttccgatgataattattacttaacatagctgagaatcaaactgtagcaatgtctaatataaatagacttgggagatcgttttgaaatggtggatccttttagtatttaaatggagagtttgagtattcatgtgactgtatggtcccaaagttaatgctatttatgaaacagttttgtaagaacataatgaagttggtaaaagctaagcgttctgcacaataaacagttcccagtttggggctttttcaaggctaatgaagttattgttggtctagaaaaatagtatttacttaataaaactctgtttgaaattgttctgtggatttttagagcagaatttgaaacaaatgtaatgcaaataaatataaagataaagtgtcttaaagacaatattctgaaataaaagatataaaatataatttaaaaaatatttctcaatgtcttaatgtaaattgaaacttagattttcttgaggatattttcaaaaaaacatttaaagtggaacataaatgttctttagtttatcagagacccagctaatatgtttaaaaagttgacttgacatggttgaatatgaacttgaggaaataaccacagataaatgtctacatctgtaaacacgtgtctcaagtatttataggttcttatcttcagttcagtgtttaagaatttgaggatattttgattttagctaagctgttcataatgtaagtatatacacctttgtgaagaataaatcacatttaggtgtaaatacaggcaatcattaattgatacatccataatatacaaggcttttattattttttcagtttattatctgtcatttaatctgaaaagtaaattccattaatcagtcttcaggctcttttatcaagtgatttaaatgtagccattattgcttaactgaaagtattaggtaaacttgcatcagtaagtcttagggcttgcttttcctttgaactggttatgtccttcagtgctttatgtttgaaataaaatctacattttcatatttttataaataaaataggatcagatagtattttaggttctagaaatctttgctgattccttctttgaattaaattcagaaattttcaaagtagggctaaaaataagtaaatcttcctttttataggttagaatatatagtcagaatacaaagctgtaattccttaaattccatcaggcttgttttgtgaaatatagtatttattatttaagggttatatttcagatcctataattacctcagaaaaagctaaatatttggcacttaaaattccatcaaacagtttaagtgttcatcagaaattcctaaactgtctggttgccattatttggtaagaacaatgagatactaatctgtcaaaaatagtgaccactatcttagtaaactgttgatggacttagtaagtcttctgatattgtaggaaacaaattataatattgatagagcctctattgagaagaattgtttcttcatcacatgataatctaacagtttaaagtggagctttatctaagaaccagggaagcagtagattcattagtctagcttttctcatcaactctttgaagcaatgatgaatctgataaagtgaagccaagttttccctgttaggtagatggcttctttgaagttataatttattgcttctttttcatccccctacttattctcttgtttggactttccaattgctactgctttgttttccatcacatcactccttcctgttctccaaaatatggaaataaaaaagtcaattaaaagaacaccttattcttaagataaaaaattgttattatttgacaactaattaatgttttgcagccctaatattcttaagtctataagcttataaaacattctaagttccttggaagatagaggctatataaattcaataagtataagggaatatgggaaaaataaaagtatcactttatttaaaaataagacaagtctgtttgttttaaatactgttcttactattaatgcattgttgactctagaaacctgcaagtatccatttttaaaattttattttagttggtaatactctttattactgaacgtaaaattttcaacataaaacacccttcatttatcctttacaagtttcatttgaagaaagttagaaaaaatacttagaaattcaaggacttgatatatcccttaatttagaaagctattcaactatcccataaatttctatttaaagtagcaaaaattttaggataatacagctatttggccctgaattataactgccccctttgattgtaaccattcagtttgcagcattcgtttttgtaatagcagtttggctgctatgggtgtgattcaatggtaacctacaaggcaaatttgtacaggagctgacagatttttctaacaaaataaggagactttgaagcacattgaataggagtttttaaatgaataggattttttaaaggaaaaagagtaggagcttgggggggaaggctggttgaaataaatgagcaaatcacaaataataaatcctttagaaataccttgattggcagtaagtgtggattatgctcatctcagtatttaattagaaataacttacctttgtcttttgtctttttaattaaagtggctgtaaaaaagaaggtccagatgaactgagattgtttgcttaggaattctgttttactcttttccttttacctgatgttctaaaacagggcttaccttgttgaggaccttagaggctttgcaattctagattgtgattctttcatatcattttagtttttctcccaagactacactaaaggagacatcacgagatttgcaaggttaaaaacaattctgcacgtgcttcctcctgctcccaaatccggtcatccacctttcagagcagcaccgtaaagtgaagacagacatttattagatgaaattctggtttcacttttacacttgtgcaagcatttttaacagtaaaggagaggaaagggaggaatttatatttctagataatatatgaaaattaccttgatattgtatttttaagatctttcaccaatactgcagtgctgcactagaaataattagtttaagaaaatacattcaacattgtccaggtgatcctgtcaccttttagatgacgaaaaacatcttgaggatgttttgtacagttattttcccattgttactcttagagacttttgtttcaaaaaggcaggctcattttattttgttttatcttagaacattttagcagctctttgtcatgggttaaaaaaatctagaattaaaaaaatgtttaatatatgatttatataattttgacaagaatacaaattcttagtcgttcaaaattggaagcgctcttagaagtgtcaagctcagctttccattccacaaatgaagtaactggtaactgtgacttattatgttatacagtgacagttattatgttatacagtgtcagttatacagtgacaaccaggacaaaatcctagggttctagattccccttctggtgctctttttaccagatgatggcattactaattgcctaccttgaggcctttgaaatcaccatgtctgataaaaacatgcaattgctttggtgaatttgtttgttttattgttgttgctttgagtgaatgcttcagtttgctctagattttactttgttaaaaattaccatgttttaacccccgaaaacatttaatgtttttgaaatgattttttcataacaatcttatgagtctattatataataggaagtattttggaaatttaatggtgatatttctttggaaaagaaaaataaaaactctggaatgca

SEQ ID NO: 32856 - DNA, 3392 bp, Homo sapiens
  source 1..3392: mol_type = unassigned DNA
tttctctctctctctctcttaaagttggcgcgctctcttcacaagttccatcactacccaagaagtgagggggcgggggggacaggcgggaaggcattaattacacctaaatctgaagtttgcggcctcaagtaccactttgatggggagagcttctgaagcttccatacaacctgccgtgcctttgctgctgccgcagtagattttcagctcatttctttctgctgctgcttcgcgctgctctgtcatgcctaaatctatctcgtcactgccaaaggtgcctgaatcagggtgaattccacgagattcaccagcggttttgctccagtccaaggaggaggcgcgcagcccagctcccctagtctctcttcttaaatccccctacctacggctgccgaggttggccgcgcgtcgggaatctccccgacagtcctggccctcccccgccccccgggttggtttttcccagctgcggaggttgggaggttgggccaggggctggggtgcgaagagagtcggcgcccgcaacgcggagccgggaagtcgtcgctactctggtggaactcagagttggttctggaggcggcggacgcggaggtccctcagaggatccagcgaggggcgccaacaagaggcgaagaggtggcaccagggcggcggcaggaagaggagcgggagcaggagcgcggagcggagcgtcccgacccgccgtgcgtactttctggagggaaggggcgggggaatcggcccctgagggaagcgcccggtggcgagggggttagccaagttccggctgcggcgccactccctcggttccacgagaggaaagttttttttttccagacgcttccgccggctcgcgccctccgggcccagcctcccgagccttcggagcgggcgccgtcccagcccagctccggggaaacgcgagccgcgatgcctggggggtgctcccggggccccgccgccggggacgggcgtctgcggctggcgcgactagcgctggtactcctgggctgggtctcctcgtcttctcccacctcctcggcatcctccttctcctcctcggcgccgttcctggcttccgccgtgtccgcccagcccccgctgccggaccagtgccccgcgctgtgcgagtgctccgaggcagcgcgcacagtcaagtgcgttaaccgcaatctgaccgaggtgcccacggacctgcccgcctacgtgcgcaacctcttccttaccggcaaccagctggccgtgctccctgccggcgccttcgcccgccggccgccgctggcggagctggccgcgctcaacctcagcggcagccgcctggacgaggtgcgcgcgggcgccttcgagcatctgcccagcctgcgccagctcgacctcagccacaacccactggccgacctcagtcccttcgctttctcgggcagcaatgccagcgtctcggcccccagtccccttgtggaactgatcctgaaccacatcgtgccccctgaagatgagcggcagaaccggagcttcgagggcatggtggtggcggccctgctggcgggccgtgcactgcaggggctccgccgcttggagctggccagcaaccacttcctttacctgccgcgggatgtgctggcccaactgcccagcctcaggcacctggacttaagtaataattcgctggtgagcctgacctacgtgtccttccgcaacctgacacatctagaaagcctccacctggaggacaatgccctcaaggtccttcacaatggcaccctggctgagttgcaaggtctaccccacattagggttttcctggacaacaatccctgggtctgcgactgccacatggcagacatggtgacctggctcaaggaaacagaggtagtgcagggcaaagaccggctcacctgtgcatatccggaaaaaatgaggaatcgggtcctcttggaactcaacagtgctgacctggactgtgacccgattcttcccccatccctgcaaacctcttatgtcttcctgggtattgttttagccctgataggcgctattttcctcctggttttgtatttgaaccgcaaggggataaaaaagtggatgcataacatcagagatgcctgcagggatcacatggaagggtatcattacagatatgaaatcaatgcggaccccagattaacgaacctcagttctaactcggatgtctgagaaatattagaggacagaccaaggacaactctgcatgagatgtagacttaagctttatccctactaggcttgctccactttcatcctccactatagatacaacggactttgactaaaagcagtgaaggggatttgcttccttgttatgtaaagtttctcggtgtgttctgttaatgtaagacgatgaacagttgtgtatagtgttttaccctcttctttttcttggaactcctcaacacgtatggagggatttttcaggtttcagcatgaacatgggcttcttgctgtctgtctctctctcagtacagttcaaggtgtagcaagtgtacccacacagatagcattcaacaaaagctgcctcaactttttcgagaaaaatactttattcataaatatcagttttattctcatgtacctaagttgtggagaaaataattgcatcctataaactgcctgcagacgttagcaggctcttcaaaataactccatggtgcacaggagcacctgcatccaagagcatgcttacattttactgttctgcatattacaaaaaataacttgcaacttcataacttctttgacaaagtaaattacttttttgattgcagtttatatgaaaatgtactgatttttttttaataaactgcatcgagatccaaccgactgaattgttaaaaaaaaaaaaaataaagattcttaaaagaattacagtgtgtgcaagtttgctttgaaaaaaggatgaagggcaggagtattcaatggtcttggttccgatgataattattacttaacatagctgagaatcaaactgtagcaatgtctaatataaatagacttgggagatcgttttgaaatggtggatccttttagtatttaaatggagagtttgagtattcatgtgactgtatggtcccaaagttaatgctatttatgaaacagttttgtaagaacataatgaagttggtaaaagctaagcgttctgcacaataaacagttcccagtttggggctttttcaaggctaatgaagttattgttggtctagaaaaatagtatttacttaataaaactctgtttgaaattgttctgtggatttttagagcagaatttgaaacaaatgtaatgcaaataaatataaagataaagtgtcttaaagacaatattctgaaataaaagatataaaatataatttaaa

SEQ ID NO: 32857 - DNA, 2881 bp, Homo sapiens
  source 1..2881: mol_type = unassigned DNA
acccggaggccgaccttccgccgaggcggtgcaggaaggaacgggagagggagaagtttggtagggaaggaattggggattaagcggtccctcagaggatccagcgaggggcgccaacaagaggcgaagaggtggcaccagggcggcggcaggaagaggagcgggagcaggagcgcggagcggagcgtcccgacccgccgtgcgtactttctggagggaaggggcgggggaatcggcccctgagggaagcgcccggtggcgagggggttagccaagttccggctgcggcgccactccctcggttccacgagaggaaagttttttttttccagacgcttccgccggctcgcgccctccgggcccagcctcccgagccttcggagcgggcgccgtcccagcccagctccggggaaacgcgagccgcgatgcctggggggtgctcccggggccccgccgccggggacgggcgtctgcggctggcgcgactagcgctggtactcctgggctgggtctcctcgtcttctcccacctcctcggcatcctccttctcctcctcggcgccgttcctggcttccgccgtgtccgcccagcccccgctgccggaccagtgccccgcgctgtgcgagtgctccgaggcagcgcgcacagtcaagtgcgttaaccgcaatctgaccgaggtgcccacggacctgcccgcctacgtgcgcaacctcttccttaccggcaaccagctggccgtgctccctgccggcgccttcgcccgccggccgccgctggcggagctggccgcgctcaacctcagcggcagccgcctggacgaggtgcgcgcgggcgccttcgagcatctgcccagcctgcgccagctcgacctcagccacaacccactggccgacctcagtcccttcgctttctcgggcagcaatgccagcgtctcggcccccagtccccttgtggaactgatcctgaaccacatcgtgccccctgaagatgagcggcagaaccggagcttcgagggcatggtggtggcggccctgctggcgggccgtgcactgcaggggctccgccgcttggagctggccagcaaccacttcctttacctgccgcgggatgtgctggcccaactgcccagcctcaggcacctggacttaagtaataattcgctggtgagcctgacctacgtgtccttccgcaacctgacacatctagaaagcctccacctggaggacaatgccctcaaggtccttcacaatggcaccctggctgagttgcaaggtctaccccacattagggttttcctggacaacaatccctgggtctgcgactgccacatggcagacatggtgacctggctcaaggaaacagaggtagtgcagggcaaagaccggctcacctgtgcatatccggaaaaaatgaggaatcgggtcctcttggaactcaacagtgctgacctggactgtgacccgattcttcccccatccctgcaaacctcttatgtcttcctgggtattgttttagccctgataggcgctattttcctcctggttttgtatttgaaccgcaaggggataaaaaagtggatgcataacatcagagatgcctgcagggatcacatggaagggtatcattacagatatgaaatcaatgcggaccccagattaacgaacctcagttctaactcggatgtctgagaaatattagaggacagaccaaggacaactctgcatgagatgtagacttaagctttatccctactaggcttgctccactttcatcctccactatagatacaacggactttgactaaaagcagtgaaggggatttgcttccttgttatgtaaagtttctcggtgtgttctgttaatgtaagacgatgaacagttgtgtatagtgttttaccctcttctttttcttggaactcctcaacacgtatggagggatttttcaggtttcagcatgaacatgggcttcttgctgtctgtctctctctcagtacagttcaaggtgtagcaagtgtacccacacagatagcattcaacaaaagctgcctcaactttttcgagaaaaatactttattcataaatatcagttttattctcatgtacctaagttgtggagaaaataattgcatcctataaactgcctgcagacgttagcaggctcttcaaaataactccatggtgcacaggagcacctgcatccaagagcatgcttacattttactgttctgcatattacaaaaaataacttgcaacttcataacttctttgacaaagtaaattacttttttgattgcagtttatatgaaaatgtactgatttttttttaataaactgcatcgagatccaaccgactgaattgttaaaaaaaaaaaaaataaagattcttaaaagaattacagtgtgtgcaagtttgctttgaaaaaaggatgaagggcaggagtattcaatggtcttggttccgatgataattattacttaacatagctgagaatcaaactgtagcaatgtctaatataaatagacttgggagatcgttttgaaatggtggatccttttagtatttaaatggagagtttgagtattcatgtgactgtatggtcccaaagttaatgctatttatgaaacagttttgtaagaacataatgaagttggtaaaagctaagcgttctgcacaataaacagttcccagtttggggctttttcaaggctaatgaagttattgttggtctagaaaaatagtatttacttaataaaactctgtttgaaattgttctgtggatttttagagcagaatttgaaacaaatgtaatgcaaataaatataaagataaagtgtcttaaagacaatattctgaaataaaagatataaaatataatttaaa

SEQ ID NO: 32858 - DNA, 9191 bp, Homo sapiens
  source 1..9191: mol_type = unassigned DNA
gcgcgccccggcgccgcgcccggccgggagccgcctgttgatcgccgcgctcgccccggccacggcgccgcccctgttctcccggccccgctccaccggggctgacggactgacggccagcacagccggctccgggatgagcgcacggacggtattctgaagtctcaggaaactggaccatttaaatgtgcatggcccatgagaaaggcttataagaagccatggcactcccctttcaaaaagagctggagaaatacaagaacattgatgaagatgagcttcttggcaaactctcagaagaggaactgaaacagttggaaaatgttctagatgacctagatcctgagagtgccatgctgccagctggatttcgacagaaagaccagacacagaaggcagccaccggcccctttgaccgcgagcacctcctcatgtacctggagaaggaggctttggaacagaaagacagagaggactttgtgcccttcactggagaaaagaaagggagagtctttatccctaaagaaaagcctatagaaactcgtaaagaagaaaaagtgacccttgacccagaactggaagaagctttggccagtgcctctgacaccgaactctatgatcttgcagctgtccttggagtacacaatttgctcaacaatccaaagttcgatgaagaaacagccaacaataaaggtggcaaaggacctgtcagaaatgttgtcaaaggtgaaaaagtaaagccagtatttgaggaaccaccaaatcccacaaatgtggaaataagcctgcagcagatgaaagccaatgatcctagcttgcaagaagtcaacctcaacaacattaagaacattccaattccaaccctgagggaatttgcaaaggctctggagaccaacactcacgtgaagaagttcagcctggccgcaactcgcagcaatgaccctgtggccattgcttttgcagacatgctgaaagtaaacaagaccttgacaagtctaaacatagaatccaattttatcactggaactgggatcctggccctggtagaggcactgaaagaaaatgacaccttgacagaaatcaagattgacaaccagaggcagcagttgggaacagctgtagagatggaaattgcccagatgctggaggagaattcaaggatcctcaagtttggataccagtttaccaagcaagggccacgaacaagggtggcagctgccatcacaaagaataatgacctggttcgtaagaagagagttgaagcagaccgaaggtaaacttccttgaggagaagtgaagtttcactgtggtatggccattgaaaaacaaaaactcttcttcttccccatcaggaccattttatcaaagttcgttcatttccgttaaccacataactaataatttaattgttattcttttttagcactacttatttatcttggattttgtaatatatgcaattgttttatttgctcatgggcacttctggcaacttgacaaatggaccgatgcagattttagagagtgacgacatggaaaatgaatttaaccactttcttattgggttgtcttgctttcttacatgaacttgtttttttaatcactgaaaggaatttagtgtataatatgtgtttgtaactgtgattatgatagaggcctatctctgtttacatgcatagctttgagttaggctaaatacatcagaagtgttctactgaccacataagaagttagtattgccaatctttcactgcatgtgaaaatgtgaccaatttagcacaaattctctcttagttccagaaaaatcagtaaatgcacatgccctgttgattggagatcagtagtgtcatcttcataaagcaagacaacattatgacactttaaaacagtagcaaagaagtctatttattaacccacaaatgtagcatcaagccagactcacaggtagcaaaatgaattacacacctacttttactgactattcaacataaattgaatctttaacatgactttaaaggctatttacaaagctgttttaaagtttttcaaacatgatagaaattttctaaattttagtaagagagaagcttttaaaacagtacattcctgaataaaacaacaatattgtatcttaatcaaggctgtctgatgcagatgattgcattttttggcaaattttagaagcatttattgctttgtctttagtgtaacaagatcactggattaaatataaacattcaggttaattatctagatttttgtccacagtatatgatccatccagacatttgcaaacgtcaggagaaaaatgtgaattatttatccagatgcatgtcatctcaaggacaaagcctgtgaaagtacaagtgagatggttgcattgtagtatgcattaatctttcaatgtagtggtgtaaaaatgcagtgctaaactaatgaagcaggtgactgcagcctttggctcaagctcacaactctgataactgtcagtgcctgaggttgtgattggtgacattctgacactgcccaaggcaactcaccctctattcctcctttctcccctccctttcttccaattcattgtcttttttttcctcttttctctgtaatttgttactaaacaaattccagaatttgtttagtagctgagtgttcctgagttgcctagtagcaataaaacaagtgaataggaaaataattaatatattattctatttagcttgtaaaacacatggaatctgtttaagatagcccttgtaaaattgaacatttacctgtattgtaagtacccacatctgtgtctctgaagtcctttgaaacatctcattatcttgaaatttttttaatgtttgagaacaccataagcagaatattctaacacctttggcccctgaaaatcctttaattagtttatggcttcatctccttatctatttaaaaaacatagtaaataatgtttatggttttcagtctgatttttccttccctttcacccatttaggtgtgatgtgttggagtcaacttgtacaggcttgccaactgttatattttcaagaattttgcaaactggttgttcaatacagccattatttaaaattaaatgatgtgcacttacaactgaatgaattatattaaggacagaagtaacaaatactgtactcaaaaatcttacattttactattttctaacctcttagattatttacatctagtaggtatgtatgtagaaatattaccaaacagtatgctactgaacgtatcctctcaactccatgttcactaccttcttgttactacagtggcttgaaattggccatggtagaaatatttacaccacagaaattagcaatatgtaagaaattggggttttctccctctccagattgctggttgataaacattcatcagcacaccactgggtgaaattatacatttttttatacatatgtttcgcttatcatgttgccgaagggaagaacatttctcttagatgtcttttctcctctttggatttgttacaaacctgtttaagtgctgagtccctgacctgcctctccaagtaagcctttttcctttttttttttttttttcttactctcattcttgccttgactcttaaaatcctggaccctatagagcattccttgcagccccacagtgctgtgggctgggggctaaagcagttcttggcaaactctggcagaaagcaagaaaaaaagaatcagaattcaatcatggctgtttcttttgtacaagcagttgttgatagtattaaagcaagataatgggacattatcaaaaatatagcactgtttttaccttatgaaatagttgggttgcatgcaacagagtctatgaaatcaaatgttttttactaatcagtttgttttcttattacctgtgtttttaaagtggcttgaaaggtggcatttccatgagtgtgcacatattgatgataacccttagaaaaacatacacttgaggagcctatccatcatttaattagcctaggacttcatctccctctctgcccaaagtgtggaagtggtagctctttcatgatcatgggcacagttaatcctttgctatccattgtgatggggcataatgtatataaaatatttttctatgtatttgttctgccagatactgtgttgagatatttggcaatatctggataactgactgaagggagataacttctccccaggcctatctccctcccccttttagagttgtgcaggtccactttaagtgtaaaatcactcacctggacttgtgggcttgtatcaccaacatctattatggcacatgtagatgacatttaggagaaaaaccttagaagtctagaaatcatatgattagttcagcactgcagctccccatctgcttatagtgtataactggaagctctttcatcctcatcagcatgattaaatgacttcgtttctttcatctttggagggtataatgtaaataagtgtcgtgtgtgtatgtgtgtgtgtactgtcagatatctaactaggtatttggctacatctggacaactgattgaagggagatgctctctccccagtcctcttcccttgtcctttttagaattgctgcaggcccaggttaaatatgaaattactccctaggctttgcagtttatgttaccaaccaccacattttatagctatgtagaggatgactcttaggaaataaatattagaagcctagaaatcatttagttgttctagcaccaaatctatccatttgcctaatgtatttaacattccatcctcatcaacatgatgaagcccctttcttccatctttgtagggcacattgtatataaatattttgtacataaagatcatcaaataccataatggggtatttggcttcatctggaaaattgactggagggagatgctgtctcccagccctgcttccctcgtccctgtccaagttgctgcaggcccaggttagaagattaccaacctggaggggcatgcagttcatcttacaataaaagcccattcatttaaaaactcagaaatcatcccagtgcctgtactcctcaaaccaatttccctaagggaagactggcacaccagcccaaagagcaggtgcttctcttccaacagaaacatggcccctgacagggcaccagcattagggaaaccaatgtcctccgaatagctgccatgagaacatttcagatgctcaaactgaaaattcttaaaaccaatattaagcatcagcatgctttaagtgtaagatagccctttggaatttacaaacacatgtgcagctatttccttcttcacagatatgatgtactcagccccctcctaggcactacgaagaagacagaggaagcataaaaattctggactaatataattttatatgtgtttctgagattggggagtagactgagtgccttttttacaaagaagatcccatatttaattcaagtatttatagcatcagcaaaaatgggcagagggcgggaagttgagaacactaggttctgtgctatgttacctgtattcagtagaagtgtttctggagtcaggttttaagtcatgatcctgaagcttccttcccctcttccactaatgatgcaataatagctgttttcattttaacgagcagagaactaagaggaaaggtcctagctctgccttccacttgcagcttccctttacctcctcttattgctttcatctcaaatatccctgctactcaaccaatcctaaagctaaagtactgagatgcacacaaaggaaaggtgtgagagtgcttggaagcatccagctgagcccactggatgaaaatcagacgatagggcctcctgttgtaatatactagccagagaaaagcgccaagaacttcagggatattattcactgctttattgctccctaaccctagatcagattggattttactttgtagttcaggagttaagaagtcaaattgctgaccgaggtggggaaggatgatggaaattaaaggtttacatttgtttaatggcagaactgagatttgctcagcttatctctttcccatctgtctgtaatagcaatgactgaataatcagtagaccaatggaagaggagttgcaagtttaaatttgtaacctgactctgggttctgttctaggaatagtgcatgttttagaggctttgccagttgggatacattgttgacttgggggaggatgaaggagagaactgatgacctagacatagaaaagagtagttaactaactagatgttcttctgatctcttccatggtagacattctgagcacattggcccagttagttggtatggtgaaggggcaccgtactaacagatttggagactgaaacctaatcccatcaccaacacttagcaggtatatgatcatgggcaattcattcaattgcctgccaattatagactatatagggggaagagcactggatttggagtcaagaaacctggacacttggctccacacttccttagctgggtaactttgggcaaaccgcttggtctctcaagcctaaggttcttcagctataaaatgggaataatacttcactaactacctcacagagttgtggtaagaatataatcagataactggataaaaacactatataaactggaaagcgccgtacaaatgtgagagatcagttttattatcaaatcactgttttccactgcctcttgaatcggctttattctaaccaaccattacatctttctcatcttttggagtatgggtaattgaggcttgggtgtgtcatcagggactggagttatttcagctcccatgtagaggtgggagaggtggttgatggggcagtggaagttagataccagcgatgtatatggtaggacattttcctgggtcactttgacagtaccttgggaaattgtcagtccttgcagagggcctaggctgggcacaagggagaaagcgaacagttgactaagaattgaggggagggtctggagcgctactgccctcctgtcattgctgtgggtgggagaggctaagacttcaggtttgactggaggcctaggagagaagagtgtccttagggtttcaagaattttaatgcctagcagctgagtaacaggcattagttctgatagatagtgaaggggagaaagtgccacctgttgtgagatcacctctccagggcagcagctgccttgttatcaccagcaaccttagccctggtcagtaatatttctgctaagaaaggttttgaagcatggcctccaatgactttcataagcccttggaggcaggactgtgtctcatccatctttgtatcttcagtaccatcttgtaaggtgccttgtacatagtaggtgcttaatgaacaaatgttgcttgaatttagctgtcgtccagccccacagagttatgctccatttgccaccatgtgatatttttgagaaacaatagtgatttggatgccagctctatgtgactttgggcaagactctccatctatcttgtcttcatttcatctgtaaaatgaagtgagtagattcaatgctccctaaggtcccttccagctccaatacttgacaagcttgtgattctaaatcgtttccgttgcctctgaacatgggtgagtaatgcctccactgcagctgtttctctccaggaggctttgttcagaggaggtctgactattgcacagccagttttttcttcctcttcagcagttctttactgtcttcagaatggttctggataagcggccttttctgaaaggatatttaaaaatatatactatttaggctgggcccagtggctcatgcctgtaatcccagcactttgggaggtgaaggtgggtggatcacctgaggtcaggagttcaagaccagcctggccaacatggtgaaaccccgtctctactaaaaatacagaaattagctgggccctgtggcaagagcctgttatcccagctactggggaggctgaggcaggaaaatcgcttgaacccaggaggtggaggttgtagtgagccgagatcacaccactgcactccagcctgggtgacaagaacgaaactccatctcaaaaaataaaataaaatatatactatcttgctcctcagaaccagtggggaagaagagggaaggcaaagaaagaaactgagcatagtaaacacagcatttttttgtaggctcttatttaaaatgtgtgtgtgtgtgtgtatgtgtgtgtttctgagtaagtattgactgggaaaaagagagaagtcaatcaaaagtatactgtgcaattgagagaggctggcccaagatttaaaacttcctgtgggtaatctaactgtgagtagataggaatcggccatatgacgaaatgagatcaataggaaatgtgctttttgaggaaattttattttagtaccaaatgttgccagtgacaatcttcagttaagaagtaagttattctgacctaaaattcttatctctgccactttggtttaaaaacaaaaacccttatatacatggaatagttatattttaattaagcatttattttagttgttttcatccattcaagcaaaatgaataagcagcatttttcattgcacttaaaaatgtaaaatacctgcatgccactaatctgtaacattttaccagttcagatgcctgtaatgtgtgactttatgtgtgtctgtgttgttttgaagagaataaaggaaataatactttgcaaactgtttaaacaagtgtttaaacttctattggcaacatttattgggctaagcagttattgaaaactccgcatagttttattttccatttgaaacttcaatcaaatcaagactattatattcattagggaattaaagactaatttgctttttaaatgtgaagttgaacactgtgtggaaagtaaatgtgtgatgaagcaaaatgtataaagtatgaaatattatacttttaccctggataattattcaggaccccagttggcccaaataggtgcaatttttaatcctttgaaattagccagccagacctaatgctaaggtaaatgtaaactgttttaattaattaagatctttctgctttcgaaggtataatgtatctatttctgtcaggaatgatatttccaaatgaaaatgtaaagaacattgggaaataataaactttcctttcaaagtaaaagtaaa

SEQ ID NO: 32859 - DNA, 1490 bp, Homo sapiens
  source 1..1490: mol_type = unassigned DNA
ggactgacggccagcacagccggctccgggatgagcgcacggacggtattctgaagtctcaggaaactggaccatttaaatgtgcatggcccatgagaaaggcttataagaagccatggcactcccctttcaaaaagagctggagaaatacaagaacattgatgaagatgagcttcttggcaaactctcagaagaggaactgaaacagttggaaaatgttctagatgacctagatcctgagagtgccatgctgccagctggatttcgacagaaagaccagacacagaaggcagccaccggcccctttgaccgcgagcacctcctcatgtacctggagaaggaggctttggaacagaaagacagagaggactttgtgcccttcactggagaaaagaaagggagagtctttatccctaaagaaaagcctatagaaactcgtaaagaagaaaaagtgacccttgacccagaactggaagaagctttggccagtgcctctgacaccgaactctatgatcttgcagctgtccttggagtacacaatttgctcaacaatccaaagttcgatgaagaaacagccaacaataaaggtggcaaaggacctgtcagaaatgttgtcaaaggtgaaaaagtaaagccagtatttgaggaaccaccaaatcccacaaatgtggaaataagcctgcagcagatgaaagccaatgatcctagcttgcaagaagtcaacctcaacaacattaaggcttttgcagacatgctgaaagtaaacaagaccttgacaagtctaaacatagaatccaattttatcactggaactgggatcctggccctggtagaggcactgaaagaaaatgacaccttgacagaaatcaagattgacaaccagaggcagcagttgggaacagctgtagagatggaaattgcccagatgctggaggagaattcaaggatcctcaagtttggataccagtttaccaagcaagggccacgaacaagggtggcagctgccatcacaaagaataatgacctggttcgtaagaagagagttgaagcagaccgaaggtaaacttccttgaggagaagtgaagtttcactgtggtatggccattgaaaaacaaaaactcttcttcttccccatcaggaccattttatcaaagttcgttcatttccgttaaccacataactaataatttaattgttattcttttttagcactacttatttatcttggattttgtaatatatgcaattgttttatttgctcatgggcacttctggcaacttgacaaatggaccgatgcagattttagagagtgacgacatggaaaatgaatttaaccactttcttattgggttgtcttgctttcttacatgaacttgtttttttaatcactgaaaggaatttagtgtataatatgtgtttgtaactgtgattatgatagaggcctatctctgtttacatgcatagctttgagttaggctaaatacatcag

SEQ ID NO: 32860 - DNA, 4668 bp, Homo sapiens
  source 1..4668: mol_type = unassigned DNA
gagtgcgcacgcgcgtcggaggcgaaggaggaacccaccgcacctacagggcggtcgagtgagggagctgctggcgggtgggtctggcaactctttgggaggccgacgcgggcggaccggcgggtgctgggaaccgagcctcggcttgcggccggcagtttccgtgggtctgtgaagaggtcggcggcccctgcgggcgccagtcagctttaagaaaaagtagagatcacttctgactgtactgaacagcaaaaattaagtgacttgctgccctgcacatcatggcactgccattccgtaaggacttagaaaagtacaaagaccttgatgaagatgagctccttgggaatctgtcagaaacagaactgaaacaactggaaactgttttggatgatcttgaccccgagaatgcccttctgcctgcagggttccggcagaagaaccagacatcaaagtccaccacagggccatttgatagagagcatctcctttcatatctggagaaagaagcattggagcataaagacagggaagactatgtgccctacactggagaaaaaaaagggaaaatatttatccccaaacagaaacctgtacagacttttacagaagaaaaagtgtctcttgatccagaattagaagaagctttgacaagtgcttctgatacagaattgtgtgacctcgcagcaattcttgggatgcacaatttgataacgaatacaaagttctgtaatataatgggaagtagtaatggtgttgaccaagaacatttttcaaatgtggtcaaaggtgaaaagattcttccggtatttgatgagccaccaaatccaaccaatgtagaagagagtttgaagagaactaaagaaaacgatgctcatcttgttgaagttaatttgaataatataaagaatatcccaattccaaccctaaaagattttgcaaaggctttggaaaccaacacacatgtgaaatgtttcagtcttgcagccacccggagcaatgaccctgttgctactgcttttgcagaaatgctgaaagtgaacaaaactttgaagagcttaaatgtggagtccaactttatcacgggagttgggattctggcactgattgatgcgttaagagataatgaaaccctggcagagctcaagattgacaatcagaggcagcagttggggacagctgtagaattggaaatggccaagatgcttgaggaaaatacaaatatccttaaatttggatatcagtttacacagcagggaccacgaaccagagcagctaatgctataacaaaaaacaatgacttagtgcgtaagagacgagttgaaggagatcaccagtaagtctgcaaaggtgtaatctttggaagacttcagaagatcaccaagggctcatgttggtgacatcatgtaaaattttcctgggtagaagggaaaagactggaaaaatttttttagtgacatgcattttttttttagttgttatcaaattgtaaaatcagtaatgtgatattttatattctgaaacatttctactttctgctaaaatcaattttaatttagtttaattgaatgatttatgatgaatcttgggcaaaaaaatacaactgtaaaaaatttcacaggtcatttgtgtagaataatttgaacattgtgaggaccaatcttttttaaatcaaaagggatgttgctggtatcagaattgttattgcttcatttagacataaaacacttaagtgttttcttcactccgtgacctggagagttttccattttttaaaatacatgaacttggcaagggtgtgatttttctttatcaagagaacaaaatgccagaatgttaaaacagttaactcaaaatctagtcatctgtgtaggagctaaagcaggtctccagggagagagggtggtcgtctgtgcattccaggttactgcacttgtctgatgtgacgtagcaacacccaggtcttcttaaaacaaagtcatcagctttgccaggttacatactttatttaaaagtatagtgaggtcgaagttcattccagtgtttcattttaataatgtgggcattattaaatttttgtggaagctaatagtaaaaaataaaagctgttttcaccacctccctccccaccccccaaaaaaggcgtacagccaactcttagttatttagggtaagagaaaaaagaaaactgttaaacaatgaaatcaaagataataaatatgatagatttccagtatgaggcacttgcaaaacagtcatttaaactgatggttactgtaagtcagttggaagctggcatgtatgtaaattacttggtgttacaccatatccgaagaagttcctatgtgcagtgcagaattgcataaacagtatttaatcactgctacaaatcttccaaccaagaaggaaaactgctattcttcataaatctaatttttagtatatgcttcctttcatcttatacttttatcaatatttataaaagtcatttctataataaaagcagtctttcttgctcaaagtattaaggtgaacaattgaatagagtactgtggtcgggagactgatttgagactgcagagctgatgctgggtagagggtctggacttgtattcatgttctgtctcagggcagcccctggagcaggagatggcagaggcatttacagctgcagaaaacagggaggaatggaatctgaggtagccctggcctcaaaattcaggcctggctgtatcatttacagagatttttctggagggaaaagtctcatttctgaggaaggcaaggtggctaatcattattaattttttttaaactttttgggccgggcgcagtggctcacgcctgtaatcccagcacttttgggaagccaaagtgggtggatcacttaaggtcaggagttcaagaccagcctggccaacatggtgaaaccctgtctctactaaaaatcaaaaaagtagccgggtgtggtggtgcacacctgtaatcccagctactcaggaggctgaggcaggagaattgcttgaacctgggagatggagattgcagtgagctgagatcgtaccactgcactgcagtctgggtgacaaagcaagactctgtctcaaaaaacaaacaaacaaacaaactttttgaaattgaattgcaatatgtctgctactttggcttgggctggacagtttatctaataagcaaggcagcttcttgtgtgctatggtaataagccttcttaacaggctaagcttccctcataagaactgtggtgtttctctttttttttttttgttttggtttgttttggttttttggttttgttttgttttgttttttaaatcagtatccaatgttttataggggccaaaggttaactttgcactattccctgtcagttaaaggccactgatatttttctaagttagcaaggctcacttgcttgctttcttgcctcccttgcctccatccctctcccttcctaccttctctatttacctatttctctccctccctctcttctcctctctttttttttccccgcatatgcagctttttgattgtacttgattttatagagactgcacagttccagcaagattgggagtcaggcatggagcaggcatctcaggctaccagaaagaattggtcacctagactttcagtcaggcatcctcgtttgcattgtcctgtaagtcaattagttgataaatagttcccccttcatcccttaagttttgtttttgtttttgtttttaatataggtaagtgggactctacctaaaattttgcatcatacttatgggtaatatctttttcatatattatttatcaaagtatgaagttgagtattttgcttgtaccatttcaattctgcattatagtagttcattgtataactgaaagaaatgatttcttcataagtgacattaaatatgaacattcatccaattgaatttacaaaatctttccaaaattataagggagaaaaatcgggtttacttcaatctttaaaaatctggcacctcttagtaactttcagtatttctaaattgctctaaaattttataataaatagattagggttttgcaatagtcttaatttttaagccaaaggttttctgagaccttaggttttgtagtctaaccagcttatgtggttatttaaaagaatattctttgtgtttttaaattgctatttttaaaaaagctttttattacccattttataaaatgttatactcatatttgtctgaatttttccagtattcctacatgaaattgtatgtattaaaaactcaatattagtggcaaatattaatactattaaaatggattttggtgctatattcttgtagctaaagcctagtagaattctcaagaataggtgaaatacactttcaaagttgcctgtcatttaaaagaccaaataagcattttgtattaaataaattagcagatggttagagacttcaaggagagttagcttggtcatttaattgcgacttcatgttatttgattgaaataacccacatccttgctttgtataagatattcgctctggagaagttacatgtaaatagaattctataaattgttttccagttgaccgagtatctgttgtgtttttgtttaaaaagaggattccatgacataataaaaattattttaaaaaa

SEQ ID NO: 32861 - DNA, 2054 bp, Homo sapiens
  source 1..2054: mol_type = unassigned DNA
gactgtactgaacagcaaaaattaagtgacttgctgccctgcacatcatggcactgccattccgtaaggacttagaaaagtacaaagaccttgatgaagatgagctccttgggaatctgtcagaaacagaactgaaacaactggaaactgttttggatgatcttgaccccgagaatgcccttctgcctgcagggttccggcagaagaaccagacatcaaagtccaccacagggccatttgatagagagcatctcctttcatatctggagaaagaagcattggagcataaagacagggaagactatgtgccctacactggagaaaaaaaagggaaaatatttatccccaaacagaaacctgtacagacttttacagaagaaaaagtgtctcttgatccagaattagaagaagctttgacaagtgcttctgatacagaattgtgtgacctcgcagcaattcttgggatgcacaatttgataacgaatacaaagttctgtaatataatgggaagtagtaatggtgttgaccaagaacatttttcaaatgtggtcaaaggtgaaaagattcttccggtatttgatgagccaccaaatccaaccaatgtagaagagagtttgaagagaactaaagaaaacgatgctcatcttgttgaagttaatttgaataatataaagaatatcccaattccaaccctaaaagattttgcaaaggctttggaaaccaacacacatgtgaaatgtttcagtcttgcagccacccggagcaatgaccctgttgctactgcttttgcagaaatgctgaaagtgaacaaaactttgaagagcttaaatgtggagtccaactttatcacgggagttgggattctggcactgattgatgcgttaagagataatgaaaccctggcagagctcaagattgacaatcagaggcagcagttggggacagctgtagaattggaaatggccaagatgcttgaggaaaatacaaatatccttaaatttggatatcagtttacacagcagggaccacgaaccagagcagctaatgctataacaaaaaacaatgacttagtgcgtaagagacgagttgaaggagatcaccagtaagtctgcaaaggtgtaatctttggaagacttcagaagatcaccaagggctcatgttggtgacatcatgtaaaattttcctgggtagaagggaaaagactggaaaaatttttttagtgacatgcattttttttttagttgttatcaaattgtaaaatcagtaatgtgatattttatattctgaaacatttctactttctgctaaaatcaattttaatttagtttaattgaatgatttatgatgaatcttgggcaaaaaaatacaactgtaaaaaatttcacaggtcatttgtgtagaataatttgaacattgtgaggaccaatcttttttaaatcaaaagggatgttgctggtatcagaattgttattgcttcatttagacataaaacacttaagtgttttcttcactccgtgacctggagagttttccattttttaaaatacatgaacttggcaagggtgtgatttttctttatcaagagaacaaaatgccagaatgttaaaacagttaactcaaaatctagtcatctgtgtaggagctaaagcaggtctccctccccaccccccaaaaaaggcgtacagccaactcttagttatttagggtaagagaaaaaagaaaactgttaaacaatgaaatcaaagataataaatatgatagatttccagtatgaggcacttgcaaaacagtcatttaaactgatggttactgtaagtcagttggaagctggcatgtatgtaaattacttggtgttacaccatatccgaagaagttcctatgtgcagtgcagaattgcataaacagtatttaatcactgctacaaatcttccaaccaagaaggaaaactgctattcttcataaatctaatttttagtatatgcttcctttcatcttatacttttatcaatatttataaaagtcatttctataataaaagcagtctttcttgctca

SEQ ID NO: 32862 - DNA, 447 bp, Homo sapiens
  source 1..447: mol_type = unassigned DNA
gggagtgcgcacgcgcgtcggaggcgaaggaggaacccaccgcacctacagggcggtcgagtgagggagctgctggcgggtgggtctggcaactctttgggaggccgacgcgggcggaccggcgggtgctgggaaccgagcctcggcttgcggccggcagtttccgtgggtctgtgaagaggtcggcggcccctgcgggcgccagtcagattgggacttgactgagattgatccagggctagttaccatgtatttcctgatggaagaatgttaactttaagaaaaagtagagatcacttctgactgtactgaacagcaaaaattaagtgacttgctgccctgcacatcatggcactgccattccgtaaggacttagaaaagtacaaagaccttgatgaagatgagctccttgggaatctgtcagaaacagaactgaaacaactggaa

SEQ ID NO: 32863 - DNA, 1267 bp, Homo sapiens
  source 1..1267: mol_type = unassigned DNA
ccgggctcctcctgctgctgggacagtgctctagtagaacagacagacctactgacacaggggaggtgagaagggaggtgaccaccaggactggctctgtgagtaccacacagtggggagggggtgggggccaccatgtcatcatatcagaaggaactggagaaatacagagacatagatgaagatgagatcctaaggaccttgagccccgaggagctagagcagctggactgcgaactacaggagatggatcctgagaacatgctcctgccagctggactaagacaacgtgaccagacaaagaagagcccaacggggccactggaccgagaggcccttttgcagtacttggagcaacaggcactagaagtcaaagagcgtgatgacttggtgcccttcacaggcgagaagaaggggaaaccctatattcagcccaagagggaaatcccagcagaggagcagatcaccctggagcctgagctggaggaggcactggcacatgccacagatgctgaaatgtgtgacattgcagcaattctggacatgtacacactgatgagtaacaagcaatactatgatgccctctgcagtggagaaatctgcaacactgaaggcattagcagtgtggtacagcctgacaagtataagccagtgccggatgaacccccaaatcccacaaacattgaggagatactaaagagggtccgaagcaatgacaaggagctggaggaggtgaacttgaataatatacaggacatcccaatacccatgctaagtgagctgtgtgaggcaatgaaggcaaatacctatgtgcggagcttcagtctggtagccacgaggagtggtgaccccattgccaatgcagtggctgacatgttgcgtgagaatcgtagcctccagagcctaaacatcgaatccaacttcattagcagcacaggactcatggctgtgctgaaggcagttcgggaaaatgccacactcactgagctccgtgtagacaatcagcgccagtggcctggtgatgcagtggagatggagatggccaccgtgctagagcagtgtccctctattgtccgctttggctaccactttacacagcaggggccacgagctcgggcagcccaggccatgacccgaaacaatgaactacgtcgccagcaaaagaagagataacactgcatttccctttaccaactagcgctgggagcactggacacttaaatcctcatctgtcctcctttcctgtaaataaaagcccttctatcca

SEQ ID NO: 32864 - DNA, 1024 bp, Homo sapiens
  source 1..1024: mol_type = unassigned DNA
agaacagacagacctactgacacaggggaggtgagaagggaggtgaccaccaggactggctctgtgagtaccacacagtggggagggggtgggggccaccatgtcatcatatcagaaggaactggagaaatacagagacatagatgaagatgagatcctaaggaccttgagccccgaggagctagagcagctggactgcgaactacaggagatggatcctgagaacatgctcctgccagctggactaagacaacgtgaccagacaaagaagagcccaacggggccactggaccgagaggcccttttgcagtacttggagcaacaggcactagaagtcaaagagcgtgatgacttggtgcccttcacaggcgagaagaagggtgtggtacagcctgacaagtataagccagtgccggatgaacccccaaatcccacaaacattgaggagatactaaagagggtccgaagcaatgacaaggagctggaggaggtgaacttgaataatatacaggacatcccaatacccatgctaagtgagctgtgtgaggcaatgaaggcaaatacctatgtgcggagcttcagtctggtagccacgaggagtggtgaccccattgccaatgcagtggctgacatgttgcgtgagaatcgtagcctccagagcctaaacatcgaatccaacttcattagcagcacaggactcatggctgtgctgaaggcagttcgggaaaatgccacactcactgagctccgtgtagacaatcagcgccagtggcctggtgatgcagtggagatggagatggccaccgtgctagagcagtgtccctctattgtccgctttggctaccactttacacagcaggggccacgagctcgggcagcccaggccatgacccgaaacaatgaactacgtcgccagcaaaagaagagataacactgcatttccctttaccaactagcgctgggagcactggacacttaaatcctcatctgtcctcctttcctgtaaataaaagcccttctatcc

SEQ ID NO: 32865 - DNA, 493 bp, Homo sapiens
  source 1..493: mol_type = unassigned DNA
agacagacctactgacacaggggaggctctgtgagtaccacacagtggggagggggtgggggccaccatgtcatcatatcagaaggaactggagaaatacagagacatagatgaagatgagatcctaaggaccttgagccccgaggagctagagcagctggactgcgaactacaggagatggatcctgagaacatgctcctgccagctggactaagacaacgtgaccagacaaagaagagcccaacggggccactggaccgagaggcccttttgcagtacttggagcaacaggcactagaagtcaaagagcgtgatgacttggtgcccttcacaggcgagaagaaggggaaaccctatattcagcccaagagggaaatcccagcagaggagcagatcaccctggagcctgagctggaggaggcactggcacatgccacagatgctgaaatgtgtgacattgcagcaattctggacatgtacacactgatgagt

SEQ ID NO: 32866 - DNA, 1670 bp, Homo sapiens
  source 1..1670: mol_type = unassigned DNA
cgctcctccgcccgaccgcgcgctcgccccgccgctcctgctgcagccccagggcccctcgccgccgccaccatggacgccatcaagaagaagatgcagatgctgaagctcgacaaggagaacgccttggatcgagctgagcaggcggaggccgacaagaaggcggcggaagacaggagcaagcagctcgaggaggacatcgcggccaaggagaagttgctgcgggtgtcggaggacgagcgggaccgggtgctggaggagctgcacaaggcggaggacagcctcctggccgccgaagaggccgccgccaaggctgaagccgacgtagcttctctgaacagacgcatccagctggttgaggaagagttggatcgtgcccaggagcgtctggcaacagctttgcagaagctggaggaagctgagaaggcagcagatgagagtgagagaggcatgaaagtcattgagagtcgagcccaaaaagatgaagaaaaaatggaaattcaggagatccaactgaaagaggccaagcacattgctgaagatgccgaccgcaaatatgaagaggtggcccgtaagctggtcatcattgagagcgacctggaacgtgcagaggagcgggctgagctctcagaaggcaaatgtgccgagcttgaagaagaattgaaaactgtgacgaacaacttgaagtcactggaggctcaggctgagaagtactcgcagaaggaagacagatatgaggaagagatcaaggtcctttccgacaagctgaaggaggctgagactcgggctgagtttgcggagaggtcagtaactaaattggagaaaagcattgatgacttagaagagaaagtggctcatgccaaagaagaaaaccttagtatgcatcagatgctggatcagactttactggagttaaacaacatgtgaaaacctccttagctgcgaccacattctttcgttttgttttgttttgtttttaaacacctgcttaccccttaaatgcaatttatttacttttaccactgtcacagaaacatccacaagataccagctaggtcagggggtggggaaaacacatacaaaaaggcaagcccatgtcagggcgatcctggttcaaatgtgccatttcccgggttgatgctgccacactttgtagagagtttagcaacacagtgtgcttagtcagcgtaggaatcctcactaaagcagaagaagttccattcaaagtgccaatgatagagtcaacaggaaggttaatgttggaaacacaatcaggtgtggattggtgctactttgaacaaaaggtccccctgtggtcttttgttcaacattgtacaatgtagaactctgtccaacactaatttattttgtcttgagttttactacaagatgagactatggatcccgcatgcctgaattcactaaagccaagggtctgtaagccacgctgctcttccgagacttccattcctttctgattggcacacgtgcagctcatgacaatctgtaggataacaatcagtgtggatttccactcttttcagtccttcatgttaaagatttagacaccacatacaactggtaaaggacgttttcttgagagttttaactatatgtaaacattgtataatgatatggaataaaatgcacattgtaggacattttctaaa

SEQ ID NO: 32867 - DNA, 1295 bp, Homo sapiens
  source 1..1295: mol_type = unassigned DNA
gagaggaggaaggggggcaggagaaaaaagcttttccaaaaaagtattggctgtcttgaggaatgcggtcgcccccttgggaaagtacatatctgggagaagcaggcggctccgcgctcgcactcccgctcctccgcccgaccgcgcgctcgccccgccgctcctgctgcagccccagggcccctcgccgccgccaccatggacgccatcaagaagaagatgcagatgctgaagctcgacaaggagaacgccttggatcgagctgagcaggcggaggccgacaagaaggcggcggaagacaggagcaagcagctggaagatgagctggtgtcactgcaaaagaaactcaagggcaccgaagatgaactggacaaatactctgaggctctcaaagatgcccaggagaagctggagctggcagagaaaaaggccaccgatgctgaagccgacgtagcttctctgaacagacgcatccagctggttgaggaagagttggatcgtgcccaggagcgtctggcaacagctttgcagaagctggaggaagctgagaaggcagcagatgagagtgagagaggcatgaaagtcattgagagtcgagcccaaaaagatgaagaaaaaatggaaattcaggagatccaactgaaagaggccaagcacattgctgaagatgccgaccgcaaatatgaagaggtggcccgtaagctggtcatcattgagagcgacctggaacgtgcagaggagcgggctgagctctcagaaggccaagtccgacagctggaagaacaattaagaataatggatcagaccttgaaagcattaatggctgcagaggataagtactcgcagaaggaagacagatatgaggaagagatcaaggtcctttccgacaagctgaaggaggctgagactcgggctgagtttgcggagaggtcagtaactaaattggagaaaagcattgatgacttagaagacgagctgtacgctcagaaactgaagtacaaagccatcagcgaggagctggaccacgctctcaacgatatgacttccatgtaaacgttcatccactctgcctgcttacaccctgccctcatgctaatataagtttctttgcttcacttctcccaagactccctcgtcgagctggatgtcccacctctctgagctctgcatttgtctattctccagctgaccctggttctctctcttagcatcctgccttagagccaggcacacactgtgctttctattgtacagaagctcttcgtttcagtgtcaaataaacactgtgtaagcta

SEQ ID NO: 32868 - DNA, 1606 bp, Homo sapiens
  source 1..1606: mol_type = unassigned DNA
cgcgcgcgcccgcctgcggtttgtctgcgcagccctggaggctgcgacttccggactgctcctggccgcagggggcgccgccatcgcacagagaggcctgggcggggcggaccggcgctgggcagccaggacagccgcggcagccgggtccgcagggcagcagccggcctctcccactgcagccctcccgcccgcctaccgtccggcgcgatggcggggagtagctcgctggaggcggtgcgcaggaagatccggagcctgcaggagcaggcggacgccgctgaggagcgcgcgggcaccctgcagcgcgagctggaccacgagaggaagctgagggagaccgctgaagccgacgtagcttctctgaacagacgcatccagctggttgaggaagagttggatcgtgcccaggagcgtctggcaacagctttgcagaagctggaggaagctgagaaggcagcagatgagagtgagagaggcatgaaagtcattgagagtcgagcccaaaaagatgaagaaaaaatggaaattcaggagatccaactgaaagaggccaagcacattgctgaagatgccgaccgcaaatatgaagaggtggcccgtaagctggtcatcattgagagcgacctggaacgtgcagaggagcgggctgagctctcagaaggcaaatgtgccgagcttgaagaagaattgaaaactgtgacgaacaacttgaagtcactggaggctcaggctgagaagtactcgcagaaggaagacagatatgaggaagagatcaaggtcctttccgacaagctgaaggaggctgagactcgggctgagtttgcggagaggtcagtaactaaattggagaaaagcattgatgacttagaagatcaactctaccagcaacttgagcaaaatcgccgcctcactaatgaactaaagctggccctgaatgaggattaaacttaagagtgaaaaaacttgggctgaattctaggcgtggagcccatgtgcagaaaatctaagactgtcctaccttcaactaatagagttgaaaacagttgctttctgcagaaatgcaaatgcaaggaattggctgaaaggctggccttgcctgcttgtttctctatatggctggaataattacgttctctttaatcacaaaacagcttttatggtagaatacttatatcaattcagcactgctccttgaaatagcaggtcctcttgtttgaactgataaataatgaggagcccccccaaaaaatgttttctatttcctgacagccatgagtcctactttaagtatgtatatatatatatatatgtgtgtgtgtgtgtgtgtgtatatattcctatcagatactcatattcctaacttctaaatatctggtatagtgtttgaaatatgattaaatgtacctatgcttgggcaaaatagcttttgaaaacaggaactcatgccagaagcccctggttgtctgaaaggtatgctttactcagtctaatggtgctgttggagtctggggagaatgtcatgctaataaatagaacactataaaaatattaagagaatgtcctaatgaagtgtgcatgaaacatgttgacaattttttatgag

SEQ ID NO: 32869 - DNA, 1800 bp, Homo sapiens
  source 1..1800: mol_type = unassigned DNA
gcactcccgctcctccgcccgaccgcgcgctcgccccgccgctcctgctgcagccccagggcccctcgccgccgccaccatggacgccatcaagaagaagatgcagatgctgaagctcgacaaggagaacgccttggatcgagctgagcaggcggaggccgacaagaaggcggcggaagacaggagcaagcagctcgaggaggacatcgcggccaaggagaagttgctgcgggtgtcggaggacgagcgggaccgggtgctggaggagctgcacaaggcggaggacagcctcctggccgccgaagaggccgccgccaagctggaagatgagctggtgtcactgcaaaagaaactcaagggcaccgaagatgaactggacaaatactctgaggctctcaaagatgcccaggagaagctggagctggcagagaaaaaggccaccgatgctgaagccgacgtagcttctctgaacagacgcatccagctggttgaggaagagttggatcgtgcccaggagcgtctggcaacagctttgcagaagctggaggaagctgagaaggcagcagatgagagtgagagaggcatgaaagtcattgagagtcgagcccaaaaagatgaagaaaaaatggaaattcaggagatccaactgaaagaggccaagcacattgctgaagatgccgaccgcaaatatgaagaggtggcccgtaagctggtcatcattgagagcgacctggaacgtgcagaggagcgggctgagctctcagaaggcaaatgtgccgagcttgaagaagaattgaaaactgtgacgaacaacttgaagtcactggaggctcaggctgagaagtactcgcagaaggaagacagatatgaggaagagatcaaggtcctttccgacaagctgaaggaggctgagactcgggctgagtttgcggagaggtcagtaactaaattggagaaaagcattgatgacttagaagagaaagtggctcatgccaaagaagaaaaccttagtatgcatcagatgctggatcagactttactggagttaaacaacatgtgaaaacctccttagctgcgaccacattctttcgttttgttttgttttgtttttaaacacctgcttaccccttaaatgcaatttatttacttttaccactgtcacagaaacatccacaagataccagctaggtcagggggtggggaaaacacatacaaaaaggcaagcccatgtcagggcgatcctggttcaaatgtgccatttcccgggttgatgctgccacactttgtagagagtttagcaacacagtgtgcttagtcagcgtaggaatcctcactaaagcagaagaagttccattcaaagtgccaatgatagagtcaacaggaaggttaatgttggaaacacaatcaggtgtggattggtgctactttgaacaaaaggtccccctgtggtcttttgttcaacattgtacaatgtagaactctgtccaacactaatttattttgtcttgagttttactacaagatgagactatggatcccgcatgcctgaattcactaaagccaagggtctgtaagccacgctgctcttccgagacttccattcctttctgattggcacacgtgcagctcatgacaatctgtaggataacaatcagtgtggatttccactcttttcagtccttcatgttaaagatttagacaccacatacaactggtaaaggacgttttcttgagagttttaactatatgtaaacattgtataatgatatggaataaaatgcacattgtaggacattttct

SEQ ID NO: 32870 - DNA, 1717 bp, Homo sapiens
  source 1..1717: mol_type = unassigned DNA
tcttgaggaatgcggtcgcccccttgggaaagtacatatctgggagaagcaggcggctccgcgctcgcactcccgctcctccgcccgaccgcgcgctcgccccgccgctcctgctgcagccccagggcccctcgccgccgccaccatggacgccatcaagaagaagatgcagatgctgaagctcgacaaggagaacgccttggatcgagctgagcaggcggaggccgacaagaaggcggcggaagacaggagcaagcagctggaagatgagctggtgtcactgcaaaagaaactcaagggcaccgaagatgaactggacaaatactctgaggctctcaaagatgcccaggagaagctggagctggcagagaaaaaggccaccgatgctgaagccgacgtagcttctctgaacagacgcatccagctggttgaggaagagttggatcgtgcccaggagcgtctggcaacagctttgcagaagctggaggaagctgagaaggcagcagatgagagtgagagaggcatgaaagtcattgagagtcgagcccaaaaagatgaagaaaaaatggaaattcaggagatccaactgaaagaggccaagcacattgctgaagatgccgaccgcaaatatgaagaggtggcccgtaagctggtcatcattgagagcgacctggaacgtgcagaggagcgggctgagctctcagaaggccaagtccgacagctggaagaacaattaagaataatggatcagaccttgaaagcattaatggctgcagaggataagtactcgcagaaggaagacagatatgaggaagagatcaaggtcctttccgacaagctgaaggaggctgagactcgggctgagtttgcggagaggtcagtaactaaattggagaaaagcattgatgacttagaagagaaagtggctcatgccaaagaagaaaaccttagtatgcatcagatgctggatcagactttactggagttaaacaacatgtgaaaacctccttagctgcgaccacattctttcgttttgttttgttttgtttttaaacacctgcttaccccttaaatgcaatttatttacttttaccactgtcacagaaacatccacaagataccagctaggtcagggggtggggaaaacacatacaaaaaggcaagcccatgtcagggcgatcctggttcaaatgtgccatttcccgggttgatgctgccacactttgtagagagtttagcaacacagtgtgcttagtcagcgtaggaatcctcactaaagcagaagaagttccattcaaagtgccaatgatagagtcaacaggaaggttaatgttggaaacacaatcaggtgtggattggtgctactttgaacaaaaggtccccctgtggtcttttgttcaacattgtacaatgtagaactctgtccaacactaatttattttgtcttgagttttactacaagatgagactatggatcccgcatgcctgaattcactaaagccaagggtctgtaagccacgctgctcttccgagacttccattcctttctgattggcacacgtgcagctcatgacaatctgtaggataacaatcagtgtggatttccactcttttcagtccttcatgttaaagatttagacaccacatacaactggtaaaggacgttttcttgagagttttaactatatgtaaacattgtataatgatatggaataaa

SEQ ID NO: 32871 - DNA, 1049 bp, Homo sapiens
  source 1..1049: mol_type = unassigned DNA
cgcactcccgctcctccgcccgaccgcgcgctcgccccgccgctcctgctgcagccccagggcccctcgccgccgccaccatggacgccatcaagaagaagatgcagatgctgaagctcgacaaggagaacgccttggatcgagctgagcaggcggaggccgacaagaaggcggcggaagacaggagcaagcagctggaagatgagctggtgtcactgcaaaagaaactcaagggcaccgaagatgaactggacaaatactctgaggctctcaaagatgcccaggagaagctggagctggcagagaaaaaggccaccgatgctgaagccgacgtagcttctctgaacagacgcatccagctggttgaggaagagttggatcgtgcccaggagcgtctggcaacagctttgcagaagctggaggaagctgagaaggcagcagatgagagtgagagaggcatgaaagtcattgagagtcgagcccaaaaagatgaagaaaaaatggaaattcaggagatccaactgaaagaggccaagcacattgctgaagatgccgaccgcaaatatgaagaggtggcccgtaagctggtcatcattgagagcgacctggaacgtgcagaggagcgggctgagctctcagaaggcaaatgtgccgagcttgaagaagaattgaaaactgtgacgaacaacttgaagtcactggaggctcaggctgagaagtactcgcagaaggaagacagatatgaggaagagatcaaggtcctttccgacaagctgaaggaggctgagactcgggctgagtttgcggagaggtcagtaactaaattggagaaaagcattgatgacttagaagacgagctgtacgctcagaaactgaagtacaaagccatcagcgaggagctggaccacgctctcaacgatatgacttccatataagtttctttgcttcacttctcccaagactccctcgtcgagctggatgtcccacctctctgagctctgcatttgtctattctccagctgaccctggttctctctcttagcatcctg

SEQ ID NO: 32872 - DNA, 1655 bp, Homo sapiens
  source 1..1655: mol_type = unassigned DNA
cgctcctccgcccgaccgcgcgctcgccccgccgctcctgctgcagccccagggcccctcgccgccgccaccatggacgccatcaagaagaagatgcagatgctgaagctcgacaaggagaacgccttggatcgagctgagcaggcggaggccgacaagaaggcggcggaagacaggagcaagcagctcgaggaggacatcgcggccaaggagaagttgctgcgggtgtcggaggacgagcgggaccgggtgctggaggagctgcacaaggcggaggacagcctcctggccgccgaagaggccgccgccaaggctgaagccgacgtagcttctctgaacagacgcatccagctggttgaggaagagttggatcgtgcccaggagcgtctggcaacagctttgcagaagctggaggaagctgagaaggcagcagatgagagtgagagaggcatgaaagtcattgagagtcgagcccaaaaagatgaagaaaaaatggaaattcaggagatccaactgaaagaggccaagcacattgctgaagatgccgaccgcaaatatgaagaggtggcccgtaagctggtcatcattgagagcgacctggaacgtgcagaggagcgggctgagctctcagaaggccaagtccgacagctggaagaacaattaagaataatggatcagaccttgaaagcattaatggctgcagaggataagtactcgcagaaggaagacagatatgaggaagagatcaaggtcctttccgacaagctgaaggaggctgagactcgggctgagtttgcggagaggtcagtaactaaattggagaaaagcattgatgacttagaagagaaagtggctcatgccaaagaagaaaaccttagtatgcatcagatgctggatcagactttactggagttaaacaacatgtgaaaacctccttagctgcgaccacattctttcgttttgttttgttttgtttttaaacacctgcttaccccttaaatgcaatttatttacttttaccactgtcacagaaacatccacaagataccagctaggtcagggggtggggaaaacacatacaaaaaggcaagcccatgtcagggcgatcctggttcaaatgtgccatttcccgggttgatgctgccacactttgtagagagtttagcaacacagtgtgcttagtcagcgtaggaatcctcactaaagcagaagaagttccattcaaagtgccaatgatagagtcaacaggaaggttaatgttggaaacacaatcaggtgtggattggtgctactttgaacaaaaggtccccctgtggtcttttgttcaacattgtacaatgtagaactctgtccaacactaatttattttgtcttgagttttactacaagatgagactatggatcccgcatgcctgaattcactaaagccaagggtctgtaagccacgctgctcttccgagacttccattcctttctgattggcacacgtgcagctcatgacaatctgtaggataacaatcagtgtggatttccactcttttcagtccttcatgttaaagatttagacaccacatacaactggtaaaggacgttttcttgagagttttaactatatgtaaacattgtataatgatatggaataaaatgcacattgt

SEQ ID NO: 32873 - DNA, 977 bp, Homo sapiens
  source 1..977: mol_type = unassigned DNA
cgctcctccgcccgaccgcgcgctcgccccgccgctcctgctgcagccccagggcccctcgccgccgccaccatggacgccatcaagaagaagatgcagatgctgaagctcgacaaggagaacgccttggatcgagctgagcaggcggaggccgacaagaaggcggcggaagacaggagcaagcagctggaagatgagctggtgtcactgcaaaagaaactcaagggcaccgaagatgaactggacaaatactctgaggctctcaaagatgcccaggagaagctggagctggcagagaaaaaggccaccgatgctgaagccgacgtagcttctctgaacagacgcatccagctggttgaggaagagttggatcgtgcccaggagcgtctggcaacagctttgcagaagctggaggaagctgagaaggcagcagatgagagtgagagaggcatgaaagtcattgagagtcgagcccaaaaagatgaagaaaaaatggaaattcaggagatccaactgaaagaggccaagcacattgctgaagatgccgaccgcaaatatgaagaggtggcccgtaagctggtcatcattgagagcgacctggaacgtgcagaggagcgggctgagctctcagaaggcaaatgtgccgagcttgaagaagaattgaaaactgtgacgaacaacttgaagtcactggaggctcaggctgagaagtactcgcagaaggaagacagatatgaggaagagatcaaggtcctttccgacaagctgaaggaggctgagactcgggctgagtttgcggagaggtcagtaactaaattggagaaaagcattgatgacttagaagagaaagtggctcatgccaaagaagaaaaccttagtatgcatcagatgctggatcagactttactggagttaaacaacatgtgaaaacctccttagctgcgaccacattctttcgttttgttttgttttgtttt

SEQ ID NO: 32874 - DNA, 1039 bp, Homo sapiens
  source 1..1039: mol_type = unassigned DNA
atcgagctgagcaggcggaggccgacaagaaggcggcggaagacaggagcaagcagctggaagatgagctggtgtcactgcaaaagaaactcaagggcaccgaagatgaactggacaaatactctgaggctctcaaagatgcccaggagaagctggagctggcagagaaaaaggccaccgatgctgaagccgacgtagcttctctgaacagacgcatccagctggttgaggaagagttggatcgtgcccaggagcgtctggcaacagctttgcagaagctggaggaagctgagaaggcagcagatgagagtgagagaggcatgaaagtcattgagagtcgagcccaaaaagatgaagaaaaaatggaaattcaggagatccaactgaaagaggccaagcacattgctgaagatgccgaccgcaaatatgaagaggtggcccgtaagctggtcatcattgagagcgacctggaacgtgcagaggagcgggctgagctctcagaaggcaaatgtgccgagcttgaagaagaattgaaaactgtgacgaacaacttgaagtcactggaggctcaggctgagaagtactcgcagaaggaagacagatatgaggaagagatcaaggtcctttccgacaagctgaaggaggctgagactcgggctgagtttgcggagaggtcagtaactaaattggagaaaagcattgatgacttagaagacgagctgtacgctcagaaactgaagtacaaagccatcagcgaggagctggaccacgctctcaacgatatgacttccatgtaaacgttcatccactctgcctgcttacaccctgccctcatgctaatataagtttctttgcttcacttctcccaagactccctcgtcgagctggatgtcccacctctctgagctctgcatttgtctattctccagctgaccctggttctctctcttagcatcctgccttagagccaggcacacactgtgctttctattgtacagaagctcttcgtttcagtgtcaaataaacactgtgtaagcta

SEQ ID NO: 32875 - DNA, 1018 bp, Homo sapiens
  source 1..1018: mol_type = unassigned DNA
tcctcctcgcctgccaccggtgcacccagtccgctcacccagcccagtccgtccggtcctcaccgcctgccggccggcccaccccccaccgcagccatggacgccatcaagaagaagatgcagatgctgaagctggacaaggagaacgccatcgaccgcgccgagcaggccgaagccgacaagaagcaagctgaggaccgctgcaagcagctggaggaggagcagcaggccctccagaagaagctgaaggggacagaggatgaggtggaaaagtattctgaatccgtgaaggaggcccaggagaaactggagcaggccgagaagaaggccactgatgctgaggcagatgtggcctccctgaaccgccgcattcagctggttgaggaggagctggaccgggcccaggagcgcctggctacagccctgcagaagctggaggaggccgagaaggcggctgatgagagcgagagaggaatgaaggtcatcgaaaaccgggccatgaaggatgaggagaagatggaactgcaggagatgcagctgaaggaggccaagcacatcgctgaggattcagaccgcaaatatgaagaggtggccaggaagctggtgatcctggaaggagagctggagcgctcggaggagagggctgaggtggccgagagtaaatgtggggacctagaggaggagctgaaaattgttaccaacaacttgaaatccctggaggcccaggcggacaagtattccaccaaagaagataaatatgaagaggagatcaaactgttggaggagaagctgaaggaggctgagacccgagcagagtttgccgagaggtctgtggcaaagttggagaaaaccatcgatgacctagaagagaccttggccagtgccaaggaggagaacgtcgagattcaccagaccttggaccagaccctgctggaactcaacaacctgtgagggccagccccacccccagccaggctatggttgccaccccaacccaataaaactgatgttactagcc

SEQ ID NO: 32876 - DNA, 1189 bp, Homo sapiens
  source 1..1189: mol_type = unassigned DNA
cccgctccgtcctcctcgcctgccaccggtgcacccagtccgctcacccagcccagtccgtccggtcctcaccgcctgccggccggcccaccccccaccgcagccatggacgccatcaagaagaagatgcagatgctgaagctggacaaggagaacgccatcgaccgcgccgagcaggccgaagccgacaagaagcaagctgaggaccgctgcaagcagctggaggaggagcagcaggccctccagaagaagctgaaggggacagaggatgaggtggaaaagtattctgaatccgtgaaggaggcccaggagaaactggagcaggccgagaagaaggccactgatgctgaggcagatgtggcctccctgaaccgccgcattcagctggttgaggaggagctggaccgggcccaggagcgcctggctacagccctgcagaagctggaggaggccgagaaggcggctgatgagagcgagagaggaatgaaggtcatcgaaaaccgggccatgaaggatgaggagaagatggaactgcaggagatgcagctgaaggaggccaagcacatcgctgaggattcagaccgcaaatatgaagaggtggccaggaagctggtgatcctggaaggagagctggagcgctcggaggagagggctgaggtggccgagagtaaatgtggggacctagaggaggagctgaaaattgttaccaacaacttgaaatccctggaggcccaggcggacaagtattccaccaaagaagataaatatgaagaggagatcaaactgttggaggagaagctgaaggaggctgagacccgagcagagtttgccgagaggtctgtggcaaagttggagaaaaccatcgatgacctagaagatgaagtctatgcccagaagatgaagtacaaggccattagcgaggaactggacaacgcactcaatgacatcacctccctctgagccccacgccagcgtggccacctcagctctcttctctcctctcctttccattctctctatggggaggggagcaggcaggaggagcagaaattgccaacattgcacagccaggctgggagcagcctagggagagcccccatcatgcccaccacccactctggcactggcttcatcctttacctatccccttccaccctcctttgctgcttaataaattctgaacttggtc

SEQ ID NO: 32877 - DNA, 2147 bp, Homo sapiens
  source 1..2147: mol_type = unassigned DNA
gagaaggcacctcgccccggaccccctatgccccgcagctcagtgactcttcccctcgccctccgccttccccgccgcagcccggctccgcctcccaatggggaaacatcccaaaaaagggcagaaaagaaatttcagcataaagttggcccactgggaaagagaggagcgtccgcggggagcgggggagaagagggaaggcgcgcggaggggagtggggccaggcggagccaggggcggggagcggaggggctcgggacgcgtccgggtgggagcgggggcggggaacgcgcggtgaccagcctggccgcagccgcgtggaaaatatgcggggcacgtggggggcggggcggggagctgggtcctgagccgccgggtgctcgcaggaagggcctggctccaggggcaggggctgggaggggaggcgaggggatgagaggtcaggccggtcctgggggcagcaagcccggccacactccccaccgcgaccggggctctgggctcgcttcctgcttcagtttccccaagctcccgatgagactccgctactaccaccacgtcgataacgcaaacctagagggactcagggtaaactgaggcactcaaactgccgaggagctccgcctcccgagagacatttaatccggggggatttgcaggaaacttctaaattaagggtagcggctgctgcagctgagggggggcacgccggtccctgcgcccgggcagctgccgtgagctcacgccccgaaatagccccaggggccccagccgcagctgccactgggtccggctgtcactcagaggaagcacggagcccccagcccaagggtcccctccccttcgcatcgccggggtttttccagccgaccgtcggccactttttcctccgacggctggcagggaagagggggatgggggcgggaccccaagggaggcggtccccagtgggtgggcgaagggggcggccgcaccccccggccgggccgtgcttctgcccctacaaggtttgggccgaggtgggggagggtcctggttgccggccccgcccggtccctccccgccttttaggcgcccgcgtggccgggacgtcccagtcccgctccgtcctcctcgcctgccaccggtgcacccagtccgctcacccagcccagtccgtccggtcctcaccgcctgccggccggcccaccccccaccgcagccatggacgccatcaagaagaagatgcagatgctgaagctggacaaggagaacgccatcgaccgcgccgagcaggccgaagccgacaagaagcaagctgaggaccgctgcaagcagctggaggaggagcagcaggccctccagaagaagctgaaggggacagaggatgaggtggaaaagtattctgaatccgtgaaggaggcccaggagaaactggagcaggccgagaagaaggccactgatgctgaggcagatgtggcctccctgaaccgccgcattcagctggttgaggaggagctggaccgggcccaggagcgcctggctacagccctgcagaagctggaggaggccgagaaggcggctgatgagagcgagagaggaatgaaggtcatcgaaaaccgggccatgaaggatgaggagaagatggaactgcaggagatgcagctgaaggaggccaagcacatcgctgaggattcagaccgcaaatatgaagaggtggccaggaagctggtgatcctggaaggagagctggagcgctcggaggagagggctgaggtggccgagagccgagccagacagctggaggaggaacttcgaaccatggaccaggccctcaagtccctgatggcctcagaggaggagtattccaccaaagaagataaatatgaagaggagatcaaactgttggaggagaagctgaaggaggctgagacccgagcagagtttgccgagaggtctgtggcaaagttggagaaaaccatcgatgacctagaagagaccttggccagtgccaaggaggagaacgtcgagattcaccagaccttggaccagaccctgctggaactcaacaacctgtgagggccagccccacccccagccaggctatggttgccaccccaacccaataaaactgatgttactagcctctcaaggccctttaatccttt

SEQ ID NO: 32878 - DNA, 1771 bp, Homo sapiens
  source 1..1771: mol_type = unassigned DNA
ctgccaccggtgcacccagtccgctcacccagcccagtccgtccggtcctcaccgcctgccggccggcccaccccccaccgcagccatggacgccatcaagaagaagatgcagatgctgaagctggacaaggagaacgccatcgaccgcgccgagcaggccgaagccgacaagaagcaagctgaggaccgctgcaagcagctggaggaggagcagcaggccctccagaagaagctgaaggggacagaggatgaggtggaaaagtattctgaatccgtgaaggaggcccaggagaaactggagcaggccgagaagaaggccactgatgctgaggcagatgtggcctccctgaaccgccgcattcagctggttgaggaggagctggaccgggcccaggagcgcctggctacagccctgcagaagctggaggaggccgagaaggcggctgatgagagcgagagaggaatgaaggtcatcgaaaaccgggccatgaaggatgaggagaagatggaactgcaggagatgcagctgaaggaggccaagcacatcgctgaggattcagaccgcaaatatgaagaggtggccaggaagctggtgatcctggaaggagagctggagcgctcggaggagagggctgaggtggccgagagtaaatgtggggacctagaggaggagctgaaaattgttaccaacaacttgaaatccctggaggcccaggcggacaagtattccaccaaagaagataaatatgaagaggagatcaaactgttggaggagaagctgaaggaggctgagacccgagcagagtttgccgagaggtctgtggcaaagttggagaaaaccatcgatgacctagaagagagcacctctatcgccaccacggagcactggttcactcctgacaccctggcacttactgacacccccagcccctgcactgagcccacccacaaaacaccatggcccacgctgaaacccctctgcacaggcactccctggctgtcgctctctgattcaccactgcatgtgggcacgtgtggccccatcaaaccatgaccgcctctggtgccaatccctgacctcagagcacttagctggggttccaggatcaaacagagtgactggaaaggaagtagggtggtgaggtgcaggacaggggcaagaaggttgcaaaaggtctggaatggagcttggaaaaatgttggatatcagcaacatggggctttcactgcagcagcaggtctgttttctacctcaagtctgtctgtctggcccttcctttcctggcgcagtctttgtcttaccttctgtctccaacttccttaaaccttctaaagaagaggataaagtagtttatgactcagccctccccaccccacctctatgaccccaaggccttgagtgaggcatccacgtccgtcctgttcccctcatcctagtcagtccatctgtttgtccctgccaaggggccctgaggtccgtgaatgcatgtgtcttccttgacccactccatgtctatatgtcaccttcccctggccctgcctccccacgtctcccccttgtgtctcccttctccctcacctgctgcttcccctcacagagaccttggccagtgccaaggaggagaacgtcgagattcaccagaccttggaccagaccctgctggaactcaacaacctgtgagggccagccccacccccagccaggctatggttgccaccccaacccaataaaactgatgttactagcctctcaaggccctttaatccttt

SEQ ID NO: 32879 - DNA, 1219 bp, Homo sapiens
  source 1..1219: mol_type = unassigned DNA
ctccagtgttcacaggtgagcctaccaacagccactgctcatgatggaggccatcaagaaaaagatgcagatgctgaagttagacaaggagaatgctctggatcgggcagagcaagctgaagctgagcagaagcaggcagaagaaagaagtaaacagctggaggatgagctggcagccatgcagaagaagctgaaagggacagaggatgagctggacaagtattctgaagctttgaaggatgcccaggagaagctggaactggcagagaagaaggctgctgatgctgaggctgaggtggcctccttgaaccgtaggatccagctggttgaagaagagctggaccgtgctcaggagcgcctggccactgccctgcaaaagctggaagaagctgaaaaagctgctgatgagagtgagagaggtatgaaggttattgaaaaccgggccttaaaagatgaagaaaagatggaactccaggaaatccaactcaaagaagctaagcacattgcagaagaggcagataggaagtatgaagaggtggctcgtaagttggtgatcattgaaggagacttggaacgcacagaggaacgagctgagctggcagagtcccgttgccgagagatggatgagcagattagactgatggaccagaacctgaagtgtctgagtgctgctgaagaaaagtactctcaaaaagaagataaatatgaggaagaaatcaagattcttactgataaactcaaggaggcagagacccgtgctgagtttgctgagagatcggtagccaagctggaaaagacaattgatgacctggaagataaactgaaatgcaccaaagaggagcacctctgtacacaaaggatgctggaccagaccctgcttgacctgaatgagatgtagaacgccccagtcccaccctgctgctgctcctccctctgacccagactccgcctgaggccagcctgcgggaagctgacctttaactgagggctgatctttaactggaaggctgctttctcctttcaccaccccctccttccctgtgtctttttcgccaaactgtctctgcctcttcccggagaatccagctgggctagaggctgagcacctttggaaacaacatttaagggaatgtgagcacaatgcataatgtctttaaaaagcatgttgtgatgtacacattttgtaattaccttttttgttgttttgtagcaaccattt

SEQ ID NO: 32880 - DNA, 1088 bp, Homo sapiens
  source 1..1088: mol_type = unassigned DNA
ggaggaggcaggaaccggagcgcgagcagtagctgggtgggcaccatggctgggatcaccaccatcgaggcggtgaagcgcaagatccaggttctgcagcagcaggcagatgatgcagaggagcgagctgagcgcctccagcgagaagttgagggagaaaggcgggcccgggaacaggctgaggctgaggtggcctccttgaaccgtaggatccagctggttgaagaagagctggaccgtgctcaggagcgcctggccactgccctgcaaaagctggaagaagctgaaaaagctgctgatgagagtgagagaggtatgaaggttattgaaaaccgggccttaaaagatgaagaaaagatggaactccaggaaatccaactcaaagaagctaagcacattgcagaagaggcagataggaagtatgaagaggtggctcgtaagttggtgatcattgaaggagacttggaacgcacagaggaacgagctgagctggcagagtctaagtgttctgagctggaggaggagctgaagaatgtcaccaacaacctcaagtctcttgaggctcaggcggagaagtactctcaaaaagaagataaatatgaggaagaaatcaagattcttactgataaactcaaggaggcagagacccgtgctgagtttgctgagagatcggtagccaagctggaaaagacaattgatgacctggaagagcgtctctacagccaacttgagcgaaaccgcctgctttctaatgagctgaagctaacgctgcatgatctgtgtgactgatgggcagggctcaatgatgcccattaaactgagcttactgctcacaccactgacctggaccccaacaaaaagctgattgtctttttaaaagttattattttgccctgagcaaattgcattttaattggggcagttagaatgttgatttcctaacagcattgtgaagttgaccattgtgaagtttctgtccctttagaagagattatgggtgaagaagggaggggcctgagagattatagtgagaaaacttgcgagaattttgttttccacccttatttgctgctctttcacttgggcac

SEQ ID NO: 32881 - DNA, 1771 bp, Homo sapiens
  source 1..1771: mol_type = unassigned DNA
atggctgggatcaccaccatcgaggcggtgaagcgcaagatccaggttctgcagcagcaggcagatgatgcagaggagcgagctgagcgcctccagcgagaagttgagggagaaaggcgggcccgggaacaggctgaggctgaggtggcctccttgaaccgtaggatccagctggttgaagaagagctggaccgtgctcaggagcgcctggccactgccctgcaaaagctggaagaagctgaaaaagctgctgatgagagtgagagaggtatgaaggttattgaaaaccgggccttaaaagatgaagaaaagatggaactccaggaaatccaactcaaagaagctaagcacattgcagaagaggcagataggaagtatgaagaggtggctcgtaagttggtgatcattgaaggagacttggaacgcacagaggaacgagctgagctggcagagtcccgttgccgagagatggatgagcagattagactgatggaccagaacctgaagtgtctgagtgctgctgaagaaaagtactctcaaaaagaagataaatatgaggaagaaatcaagattcttactgataaactcaaggaggcagagacccgtgctgagtttgctgagagatcggtagccaagctggaaaagacaattgatgacctggaagatgagctctatgcccagaaactgaagtacaaggccattagcgaggagctggaccacgccctcaatgacatgacctctatataaactgaaatgcaccaaagaggagcacctctgtacacaaaggatgctggaccagaccctgcttgacctgaatgagatgtagaacgccccagtcccaccctgctgctgctcctccctctgacccagactccgcctgaggccagcctgcgggaagctgacctttaactgagggctgatctttaactggaaggctgctttctcctttcaccaccccctccttccctgtgtctttttcgccaaactgtctctgcctcttcccggagaatccagctgggctagaggctgagcacctttggaaacaacatttaagggaatgtgagcacaatgcataatgtctttaaaaagcatgttgtgatgtacacattttgtaattaccttttttgttgttttgtagcaaccatttgtaaaacattccaaataattccacagtcctgaagcagcaatcgaatccctttctcacttttggaaggtgacttttcaccttaatgcatattcccctctccatagaggagaggaaaaggtgtaggcctgccttaccgagagccaaacagagcccagggagactccgctgtgggaaacctcattgttctgtacaaagtactagctaaaccagaaaggtgattccaggaggagttagccaaacaacaacaaaaacaaaaaatgtgctgttcaagttttcagctttaagatatctttggataatgttatttctattttttatttttttcattagaagttaccaaattaagatggtaagacctctgagaccaaaattttgtcccatctctaccccctcacaactgcttacagaatggatcatgtcccccttatgttgaggtgaccacttaattgctttcctgcctccttgaaagaaagaaagaaagaagactgtgtttttgccactgatttagccatgtgaaactcatctcattacccttttctgggtttgaagctgctgtctctagaagtgccatctcaattgtgctttgtatcagtcagtgctggagaaatcttgaatagcttatgt

SEQ ID NO: 32882 - DNA, 2108 bp, Homo sapiens
  source 1..2108: mol_type = unassigned DNA
gcaggcggaagtaagggtgagaggaggctgcaacgccgagcggaggaggcaggaaccggagcgcgagcagtagctgggtgggcaccatggctgggatcaccaccatcgaggcggtgaagcgcaagatccaggttctgcagcagcaggcagatgatgcagaggagcgagctgagcgcctccagcgagaagttgagggagaaaggcgggcccgggaacaggctgaggctgaggtggcctccttgaaccgtaggatccagctggttgaagaagagctggaccgtgctcaggagcgcctggccactgccctgcaaaagctggaagaagctgaaaaagctgctgatgagagtgagagaggtatgaaggttattgaaaaccgggccttaaaagatgaagaaaagatggaactccaggaaatccaactcaaagaagctaagcacattgcagaagaggcagataggaagtatgaagaggtggctcgtaagttggtgatcattgaaggagacttggaacgcacagaggaacgagctgagctggcagagtctaagtgttctgagctggaggaggagctgaagaatgtcaccaacaacctcaagtctcttgaggctcaggcggagaagtactctcaaaaagaagataaatatgaggaagaaatcaagattcttactgataaactcaaggaggcagagacccgtgctgagtttgctgagagatcggtagccaagctggaaaagacaattgatgacctggaagataaactgaaatgcaccaaagaggagcacctctgtacacaaaggatgctggaccagaccctgcttgacctgaatgagatgtagaacgccccagtcccaccctgctgctgctcctccctctgacccagactccgcctgaggccagcctgcgggaagctgacctttaactgagggctgatctttaactggaaggctgctttctcctttcaccaccccctccttccctgtgtctttttcgccaaactgtctctgcctcttcccggagaatccagctgggctagaggctgagcacctttggaaacaacatttaagggaatgtgagcacaatgcataatgtctttaaaaagcatgttgtgatgtacacattttgtaattaccttttttgttgttttgtagcaaccatttgtaaaacattccaaataattccacagtcctgaagcagcaatcgaatccctttctcacttttggaaggtgacttttcaccttaatgcatattcccctctccatagaggagaggaaaaggtgtaggcctgccttaccgagagccaaacagagcccagggagactccgctgtgggaaacctcattgttctgtacaaagtactagctaaaccagaaaggtgattccaggaggagttagccaaacaacaacaaaaacaaaaaatgtgctgttcaagttttcagctttaagatatctttggataatgttatttctattttttatttttttcattagaagttaccaaattaagatggtaagacctctgagaccaaaattttgtcccatctctaccccctcacaactgcttacagaatggatcatgtcccccttatgttgaggtgaccacttaattgctttcctgcctccttgaaagaaagaaagaaagaagactgtgtttttgccactgatttagccatgtgaaactcatctcattacccttttctgggtttgaagctgctgtctctagaagtgccatctcaattgtgctttgtatcagtcagtgctggagaaatcttgaatagcttatgtacaaaactttttaaattttatattattttgaaactttgctttgggtttgtggcaccctggccaccccatctggctgtgacagcctctgcagtccgtgggctggcagtttgttgatcttttaagtttccttccctacccagtccccattttctggtaaggtttctaggaggtctgttaggtgtacatcctgcagcttattggcttaaaatgtactctccttttatgtggtctctttggggccgattgggagaaagagaaatcaatagtgcaactgttttgatactgaatattgacaagtgtctttttgaaataaagaaccagtccctccaa

SEQ ID NO: 32883 - DNA, 2010 bp, Homo sapiens
  source 1..2010: mol_type = unassigned DNA
aggctgcaacgccgagcggaggaggcaggaaccggagcgcgagcagtagctgggtgggcaccatggctgggatcaccaccatcgaggcggtgaagcgcaagatccaggttctgcagcagcaggcagatgatgcagaggagcgagctgagcgcctccagcgagaagttgagggagaaaggcgggcccgggaacagcgcctggccactgccctgcaaaagctggaagaagctgaaaaagctgctgatgagagtgagagaggtatgaaggttattgaaaaccgggccttaaaagatgaagaaaagatggaactccaggaaatccaactcaaagaagctaagcacattgcagaagaggcagataggaagtatgaagaggtggctcgtaagttggtgatcattgaaggagacttggaacgcacagaggaacgagctgagctggcagagtcccgttgccgagagatggatgagcagattagactgatggaccagaacctgaagtgtctgagtgctgctgaagaaaagtactctcaaaaagaagataaatatgaggaagaaatcaagattcttactgataaactcaaggaggcagagacccgtgctgagtttgctgagagatcggtagccaagctggaaaagacaattgatgacctggaagataaactgaaatgcaccaaagaggagcacctctgtacacaaaggatgctggaccagaccctgcttgacctgaatgagatgtagaacgccccagtcccaccctgctgctgctcctccctctgacccagactccgcctgaggccagcctgcgggaagctgacctttaactgagggctgatctttaactggaaggctgctttctcctttcaccaccccctccttccctgtgtctttttcgccaaactgtctctgcctcttcccggagaatccagctgggctagaggctgagcacctttggaaacaacatttaagggaatgtgagcacaatgcataatgtctttaaaaagcatgttgtgatgtacacattttgtaattaccttttttgttgttttgtagcaaccatttgtaaaacattccaaataattccacagtcctgaagcagcaatcgaatccctttctcacttttggaaggtgacttttcaccttaatgcatattcccctctccatagaggagaggaaaaggtgtaggcctgccttaccgagagccaaacagagcccagggagactccgctgtgggaaacctcattgttctgtacaaagtactagctaaaccagaaaggtgattccaggaggagttagccaaacaacaacaaaaacaaaaaatgtgctgttcaagttttcagctttaagatatctttggataatgttatttctattttttatttttttcattagaagttaccaaattaagatggtaagacctctgagaccaaaattttgtcccatctctaccccctcacaactgcttacagaatggatcatgtcccccttatgttgaggtgaccacttaattgctttcctgcctccttgaaagaaagaaagaaagaagactgtgtttttgccactgatttagccatgtgaaactcatctcattacccttttctgggtttgaagctgctgtctctagaagtgccatctcaattgtgctttgtatcagtcagtgctggagaaatcttgaatagcttatgtacaaaactttttaaattttatattattttgaaactttgctttgggtttgtggcaccctggccaccccatctggctgtgacagcctctgcagtccgtgggctggcagtttgttgatcttttaagtttccttccctacccagtccccattttctggtaaggtttctaggaggtctgttaggtgtacatcctgcagcttattggcttaaaatgtactctccttttatgtggtctctttggggccgattgggagaaagagaaatcaatagtgcaactgttttgatactgaatattgacaagtgtctttttgaaataaagaaccagtccctcc

SEQ ID NO: 32884 - DNA, 1523 bp, Homo sapiens
  source 1..1523: mol_type = unassigned DNA
gttcccccaggagaacaatgatggggtggagggagctggaaagaccatattaggaacaaaaggtggagctatgagcacagataaagactcaagtctggggacctcctggtcactcaggcagcagccccttctttcttgccccagtctccagttctccagtgttcacaggtgagcctaccaacagccactgctcatgatggaggccatcaagaaaaagatgcagatgctgaagttagacaaggagaatgctctggatcgggcagagcaagctgaagctgagcagaagcaggcagaagaaagaagtaaacagctggaggatgagctggcagccatgcagaagaagctgaaagggacagaggatgagctggacaagtattctgaagctttgaaggatgcccaggagaagctggaactggcagagaagaaggctgctgatgctgaggctgaggtggcctccttgaaccgtaggatccagctggttgaagaagagctggaccgtgctcaggagcgcctggccactgccctgcaaaagctggaagaagctgaaaaagctgctgatgagagtgagagaggtatgaaggttattgaaaaccgggccttaaaagatgaagaaaagatggaactccaggaaatccaactcaaagaagctaagcacattgcagaagaggcagataggaagtatgaagaggtggctcgtaagttggtgatcattgaaggagacttggaacgcacagaggaacgagctgagctggcagagtctaagtgttctgagctggaggaggagctgaagaatgtcaccaacaacctcaagtctcttgaggctcaggcggagaagtactctcaaaaagaagataaatatgaggaagaaatcaagattcttactgataaactcaaggaggcagagacccgtgctgagtttgctgagagatcggtagccaagctggaaaagacaattgatgacctggaagatgagctctatgcccagaaactgaagtacaaggccattagcgaggagctggaccacgccctcaatgacatgacctctatataattatcaccgtttctgctctgttctggatctgccccctttactcctcggggaacccaaggccccactctcgctctggattccatttgggtcagcctggctggtccccaaggcattaggatgggggagcaaaaagcaacttatgtattttcttccacccccaccccaaattaaaatgttaagctgctggaaacctcatgccaccctgcatttgtgtcattgacaaagctgttgctgtccctaagaaggagccttgggggtgtgatgtggggaagagctattgtaggctccccctcctctgacttatgtaatcaaagccacttttgtgtgtgtctattttttcttgacatttaaactcagctgatctgattctaccagagtgatggatttagtacaggttactcaggatagtaattttagttatactcctcaagctgaacaagattaaattccttatttccaggttcttaaatca

SEQ ID NO: 32885 - DNA, 1115 bp, Homo sapiens
  source 1..1115: mol_type = unassigned DNA
gggtgggcaccatggctgggatcaccaccatcgaggcggtgaagcgcaagatccaggttctgcagcagcaggcagatgatgcagaggagcgagctgagcgcctccagcgagaagttgagggagaaaggcgggcccgggaacaggctgaggctgaggtggcctccttgaaccgtaggatccagctggttgaagaagagctggaccgtgctcaggagcgcctggccactgccctgcaaaagctggaagaagctgaaaaagctgctgatgagagtgagagaggtatgaaggttattgaaaaccgggccttaaaagatgaagaaaagatggaactccaggaaatccaactcaaagaagctaagcacattgcagaagaggcagataggaagtatgaagaggtggctcgtaagttggtgatcattgaaggagacttggaacgcacagaggaacgagctgagctggcagagtcccgttgccgagagatggatgagcagattagactgatggaccagaacctgaagtgtctgagtgctgctgaagaaaagtactctcaaaaagaagataaatatgaggaagaaatcaagattcttactgataaactcaaggaggcagagacccgtgctgagtttgctgagagatcggtagccaagctggaaaagacaattgatgacctggaagagcgtctctacagccaacttgagcgaaaccgcctgctttctaatgagctgaagctaacgctgcatgatctgtgtgactgatgggcagggctcaatgatgcccattaaactgagcttactgctcacaccactgacctggaccccaacaaaaagctgattgtctttttaaaagttattattttgccctgagcaaattgcattttaattggggcagttagaatgttgatttcctaacagcattgtgaagttgaccattgtgaagtttctgtccctttagaagagattatgggtgaagaagggaggggcctgagagattatagtgagaaaacttgcgagaattttgttttccacccttatttgctgctctttcacttgggcactgactgtaggatatgttcccttgcatggatgtttttaacaataaaaggactgacttgacaa

SEQ ID NO: 32886 - DNA, 3131 bp, Homo sapiens
  source 1..3131: mol_type = unassigned DNA
cgccgagcggaggaggcaggaaccggagcgcgagcagtagctgggtgggcaccatggctgggatcaccaccatcgaggcggtgaagcgcaagatccaggttctgcagcagcaggcagatgatgcagaggagcgagctgagcgcctccagcgagaagttgagggagaaaggcgggcccgggaacaggctgaggctgaggtggcctccttgaaccgtaggatccagctggttgaagaagagctggaccgtgctcaggagcgcctggccactgccctgcaaaagctggaagaagctgaaaaagctgctgatgagagtgagagaggtatgaaggttattgaaaaccgggccttaaaagatgaagaaaagatggaactccaggaaatccaactcaaagaagctaagcacattgcagaagaggcagataggaagtatgaagaggtggctcgtaagttggtgatcattgaaggagacttggaacgcacagaggaacgagctgagctggcagagtcccgttgccgagagatggatgagcagattagactgatggaccagaacctgaagtgtctgagtgctgctgaagaaaagtactctcaaaaagaagataaatatgaggaagaaatcaagattcttactgataaactcaaggaggcagagacccgtgctgagtttgctgagagatcggtagccaagctggaaaagacaattgatgacctggaagataaactgaaatgcaccaaagaggagcacctctgtacacaaaggatgctggaccagaccctgcttgacctgaatgagatgtagaacgccccagtcccaccctgctgctgctcctccctctgacccagactccgcctgaggccagcctgcgggaagctgacctttaactgagggctgatctttaactggaaggctgctttctcctttcaccaccccctccttccctgtgtctttttcgccaaactgtctctgcctcttcccggagaatccagctgggctagaggctgagcacctttggaaacaacatttaagggaatgtgagcacaatgcataatgtctttaaaaagcatgttgtgatgtacacattttgtaattaccttttttgttgttttgtagcaaccatttgtaaaacattccaaataattccacagtcctgaagcagcaatcgaatccctttctcacttttggaaggtgacttttcaccttaatgcatattcccctctccatagaggagaggaaaaggtgtaggcctgccttaccgagagccaaacagagcccagggagactccgctgtgggaaacctcattgttctgtacaaagtactagctaaaccagaaaggtgattccaggaggagttagccaaacaacaacaaaaacaaaaaatgtgctgttcaagttttcagctttaagatatctttggataatgttatttctattttttatttttttcattagaagttaccaaattaagatggtaagacctctgagaccaaaattttgtcccatctctaccccctcacaactgcttacagaatggatcatgtcccccttatgttgaggtgaccacttaattgctttcctgcctccttgaaagaaagaaagaaagaagactgtgtttttgccactgatttagccatgtgaaactcatctcattacccttttctgggtttgaagctgctgtctctagaagtgccatctcaattgtgctttgtatcagtcagtgctggagaaatcttgaatagcttatgtacaaaactttttaaattttatattattttgaaactttgctttgggtttgtggcaccctggccaccccatctggctgtgacagcctctgcagtccgtgggctggcagtttgttgatcttttaagtttccttccctacccagtccccattttctggtaaggtttctaggaggtctgttaggtgtacatcctgcagcttattggcttaaaatgtactctccttttatgtggtctctttggggccgattgggagaaagagaaatcaatagtgcaactgttttgatactgaatattgacaagtgtctttttgaaataaagaaccagtccctccaaccctcagacctatttgacttttatttattaaaactaaatgtgctttctccacagaagctatgaggtttgggttaaaaatagcatctttgtgggtggtagcaacaggatttattctttattattattatttttgagatgaagtttcattcttgttgcctgggctggagcgtaatggctcgatctcggctcactgcaacctccgcctcctggttcaagagattctcctgcctcagcctcccgagtagctgggattacaggcacctgccaccatgcccgggtaattttttatattttaagtagagacagggcttcaccatgttggccaggctggtctcgaactcctgaccttcaggtgatccacctgcctcagcttcccaaaatgctgggattacgggcgtgagccaccgcacccagctggagcaacaggatttaatatagagcaaatgtttagttttatcatctgtaaaatggagataagtattgtcagagtaaacatgaagattagaaagaacacttaatgtgctgggccttttataggttaacactgacatctcaggctgaactatatacattttccttcacaaccatatcaatccttataaactatggatttatgctccttaaaacaatatataatgctgatcactactataaatgcgtggttttaaccaactgtactgaaacagctttgagtttatattctgtttggatatttggagaaaacaacaagtgctctcaagagtatttgcttagaggccggctgtgtgagtggataactttgaaagctgcttttgagacgccagtgtctggcatttcctgcattctggcctggaggccggacgtgaatctgacttctagtaaaaatacacggttcccttgacaaagtcgagctgtttatcccagagactgcacaattttccgttgataggcatggaccaatgctaactggaaatcattgcaaaaagtttttttgtcgggcggagggtgtggtgttaagataaacagtgtgcaacagaagaaattaaaactggaagaaattaaagggttttttttaga

SEQ ID NO: 32887 - DNA, 587 bp, Homo sapiens
  source 1..587: mol_type = unassigned DNA
gagaaatttcccatgtgggaatccggctggatccctgtgagggaagacccttggagaacgcagcctggagttctggtaaaaagccctagaagaggagaggactcctgtggactgcaggctgcttcctggcagaagtttcctctcttaccctcagtctaaagccttagtttcaattctgccaggcaaggtggggaactataagtcttctcttctggagcccacgatggagcctgccagggagacaagttattcttctgttctggacatccaagggtgactttaaggaggatgcctggaggacatggggagaagtctccagttctccagtgttcacaggtgagcctaccaacagccactgctcatgatggaggccatcaagaaaaagatgcagatgctgaagttagacaaggagaatgctctggatcgggcagagcaagctgaagctgagcagaagcaggcagaagaaagaagtaaacagctggaggatgagctggcagccatgcagaagaagctgaaagggacagaggatgagctggacaagtattctgaagctttgaaggatgcccaggagaagctggaactggcag

SEQ ID NO: 32888 - DNA, 2645 bp, Homo sapiens
  source 1..2645: mol_type = unassigned DNA
tttccagcagctgtggccagcggtgccgacgtcaggccctcccccagcggtgctgacgtcggcggtccggccgggtgacctcatcgccccgacggcagccggcccggggggcggggagaggcgggggcggcccccgcgcaggcaaaggcttggggggccggggcgcggctgtgcagctctcgccggagccgagcccagccgagcgtccgccgctgcccgtgcgcctctgcgcctccgcgccatggccggcctcaactccctggaggcggtgaaacgcaagatccaggccctgcagcagcaggcggacgaggcggaagaccgcgcgcagggcctgcagcgggagctggacggcgagcgcgagcggcgcgagaaagctgaaggtgatgtggccgccctcaaccgacgcatccagctcgttgaggaggagttggacagggctcaggaacgactggccacggccctgcagaagctggaggaggcagaaaaagctgcagatgagagtgagagaggaatgaaggtgatagaaaaccgggccatgaaggatgaggagaagatggagattcaggagatgcagctcaaagaggccaagcacattgcggaagaggctgaccgcaaatacgaggaggtagctcgtaagctggtcatcctggagggtgagctggagagggcagaggagcgtgcggaggtgtctgaactaaaatgtggtgacctggaagaagaactcaagaatgttactaacaatctgaaatctctggaggctgcatctgaaaagtattctgaaaaggaggacaaatatgaagaagaaattaaacttctgtctgacaaactgaaagaggctgagacccgtgctgaatttgcagagagaacggttgcaaaactggaaaagacaattgatgacctggaagagaaacttgcccaggccaaagaagagaacgtgggcttacatcagacactggatcagacactaaacgaacttaactgtatataagcaaaacagaagagtcttgttccaacagaaactctggagctccgtgggtctttctcttctcttgtaagaagttccttttgttattgccatcttcgctttgctggaaatgtcaagcaaattatgaatacatgaccaaatattttgtatcggagaagctttgagcaccagttaaatctcattccttccctttttttttcaaatggcaccagctttttcagctctcttattttttccttaagtagcatttattcctaaggtaggcagggtatttcctagtaagcatactttcttaagacggaggccatttggttcctgggagaataggcagccccacactttgaagaatacagaccccagtatctagtcgtggatataattaaaacgctgaagaccataaccttttgggtcaactgttggtcaaactataggagagaccagggaccatcacatgggtagggattttccatccagagccaataaaaggactggtgggggccgggggtggctattgtgggaagtcataacccacagatagatcaacctaagaatcctggcccttctccactctccaccatgcaggacaaacatcttctcaagcagtcaacgtagaatgcttgggaaatagtcataattacccacatatagtaattaatagatggtaattaattgatccttgatgtgatgttcttttgcatatttccttcattctaaagttgttccctggccgggagcgttggctttcgcctgtaatcccaacactttgggaggccaggacagatcacttgaggtcaggagttcgagaccagcccagccaacatggcgaaaccatgtctctactaaaaatacaaaaattatggtgacgcctgcctgtagtcccagctactcgggaggctgaggcaggaggatcgcttgaacccaggaagtggagactgcagtgagccgatatcgcaccacagcgctccagcctggtcgacagagtgagactccatctcaagaaaaaataaaaataaagttgttctctgaagagcaaatgtctcattccagtaatgacccactcagcaggaatatggtggagttcagtccaattcaggtcagccatatccaaaagaccacaagtcattactaagttgagcaaaagagtttttatctattagcagaaagggcctctctggcagcagagattaaaaactggcccaacttcatttccatacttcagggaacagcaaattgaggatttacttatctaggacttgaattccttctttgggaccaagttaataaaagaccaagaaactcctgattaaactggataatgaaggattctgtagacagggctgcacgtatcggctttgtttgacttctcttttctcagttaacatctcagagctagaacattccacattccccagcagcgtgtgggggctgactaaagtttacaattccaactaaaaatcaccctgcttctggcttatctgaatcccttacccaccccaccccaccaccctactcctatttattcagcaccacactacccaggaaatacactagcaaattgtgcaatggaataaaatccacactttagattcttgcaactgtatcatatgtaatagtatcactttttctacattttggtcaaataaatttttacataaactac

SEQ ID NO: 32889 - DNA, 2630 bp, Homo sapiens
  source 1..2630: mol_type = unassigned DNA
ataaggccctctcctccaccctgccaggctcactctgccccacagccacagcccctgactgccgcagcccccacagagcccgccgcgcaccccacgtcccccacgccagcgcccagccatggaggccatcaagaagaaaatgcagatgctgaagttggacaaggagaatgccatcgaccgcgcggagcaggcggaggcggataagaaagccgctgaggacaagtgcaagcaggtggaggaggagctgacgcacctccagaagaaactaaaagggacagaggacgagctggataaatattccgaggacctgaaggacgcgcaggagaagctggagctcacggagaagaaggcctccgacgctgaaggtgatgtggccgccctcaaccgacgcatccagctcgttgaggaggagttggacagggctcaggaacgactggccacggccctgcagaagctggaggaggcagaaaaagctgcagatgagagtgagagaggaatgaaggtgatagaaaaccgggccatgaaggatgaggagaagatggagattcaggagatgcagctcaaagaggccaagcacattgcggaagaggctgaccgcaaatacgaggaggtagctcgtaagctggtcatcctggagggtgagctggagagggcagaggagcgtgcggaggtgtctgaactaaaatgtggtgacctggaagaagaactcaagaatgttactaacaatctgaaatctctggaggctgcatctgaaaagtattctgaaaaggaggacaaatatgaagaagaaattaaacttctgtctgacaaactgaaagaggctgagacccgtgctgaatttgcagagagaacggttgcaaaactggaaaagacaattgatgacctggaagagaaacttgcccaggccaaagaagagaacgtgggcttacatcagacactggatcagacactaaacgaacttaactgtatataagcaaaacagaagagtcttgttccaacagaaactctggagctccgtgggtctttctcttctcttgtaagaagttccttttgttattgccatcttcgctttgctggaaatgtcaagcaaattatgaatacatgaccaaatattttgtatcggagaagctttgagcaccagttaaatctcattccttccctttttttttcaaatggcaccagctttttcagctctcttattttttccttaagtagcatttattcctaaggtaggcagggtatttcctagtaagcatactttcttaagacggaggccatttggttcctgggagaataggcagccccacactttgaagaatacagaccccagtatctagtcgtggatataattaaaacgctgaagaccataaccttttgggtcaactgttggtcaaactataggagagaccagggaccatcacatgggtagggattttccatccagagccaataaaaggactggtgggggccgggggtggctattgtgggaagtcataacccacagatagatcaacctaagaatcctggcccttctccactctccaccatgcaggacaaacatcttctcaagcagtcaacgtagaatgcttgggaaatagtcataattacccacatatagtaattaatagatggtaattaattgatccttgatgtgatgttcttttgcatatttccttcattctaaagttgttccctggccgggagcgttggctttcgcctgtaatcccaacactttgggaggccaggacagatcacttgaggtcaggagttcgagaccagcccagccaacatggcgaaaccatgtctctactaaaaatacaaaaattatggtgacgcctgcctgtagtcccagctactcgggaggctgaggcaggaggatcgcttgaacccaggaagtggagactgcagtgagccgatatcgcaccacagcgctccagcctggtcgacagagtgagactccatctcaagaaaaaataaaaataaagttgttctctgaagagcaaatgtctcattccagtaatgacccactcagcaggaatatggtggagttcagtccaattcaggtcagccatatccaaaagaccacaagtcattactaagttgagcaaaagagtttttatctattagcagaaagggcctctctggcagcagagattaaaaactggcccaacttcatttccatacttcagggaacagcaaattgaggatttacttatctaggacttgaattccttctttgggaccaagttaataaaagaccaagaaactcctgattaaactggataatgaaggattctgtagacagggctgcacgtatcggctttgtttgacttctcttttctcagttaacatctcagagctagaacattccacattccccagcagcgtgtgggggctgactaaagtttacaattccaactaaaaatcaccctgcttctggcttatctgaatcccttacccaccccaccccaccaccctactcctatttattcagcaccacactacccaggaaatacactagcaaattgtgcaatggaataaaatccacactttagattcttgcaactgtatcatatgtaatagtatcactttttctacattttggtcaaataaatttttacataaactac

SEQ ID NO: 32890 - DNA, 1542 bp, Homo sapiens
  source 1..1542: mol_type = unassigned DNA
actctgccccacagccacagcccctgactgccgcagcccccacagagcccgccgcgcaccccacgtcccccacgccagcgcccagccatggaggccatcaagaagaaaatgcagatgctgaagttggacaaggagaatgccatcgaccgcgcggagcaggcggaggcggataagaaagccgctgaggacaagtgcaagcaggtggaggaggagctgacgcacctccagaagaaactaaaagggacagaggacgagctggataaatattccgaggacctgaaggacgcgcaggagaagctggagctcacggagaagaaggcctccgacgctgaaggtgatgtggccgccctcaaccgacgcatccagctcgttgaggaggagttggacagggctcaggaacgactggccacggccctgcagaagctggaggaggcagaaaaagctgcagatgagagtgagagaggaatgaaggtgatagaaaaccgggccatgaaggatgaggagaagatggagattcaggagatgcagctcaaagaggccaagcacattgcggaagaggctgaccgcaaatacgaggaggtagctcgtaagctggtcatcctggagggtgagctggagagggcagaggagcgtgcggaggtgtctgaactaaaatgtggtgacctggaagaagaactcaagaatgttactaacaatctgaaatctctggaggctgcatctgaaaagtattctgaaaaggaggacaaatatgaagaagaaattaaacttctgtctgacaaactgaaagaggctgagacccgtgctgaatttgcagagagaacggttgcaaaactggaaaagacaattgatgacctggaagagaaacttgcccaggccaaagaagagaacgtgggcttacatcagacactggatcagacactaaacgaacttaactgtatataagcaaaacagaagagtcttgttccaacagaaactctggagctccgtgggtctttctcttctcttgtaagaagttccttttgttattgccatcttcgctttgctggaaatgtcaagcaaattatgaatacatgaccaaatattttgtatcggagaagctttgagcaccagttaaatctcattccttccctttttttttcaaatggcaccagctttttcagctctcttattttttccttaagtagcatttattcctaaggtaggcagggtatttcctagtaagcatactttcttaagacggaggccatttggttcctgggagaataggcagccccacactttgaagaatacagaccccagtatctagtcgtggatataattaaaacgctgaagaccataaccttttgggtcaactgttggtcaaactataggagagaccagggaccaccctactcctatttattcagcaccacactacccaggaaatacactagcaaattgtgcaatggaataaaatccacactttagattcttgcaactgtatcatatgtaatagtatcactttttctacattttggtcaaataaatttttacataaactac

SEQ ID NO: 32891 - DNA, 714 bp, Homo sapiens
  source 1..714: mol_type = unassigned DNA
atttaagtcaagggccggctggcaaccccagcaagctgtcctgtgagccgccagcatggatgacatctacaaggctgcggtagagcagctgacagaagagcagaaaaatgagttcaaggcagccttcgacatcttcgtgctgggcgctgaggatggctgcatcagcaccaaggagctgggcaaggtgatgaggatgctgggccagaaccccacccctgaggagctgcaggagatgatcgatgaggtggacgaggacggcagcggcacggtggactttgatgagttcctggtcatgatggttcggtgcatgaaggacgacagcaaagggaaatctgaggaggagctgtctgacctcttccgcatgtttgacaaaaatgctgatggctacatcgacctggatgagctgaagataatgctgcaggctacaggcgagaccatcacggaggacgacatcgaggagctcatgaaggacggagacaagaacaacgacggccgcatcgactatgatgagttcctggagttcatgaagggtgtggagtagatgctgaccttcacccagagctgcctatgcccagcctccaactccagctgagtcctggggttggggagggggtcggggtcccaggacctgagcctggccatgtcctcaaccccaaatcccccgactccctccccagatctgtcctgggggatgcaaataaagcctgctctccc

SEQ ID NO: 32892 - DNA, 710 bp, Homo sapiens
  source 1..710: mol_type = unassigned DNA
aaatcccgggggctagagcaggccaggtcatctttgggtggtggagtgcaaaggaggcgacctgcaacagaggagtcccggtcaccagcaaccatgacggaccagcaggctgaggccaggtcctacctcagcgaagagatgatcgctgagttcaaggctgcctttgacatgtttgatgctgatggtggtggggacatcagcgtcaaggagttgggcacggtgatgaggatgctgggccagacacccaccaaggaggagctggacgccatcatcgaggaggtggatgaggacggcagcggcaccatcgacttcgaggagttcttggtcatgatggtgcgccagatgaaagaggacgcgaaagggaagagcgaggaggagctggccgagtgcttccgcatcttcgacaggaatgcagacggctacatcgacccggaggagctggctgagattttcagggcctccggggagcacgtgacggacgaggagatcgaatctctgatgaaagacggcgacaagaacaacgacggccgcattgacttcgacgagttcctgaagatgatggagggcgtgcagtaaggagtggacagtcgcctctaccaagatcgcgtgtccctagggtgtgggagactccgccctgccgggtccccaccagggaggcgcgaccccttgtgggtctttgtctggaaggaataaaagcaaatgttccaaaa

SEQ ID NO: 32893 - DNA, 780 bp, Homo sapiens
  source 1..780: mol_type = unassigned DNA
gggcccttggctccaggagggacttgggaagcctgggtcggcctgagggagtcccaggcctgccgcagagtcatcccagtccggccagtgttcacaggcttgcacaatctgatttgaacctcacacatgggaagtaggcaaacagggaaactgaggaccagagaggacggaccagcaggctgaggccaggtcctacctcagcgaagagatgatcgctgagttcaaggctgcctttgacatgtttgatgctgatggtggtggggacatcagcgtcaaggagttgggcacggtgatgaggatgctgggccagacacccaccaaggaggagctggacgccatcatcgaggaggtggatgaggacggcagcggcaccatcgacttcgaggagttcttggtcatgatggtgcgccagatgaaagaggacgcgaaagggaagagcgaggaggagctggccgagtgcttccgcatcttcgacaggaatgcagacggctacatcgacccggaggagctggctgagattttcagggcctccggggagcacgtgacggacgaggagatcgaatctctgatgaaagacggcgacaagaacaacgacggccgcattgacttcgacgagttcctgaagatgatggagggcgtgcagtaaggagtggacagtcgcctctaccaagatcgcgtgtccctagggtgtgggagactccgccctgccgggtccccaccagggaggcgcgaccccttgtgggtctttgtctggaaggaataaaagcaaatgttccaaaa

SEQ ID NO: 32894 - DNA, 1750 bp, Homo sapiens
  source 1..1750: mol_type = unassigned DNA
aaactgccccagcaggccccagggaaggacggcaggctgggatgccgtccccacggactccctctcctctcttagccctggcactaagtgcgttcctctggcaaagaagaaaataatttctgtccctcgccatctgctgcatgggaagatgggaatggagtgagcacggcaagacagatgctgcgtcctgcaatggccccaccatggaccctcgtcatccaaccgaagtcgcccccttgcctggctttatcttcactatattgtgaggctgcttcattgaatcttatcccagactttaacttttccatgactgccgtgattttgccatgttgttcacacagagtgtgtctgaccttagctgcattgccaccgcctttgggaccctgagccttcttgccagcactgtcactcccagaggttgcttccactttccccttttccagaaccacttgttcctttgggtggcatcctggaaacttgctgttgaagtctcaactgcctcagtggttcttcaagggaggtcctcaggccaccacctgagaaattgttagaaatgcaagtttctgggctgcatcccagacctgctgaatcagaaatttggggaggagcacggactttggcaccagagagctgggtgcagctctcagctctgcgtcatccttgctgtgggaccctgggttattgctgagccactgtgagtctgtttcctcgtgggtatagtaggtctgcagtctacggcgaggcacaggccagcccagctccacgaggactgaacaaggtgctgtctcactgccaccatgccggaagtcgagagaaaacccaagatcactgcctcccgcaaactcttgctgaagagcctgatgctggccaaggccaaggaatgctgggagcaggagcacgaggagcgcgaggctgagaaggtgcgctacctggcagagcgcatccccacgctgcagacccgtggcctgtccctcagtgccctgcaggacctgtgccgggagctgcacgccaaggtggaggtggtggatgaggagcgatacgacattgaggccaaatgcctccacaacaccagggagattaaggacctgaagctgaaggtgatggacctccgtgggaagttcaagcgcccgcccctgcgtcgagtccgtgtctcggctgacgccatgctccgggccctgctgggctccaagcacaaggtgtccatggatctgcgggccaacctcaagtctgtgaagaaggaagacacagagaaggagcggcctgtggaggtgggtgactggaggaagaacgtggaggccatgtctggcatggaaggccggaagaagatgtttgatgccgccaagtctccgacctcacaatagaggccagcttgctgtgctgcgctctgagctcctgcttcatgcttcttctccaacccagctcactcacctctctgcctgtgtctggagcatcccttcccacctctcccccacttcttccctccagcctgcatgccctcctctggaactgggattaaacagatacccaagaggcaggaaaaacgcgagtgtctgaagacctcaccctggcagggtgggcttctatccacccatgaggcacctggggcttctcagccaccccgtggtgtaacaagtggaggaggaggagggggtgagaacacctttcctccagccctgtgccacactccttctatgtgtgtacagtgtccacaggcatcacaccttcttcattaaaaacccagtttcctggt

SEQ ID NO: 32895 - DNA, 6142 bp, Homo sapiens
  source 1..6142: mol_type = unassigned DNA
ctcggctctgcccctcacagtctgcagtctacggcgaggcacaggccagcccagctccacgaggactgaacaaggtgctgtctcactgccaccatgccggaagtacagagaaaacccaagatcactgcctcccgcaaactcttgctgaagagcctgatgctggccaaggccaaggaatgctgggagcaggagcacgaggagcgcgaggctgagaaggtgcgctacctggcagagcgcatccccacgctgcagacccgtggcctgtccctcagtgccctgcaggacctgtgccgggagctgcacgccaaggtggaggtggtggatgaggagcgatacgacattgaggccaaatgcctccacaacaccagggagattaaggacctgaagctgaaggtgatggacctccgtgggaagttcaagcgcccgcccctgcgtcgagtccgtgtctcggctgacgccatgctccgggccctgctgggctccaagcacaaggtgtccatggatctgcgggccaacctcaagtctgtgaagaaggaagacacagagaaggagcggcctgtggaggtgggtgactggaggaagaacgtggaggccatgtctggcatggaaggccggaagaagatgtttgatgccgccaagtctccgacctcacaatagaggccagcttgctgtgctgcgctctgagctcctgcttcatgcttcttctccaacccagctcactcacctctctgcctgtgtctggagcatcccttcccacctctcccccacttcttccctccagcctgcatgccctcctctggaactgggattaaacagatacccaagaggcaggaaaaacgcgagtgtctgaagacctcaccctggcagggtgggcttctatccacccatgaggcacctggggcttctcagccaccccgtggtgtaacaagtggaggaggaggagggggtgagaacacctttcctccagccctgtgccacactccttctatgtgtgtacagtgtccacaggcatcacaccttcttcattaaaaacccagtttcctggtcatttctgcagctctgactgtgagccctgagaagaaagggaagacttggggcttgggaagagagggctgtgctgggctccagtcaccctgtctgcagtccggagctcgggatctgaagggagggctaaggaattggtggctgcttgccagggtcccctggggccccttctgcccagtccctgtgacgtcacactgcacacactcaccacccaggatgctcagctcaccagagccctgacctccgagaaatgaccccgtcctgcccctgactctggccatcagaagaggcctctccattaagagccgcttctcctgccggctttcatactctccttcctctgcaaacctggattaactctccctgatgtgtgctgggttgagaggtcagggcactttcaatccctcacctagtcctgctgcacagggcaggaggcctcacagaagagatacttgcagttccaggcctggccaccaggtgacgccttccttctctcctgggctctcctgtccctccggcctctgctctccccacgttcacccaccctcctcccaattgtttccccttcacactcctgcactggtcctatcccccaggactgattctttcccggagatggggtggccacttatctgtcctctggatcaggtcctttctccatcccactacctcctgggtccaaagcctggtgagagcatagggccttctggggtggaaggggggtctggggcagcctctcttcccccaacatactcactagagtggctcctgtgaagcagagaccaaagttctgacttttctttttccttttttttttttttttgagatggagtctcgctgtgtcacccaggctggagtgcagtgacgcgatctcgactcactgcaacctccgcctcccaggttcaagcgattctcctgcttcaacctcctgagtagctgggattacaggtgcgtgccaccacaccccgctaatttttgtatttttagtagagacagggtttcaccatgttggtcaggctggtctcgaactcctgacctcgtaatctgcccacctcggcctcccaaagttctgggattacaggtgtgagcgaccacatccggtcaagttctgacttttcagggcagtgggatggtgacttctgagctaagcctgcaagggaagtggctgttcccagacctggggtcccttggcttttcgaccaccctagcactggccctaggaggggctgagttatcagagcagcaacccttctacccaccctactgagtccccattctaccttcgaatcccatgtattatcttccataagtgccagaaattggtacaaagtgcagtgccagctgctccccagggcatggtctggctctctgggctgctgggctgccagcccctttcagaaagcatggcagtgggaaccagcaacttgggctaccttaggggaagcagcactctgcccagggttcttgctataaataggtcagtgggcagagaggcagatgtgtgcaaaaagcacaaccccaatcacacacagaaacccgtaggcacggacacacccagtctcaatgcacgaagttggagaacctgacagggctggtccaggccacagaggatggggttaggcttcatgccttcatgcccaggcagccacagaaacccactcttccccgcctcacagggctcctccggttggcctggatccaaagcgatctccttgtttcacctctttccagctcttccctagagcctggccccaagttccagagtcaaatcccagttttgcagtcaactattaacctggggccctggcagattggggtatccacccagtcatgtaaaggcaggagacctgctctgggcctgactcaaagcaaacacgtgggtgcagaagacccatgggaggaggaggtggggcccactcaacacacctaagccagtggccctctaggaggggcagaagagccaaccagagggttcctggaggtcatcgggttcctccttctgcttccaggcagcaacagacctaattcatctcctgtgaggatggagcaagggcgaatataggcatagacatatctggagcgcaaggattgagaggccctgtggacaaggggaaggagagcttgggggtgggagagggatctatggaaggggctgttgtagccaagaatggggcctgggctgggggcctggcctctggagagccctgattctactccagtcttctctcaccatggagacaacaccagtagagctgggagctggggcctgccactgagtaacagctcacacatgtagcacacttatgcgtcaggcaccagcatgtacaccttaatttatttaactttcacaacaaccctaggagaaaggtacagctactattctcatggtacagtggggaaaactgaggcacagagaggttagggacttttcatgatcacacagctaataagtggtggtcccaggattcaacccaagaagtctgttagaatccatactcttatcgactattttaataacagcatttcaataatagtaatatgtgatgttaaatgctttatctgagttatatcattgcattctcacaaaaatggtacatttgttagctcaaatttacagatgaggaaatggaggcctggagagttcaagtagctcactctaagttacagggtttgctagctgcagactggagactagatctcaggtcactctgccttggggttgcccttttctgagatcagactggccttaacagagcccaactttcttggaaggacacagctgggggtcgagggtcctgcatatgcacctggggagtccccacacacccgcaccaaaggggaaacattcaaaggagatgcaggtgacatacagatgggctaaggtgaggccttcctccaacatggggccctggctgagagtggagggatagggtgctacttgggggatatctattactaatcagcacacaatagctgggtgggcaccccctctctctgcagctggtggagatgggcctggtgctcctctctgcttggtaggaatgaccagggcaggatgccacctgctacactcttgcctgtcccagagcccttgggagaccagctgttgctcccacctttccccacagggtgcccggtccccacggcgcaaggaggccaagctcagctgtgtgtctgagcccactcagcagcaggcatgatcagggcagggcccagcgctaagggctgctggggctaaagtgccttgctgaaggaggggcagagttaaacattagccacaatggccccccgcgaagtgagtcatactccccacaagtctctgggctgggcagccgggggcgggggggttagcttcgttccaggtgggtgaccaagctgcggaagcccaggacagttcgctgggaccagtgctaatggcagcttctgctcctgacccccatcaggtctctttcctcagacatccccaaagcttgtctgcctgtgggtctttcattaaaggtgacgggcaagggttttctcttccttccaagacacacttctaggctggcttgtgggtcccctgagacgaaggctgagcagggtgagcctcgaaaaccccatagcactggcccagagcactgcggtcaatgtccgaaggaccagagagggagggtgacttgctcaaggtcacaaacctaactggagctaggaagtaggtccccagactcccagtctgaggaaattggatgtggacagggctttggtctcctggccagaggcaaacgcccagggatctgaacaggctgcccatctctggcctcaactcagcaccccaactggctccagtgccaaccattggcctctctcactggttggcacaggctgggtgagcctggccctttgccctgggttcaggagagaggtatggctttgcctggcagtcaggggaggtgttccaacctgggagcccctgggggaggagcgtgtgtgtgaacgcttgtgcctgttcatcagaaggggtgagcatggtgtgtatgcgtgggcatgcagaatgcagggtgatgacctgtctgcccgccctgagtgtcacagacacctgtgtgtcccctgtactagtgcctcccagatgctcttctcctgactggctctttgtgacctaaatttcaactgctccaccccacaaggaggaaaccagggccacaaatgtagtgagattttcataaagctaaatgtattcagtggaaacgaccttcctctgatctaaaagcatgcatgcctttgttttattactggagtattaaattagcccttacttatggaataggaggacagtaggtggcaattgttttctaatgctcttacttcacaaaataaaatggtggcagcacaatgtcagtatttatattacacaatattattagtttgtaaaaaccgaaagccagggagcttactgccctggattctttagggcgtgggtcttatcacctcattcatttcttcccttcccctaagagtgccacaagcatggcagttgctcagctgagacacatgaatgggaacagaactgaaatatcaggatgtgacctcgagccagctggttggggctggggatccccctggatctccactctgtcctgtccgagaaaggggaagctgccctatgagtcttttttctgggggattccagaggttgaacgtctgttctgaggctcctcagaacctcgagggaggggacgagagagatgaccccttgcccaaccactggctgaaaaatcttgaaattccctgactttgaccagggaattcccagttgtgctaagccctgcctggtggaatgtccctggaggaagtaaccaggacacgcatacgtttttaatgtacgtataaagaatcgtaaagtgaacacccatctgccaaccactcattttaagaactaggatatggcacatacttttgaagcccttatgcgtccctccccaatcacaaccccttcctctccacaaaggtaaatacaatcctcaattttgtgtttgttattctcttggttctcttcataatgttactacgtatttatgaattcctaatacatcattcagttttggatctttttgtaaacctt

SEQ ID NO: 32896 - DNA, 5413 bp, Homo sapiens
  source 1..5413: mol_type = unassigned DNA
ctcggctctgcccctcacagtctgcagtctacggcgaggcacaggccagcccagctccacgaggactgaacaaggtgctgtctcactgccaccatgccggaagtcgagagaaaacccaagatcactgcctcccgcaaactcttgctgaagagcctgatgctggccaaggccaaggaatgctgggagcaggagcacgaggagcgcgaggctgagaaggtgcgctacctggcagagcgcatccccacgctgcagacccgtggcctgtccctcagtgccctgcaggacctgtgccgggagctgcacgccaaggtggaggtggtggatgaggagcgatacgacattgaggccaaatgcctccacaacaccagggagattaaggacctgaagctgaaggtgatggacctccgtgggaagttcaagcgcccgcccctgcgtcgagtccgtgtctcggctgacgccatgctccgggccctgctgggctccaagcacaaggtgtccatggatctgcgggccaacctcaagtctgtgaagaaggaagacacagagaaggagcggcctgtggaggtgggtgactggaggaagaacgtggaggccatgtctggcatggaaggccggaagaagatgtttgatgccgccaagtctccgacctcacaatagaggccagcttgctgtgctgcgctctgagctcctgcttcatgcttcttctccaacccagctcactcacctctctgcctgtgtctggagcatcccttcccacctctcccccacttcttccctccagcctgcatgccctcctctggaactgggattaaacagatacccaagaggcaggaaaaacgcgagtgtctgaagacctcaccctggcagggtgggcttctatccacccatgaggcacctggggcttctcagccaccccgtggtgtaacaagtggaggaggaggagggggtgagaacacctttcctccagccctgtgccacactccttctatgtgtgtacagtgtccacaggcatcacaccttcttcattaaaaacccagtttcctggtcatttctgcagctctgactgtgagccctgagaagaaagggaagacttggggcttgggaagagagggctgtgctgggctccagtcaccctgtctgcagtccggagctcgggatctgaagggagggctaaggaattggtggctgcttgccagggtcccctggggccccttctgcccagtccctgtgacgtcacactgcacacactcaccacccaggatgctcagctcaccagagccctgacctccgagaaatgaccccgtcctgcccctgactctggccatcagaagaggcctctccattaagagccgcttctcctgccggctttcatactctccttcctctgcaaacctggattaactctccctgatgtgtgctgggttgagaggtcagggcactttcaatccctcacctagtcctgctgcacagggcaggaggcctcacagaagagatacttgcagttccaggcctggccaccaggtgacgccttccttctctcctgggctctcctgtccctccggcctctgctctccccacgttcacccaccctcctcccaattgtttccccttcacactcctgcactggtcctatcccccaggactgattctttcccggagatggggtggccacttatctgtcctctggatcaggtcctttctccatcccactacctcctgggtccaaagcctggtgagagcatagggccttctggggtggaaggggggtctggggcagcctctcttcccccaacatactcactagagtggctcctgtgaagcagagaccaaagttctgacttttctttttccttttttttttttttttgagatggagtctcgctgtgtcacccaggctggagtgcagtgacgcgatctcgactcactgcaacctccgcctcccaggttcaagcgattctcctgcttcaacctcctgagtagctgggattacaggtgcgtgccaccacaccccgctaatttttgtatttttagtagagacagggtttcaccatgttggtcaggctggtctcgaactcctgacctcgtaatctgcccacctcggcctcccaaagttctgggattacaggtgtgagcgaccacatccggtcaagttctgacttttcagggcagtgggatggtgacttctgagctaagcctgcaagggaagtggctgttcccagacctggggtcccttggcttttcgaccaccctagcactggccctaggaggggctgagttatcagagcagcaacccttctacccaccctactgagtccccattctaccttcgaatcccatgtattatcttccataagtgccagaaattggtacaaagtgcagtgccagctgctccccagggcatggtctggctctctgggctgctgggctgccagcccctttcagaaagcatggcagtgggaaccagcaacttgggctaccttaggggaagcagcactctgcccagggttcttgctataaataggtcagtgggcagagaggcagatgtgtgcaaaaagcacaaccccaatcacacacagaaacccgtaggcacggacacacccagtctcaatgcacgaagttggagaacctgacagggctggtccaggccacagaggatggggttaggcttcatgccttcatgcccaggcagccacagaaacccactcttccccgcctcacagggctcctccggttggcctggatccaaagcgatctccttgtttcacctctttccagctcttccctagagcctggccccaagttccagagtcaaatcccagttttgcagtcaactattaacctggggccctggcagattggggtatccacccagtcatgtaaaggcaggagacctgctctgggcctgactcaaagcaaacacgtgggtgcagaagacccatgggaggaggaggtggggcccactcaacacacctaagccagtggccctctaggaggggcagaagagccaaccagagggttcctggaggtcatcgggttcctccttctgcttccaggcagcaacagacctaattcatctcctgtgaggatggagcaagggcgaatataggcatagacatatctggagcgcaaggattgagaggccctgtggacaaggggaaggagagcttgggggtgggagagggatctatggaaggggctgttgtagccaagaatggggcctgggctgggggcctggcctctggagagccctgattctactccagtcttctctcaccatggagacaacaccagtagagctgggagctggggcctgccactgagtaacagctcacacatgtagcacacttatgcgtcaggcaccagcatgtacaccttaatttatttaactttcacaacaaccctaggagaaaggtacagctactattctcatggtacagtggggaaaactgaggcacagagaggttagggacttttcatgatcacacagctaataagtggtggtcccaggattcaacccaagaagtctgttagaatccatactcttatcgactattttaataacagcatttcaataatagtaatatgtgatgttaaatgctttatctgagttatatcattgcattctcacaaaaatggtacatttgttagctcaaatttacagatgaggaaatggaggcctggagagttcaagtagctcactctaagttacagggtttgctagctgcagactggagactagatctcaggtcactctgccttggggttgcccttttctgagatcagactggccttaacagagcccaactttcttggaaggacacagctgggggtcgagggtcctgcatatgcacctggggagtccccacacacccgcaccaaaggggaaacattcaaaggagatgcaggtgacatacagatgggctaaggtgaggccttcctccaacatggggccctggctgagagtggagggatagggtgctacttgggggatatctattactaatcagcacacaatagctgggtgggcaccccctctctctgcagctggtggagatgggcctggtgctcctctctgcttggtaggaatgaccagggcaggatgccacctgctacactcttgcctgtcccagagcccttgggagaccagctgttgctcccacctttccccacagggtgcccggtccccacggcgcaaggaggccaagctcagctgtgtgtctgagcccactcagcagcaggcatgatcagggcagggcccagcgctaagggctgctggggctaaagtgccttgctgaaggaggggcagagttaaacattagccacaatggccccccgcgaagtgagtcatactccccacaagtctctgggctgggcagccgggggcgggggggttagcttcgttccaggtgggtgaccaagctgcggaagcccaggacagttcgctgggaccagtgctaatggcagcttctgctcctgacccccatcaggtctctttcctcagacatccccaaagcttgtctgcctgtgggtctttcattaaaggtgacgggcaagggttttctcttccttccaagacacacttctaggctggcttgtgggtcccctgagacgaaggctgagcagggtgagcctcgaaaaccccatagcactggcccagagcactgcggtcaatgtccgaaggaccagagagggagggtgacttgctcaaggtcacaaacctaactggagctaggaagtaggtccccagactcccagtctgaggaaattggatgtggacagggctttggtctcctggccagaggcaaacgcccagggatctgaacaggctgcccatctctggcctcaactcagcaccccaactggctccagtgccaaccattggcctctctcactggttggcacaggctgggtgagcctggccctttgccctgggttcaggagagaggtatggctttgcctggcagtcaggggaggtgttccaacctgggagcccctgggggaggagcgtgtgtgtgaacgcttgtgcctgttcatcagaaggggtgagcatggtgtgtatgcgtgggcatgcagaatgcagggtgatgacctgtctgcccgccctgagtgtcacagacacctgtgtgtcccctgtactagtgcctcccagatgctcttctcctgactggctctttgtgacctaaatttcaactgctccaccccacaaggaggaaaccagggccacaaatgtagtgagattttcataaagctaaatgtattcagtggaaacgaccttcctctgatctaaaagcatgcatgcctttgttttattactggagtattaaattagcccttacttatggaataggaggacagtaggtggcaattgttttctaatgctcttacttcacaaaataaaatggtggcagcacaa

SEQ ID NO: 32897 - DNA, 1100 bp, Homo sapiens
  source 1..1100: mol_type = unassigned DNA
ctacggcgaggcacaggccagcccagctccacgaggactgaacaaggtgctgtctcactgccaccatgccggaagtcgagagaaaacccaagatcactgcctcccgcaaactcttgctgaagagcctgatgctggccaaggccaaggaatgctgggagcaggagcacgaggagcgcgaggctgagaaggtgcgctacctggcagagcgcatccccacgctgcagacccgtggcctgtccctcagtgccctgcaggacctgtgccgggagctgcacgccaaggtggaggtggtggatgaggagcgatacgacattgaggccaaatgcctccacaacaccagggagattaaggacctgaagctgaaggtgatggacctccgtgggaagttcaagcgcccgcccctgcgtcgagtccgtgtctcggctgacgccatgctccgggccctgctgggctccaagcacaaggtgtccatggatctgcgggccaacctcaagtctgtgaagaaggaagacacagagaaggagcggcctgtggaggtgggtgactggaggaagaacgtggaggccatgtctggcatggaaggccggaagaagatgtttgatgccgccaagtctccgacctcacaatagaggtacctagagaccagctcccttctctggggtccatcagagtctagaggataatgagggagtccacaatgggcaggcgggttgtacttagtgtggtgcacggatgcacggactaaggcaccgatgagactgatttgagtcggctctcctgggctcagtcctggctccagcaccatgatacttgggcatgtcatttctgtttggcggccctttttgttcccattatctatgaaattgggggctgtatcaaatcagtggttctccaagtgtggtcctgggaccagcagcgtctacatcacctgggatgcaaatgatcagcccccaccccagatccactaaattggaaactctggggtgaggccagccttctaggtgattctgatgcacatgagagtttgagaaccactaggttagagggtccctgggatcccttcatctctgactttctgagaatctatgcacttttaaata

SEQ ID NO: 32898 - DNA, 1750 bp, Homo sapiens
  source 1..1750: mol_type = unassigned DNA
aaactgccccagcaggccccagggaaggacggcaggctgggatgccgtccccacggactccctctcctctcttagccctggcactaagtgcgttcctctggcaaagaagaaaataatttctgtccctcgccatctgctgcatgggaagatgggaatggagtgagcacggcaagacagatgctgcgtcctgcaatggccccaccatggaccctcgtcatccaaccgaagtcgcccccttgcctggctttatcttcactatattgtgaggctgcttcattgaatcttatcccagactttaacttttccatgactgccgtgattttgccatgttgttcacacagagtgtgtctgaccttagctgcattgccaccgcctttgggaccctgagccttcttgccagcactgtcactcccagaggttgcttccactttccccttttccagaaccacttgttcctttgggtggcatcctggaaacttgctgttgaagtctcaactgcctcagtggttcttcaagggaggtcctcaggccaccacctgagaaattgttagaaatgcaagtttctgggctgcatcccagacctgctgaatcagaaatttggggaggagcacggactttggcaccagagagctgggtgcagctctcagctctgcgtcatccttgctgtgggaccctgggttattgctgagccactgtgagtctgtttcctcgtgggtatagtaggtctgcagtctacggcgaggcacaggccagcccagctccacgaggactgaacaaggtgctgtctcactgccaccatgccggaagtacagagaaaacccaagatcactgcctcccgcaaactcttgctgaagagcctgatgctggccaaggccaaggaatgctgggagcaggagcacgaggagcgcgaggctgagaaggtgcgctacctggcagagcgcatccccacgctgcagacccgtggcctgtccctcagtgccctgcaggacctgtgccgggagctgcacgccaaggtggaggtggtggatgaggagcgatacgacattgaggccaaatgcctccacaacaccagggagattaaggacctgaagctgaaggtgatggacctccgtgggaagttcaagcgcccgcccctgcgtcgagtccgtgtctcggctgacgccatgctccgggccctgctgggctccaagcacaaggtgtccatggatctgcgggccaacctcaagtctgtgaagaaggaagacacagagaaggagcggcctgtggaggtgggtgactggaggaagaacgtggaggccatgtctggcatggaaggccggaagaagatgtttgatgccgccaagtctccgacctcacaatagaggccagcttgctgtgctgcgctctgagctcctgcttcatgcttcttctccaacccagctcactcacctctctgcctgtgtctggagcatcccttcccacctctcccccacttcttccctccagcctgcatgccctcctctggaactgggattaaacagatacccaagaggcaggaaaaacgcgagtgtctgaagacctcaccctggcagggtgggcttctatccacccatgaggcacctggggcttctcagccaccccgtggtgtaacaagtggaggaggaggagggggtgagaacacctttcctccagccctgtgccacactccttctatgtgtgtacagtgtccacaggcatcacaccttcttcattaaaaacccagtttcctggt

SEQ ID NO: 32899 - DNA, 633 bp, Homo sapiens
  source 1..633: mol_type = unassigned DNA
cctcttcccccagctgctacttgcccctctgggccttcactgtggccctttgctctccctcattccccctcccagtcccatctctgctcagtccccacacctggtctggctgctcattctttccctttctgcagctcgagtctccccagtctgcagtctacggcgaggcacaggccagcccagctccacgaggactgaacaaggtgctgtctcactgccaccatgccggaagtcgagagaaaacccaagatcactgcctcccgcaaactcttgctgaagagcctgatgctggccaaggccaaggaatgctgggagcaggagcacgaggagcgcgaggctgagaaggtgcgctacctggcagagcgcatccccacgctgcagacccgtggcctgtccctcagtgccctgcaggacctgtgccgggagctgcacgccaaggtggaggtggtggatgaggagcgatacgacattgaggccaaatgcctccacaacaccagggagattaaggacctgaagctgaaggtgatggacctccgtgggaagttcaagcgcccgcccctgcgtcgagtccgtgtctcggctgacgccatgctccgggccctgctgggctccaagcacaaggtgtccatggat

SEQ ID NO: 32900 - DNA, 706 bp, Homo sapiens
  source 1..706: mol_type = unassigned DNA
ctggcaaagtgtcacacaccacacagcaccatgtcccagtgcaagaagcggaacagggccatcacggcccgcaggcagcacctgaagagtgtgatgctgcagatagcggccacggagctggagaaggaggagagccgccgtgaggcagagaagcagaactacctggcggagcactgcccgccgctgcatatcccgggctccatgtctgaagtgcaggagctctgcaaacagctgcacgccaagatcgatgcggctgaagaggagaagtacgacatggaggtgagggtgcagaagaccagcaaggagctggaggacatgaaccagaagctatttgatctgcggggcaagttcaagcggcccccactgcggagggtgcgcatgtcggccgatgccatgctcaaggccctgctgggctcgaagcacaaggtgtgcatggacctgagggccaacctgaagcaggtcaagaaggaggacacagagaaggagcgggacctgcgagacgtgggtgactggaggaagaacatcgaggagaagtctggcatggagggccggaagaagatgtttgagtccgagtcctaggccactcgctgcccctacgcctgccccggtgcccggctcccagcagaacatactagggagatgcacccagagcctgccagggagggctggcctcaccaccaccgtcaataaaggatttgaatcccca

SEQ ID NO: 32901 - DNA, 678 bp, Homo sapiens
  source 1..678: mol_type = unassigned DNA
atgggagatgaggagaagcggaacagggccatcacggcccgcaggcagcacctgaagagtgtgatgctgcagatagcggccacggagctggagaaggaggagagccgccgtgaggcagagaagcagaactacctggcggagcactgcccgccgctgcatatcccgggctccatgtctgaagtgcaggagctctgcaaacagctgcacgccaagatcgatgcggctgaagaggagaagtacgacatggaggtgagggtgcagaagaccagcaaggagctggaggacatgaaccagaagctatttgatctgcggggcaagttcaagcggcccccactgcggagggtgcgcatgtcggccgatgccatgctcaaggccctgctgggctcgaagcacaaggtgtgcatggacctgagggccaacctgaagcaggtcaagaaggaggacacagagaaggagcgggacctgcgagacgtgggtgactggaggaagaacatcgaggagaagtctggcatggagggccggaagaagatgtttgagtccgagtcctaggccactcgctgcccctacgcctgccccggtgcccggctcccagcagaacatactagggagatgcacccagagcctgccagggagggctggcctcaccaccaccgtcaataaaggatttgaatccccatg

SEQ ID NO: 32902 - DNA, 745 bp, Homo sapiens
  source 1..745: mol_type = unassigned DNA
tcttacttctcaccctggggaattccaagacattgtccttgaaggaggctccaagctcaggacctcaggatgggagatgaggagaagcggaacagggccatcacggcccgcaggcagcacctgaagagtgtgatgctgcagatagcggccacggagctggagaaggaggagagccgccgtgaggcagagaagcagaactacctggcggagcactgcccgccgctgcatatcccgggctccatgtctgaagtgcaggagctctgcaaacagctgcacgccaagatcgatgcggctgaagaggagaagtacgacatggaggtgagggtgcagaagaccagcaaggagctggaggacatgaaccagaagctatttgatctgcggggcaagttcaagcggcccccactgcggagggtgcgcatgtcggccgatgccatgctcaaggccctgctgggctcgaagcacaaggtgtgcatggacctgagggccaacctgaagcaggtcaagaaggaggacacagagaaggagcgggacctgcgagacgtgggtgactggaggaagaacatcgaggagaagtctggcatggagggccggaagaagatgtttgagtccgagtcctaggccactcgctgcccctacgcctgccccggtgcccggctcccagcagaacatactagggagatgcacccagagcctgccagggagggctggcctcaccaccaccgtcaataaaggatttgaatcccca

SEQ ID NO: 32903 - DNA, 743 bp, Homo sapiens
  source 1..743: mol_type = unassigned DNA
gctgccggcctgacctcgctcccagccctgctgcccagattctaggctccaagctcaggacctcaggatgggagatgaggagaagcggaacagggccatcacggcccgcaggcagcacctgaagagtgtgatgctgcagatagcggccacggagctggagaaggaggagagccgccgtgaggcagagaagcagaactacctggcggagcactgcccgccgctgcatatcccgggctccatgtctgaagtgcaggagctctgcaaacagctgcacgccaagatcgatgcggctgaagaggagaagtacgacatggaggtgagggtgcagaagaccagcaaggagctggaggacatgaaccagaagctatttgatctgcggggcaagttcaagcggcccccactgcggagggtgcgcatgtcggccgatgccatgctcaaggccctgctgggctcgaagcacaaggtgtgcatggacctgagggccaacctgaagcaggtcaagaaggaggacacagagaaggagcgggacctgcgagacgtgggtgactggaggaagaacatcgaggagaagtctggcatggagggccggaagaagatgtttgagtccgagtcctaggccactcgctgcccctacgcctgccccggtgcccggctcccagcagaacatactagggagatgcacccagagcctgccagggagggctggcctcaccaccaccgtcaataaaggatttgaatcccca

SEQ ID NO: 32904 - DNA, 840 bp, Homo sapiens
  source 1..840: mol_type = unassigned DNA
agtgtcctcggggagtctcaagcagcccggaggagactgacggtccctgggaccctgaaggtcacccgggcggccccctcactgaccctccaaacgcccctgtcctcgccctgcctcctgccattcccggcctgagtctcagcatggcggatgggagcagcgatgcggctagggaacctcgccctgcaccagccccaatcagacgccgctcctccaactaccgcgcttatgccacggagccgcacgccaagaaaaaatctaagatctccgcctcgagaaaattgcagctgaagactctgctgctgcagattgcaaagcaagagctggagcgagaggcggaggagcggcgcggagagaaggggcgcgctctgagcacccgctgccagccgctggagttggccgggctgggcttcgcggagctgcaggacttgtgccgacagctccacgcccgtgtggacaaggtggatgaagagagatacgacatagaggcaaaagtcaccaagaacatcacggagattgcagatctgactcagaagatctttgaccttcgaggcaagtttaagcggcccaccctgcggagagtgaggatctctgcagatgccatgatgcaggcgctgctgggggcccgggctaaggagtccctggacctgcgggcccacctcaagcaggtgaagaaggaggacaccgagaaggaaaaccgggaggtgggagactggcgcaagaacatcgatgcactgagtggaatggagggccgcaagaaaaagtttgagagctgagccttcctgcctactgcccctgccctgaggagggccctgaggaataaagcttctctctgagctg

SEQ ID NO: 32905 - DNA, 1163 bp, Homo sapiens
  source 1..1163: mol_type = unassigned DNA
ctggactctgagtgtggagccaggggcagcagggctgtctctgaactcccaggcttgtgtttgagcaaaggaattctctccccctccctctcccctcggggcgggcccgagcctccagctataaactccccggagcttcagtgccctcagcaaggctcagcctcaagattcacagcatctcagacacagcctaggccgcaccaggatgtcggacaccgaggagcaggaatatgaggaggagcagccggaagaggaggctgcggaggaggaggaggaagcccccgaagagccggagccggtggcagagccagaagaggaacgccccaaaccaagccgccccgtggtgcctcctttgatcccgccaaagatcccagaaggggagcgcgttgacttcgatgacatccaccgcaagcgcatggagaaagacctgctggagctgcagacactcatcgatgtacatttcgagcagcggaagaaggaggaagaggagctggttgccttgaaggagcgcattgagcggcgccggtcagagagagccgagcaacagcgcttcagaactgagaaggaacgcgaacgtcaggctaagctggcggaggagaagatgaggaaggaagaggaagaggccaagaagcgggcagaggatgatgccaagaaaaagaaggtgctgtccaacatgggggcccattttggcggctacctggtcaaggcagaacagaagcgtggtaagcggcagacggggcgggagatgaaggtgcgcatcctctccgagcgtaagaagcctctggacattgactacatgggggaggaacagctccgggcccggtctgcctggctgcctccatcacagccctcctgccctgccagggagaaagcccaggagctgtcggactggatccaccagctggagtctgagaagttcgacctgatggcgaagctgaaacagcagaaatatgagatcaacgtgctgtacaaccgcatcagccacgcccagaagttccgtaagggggcagggaagggccgcgttggaggccgctggaagtgaggatgccgccccggacagtggcacctgggaagcctgggagtgtttgtcccatcggtagcttgaaataaacgctcccctcagacacccgctgggttctctgatgttattatggttgagatgc

SEQ ID NO: 32906 - DNA, 1047 bp, Homo sapiens
  source 1..1047: mol_type = unassigned DNA
agctataaactccccggagcttcagtgccctcagcaaggctcagcctcaagattcacagcatctcagacacagcctaggccgcaccaggatgtcggacaccgaggagcaggaatatgaggaggagcagccggaagaggaggctgcggaggaggaggaggaagcccccgaagagccggagccggtggcagagccagaagaggaacgccccaaaccaagccgccccgtggtgcctcctttgatcccgccaaagatcccagaaggggagcgcgttgacttcgatgacatccaccgcaagcgcatggagaaagacctgctggagctgcagacactcatcgatgtacatttcgagcagcggaagaaggaggaagaggagctggttgccttgaaggagcgcattgagcggcgccggtcagagagagccgagcaacagcgcttcagaactgagaaggaacgcgaacgtcaggctaagctggcggaggagaagatgaggaaggaagaggaagaggccaagaagcgggcagaggatgatgccaagaaaaagaaggtgctgtccaacatgggggcccattttggcggctacctggtcaaggcagaacagaagcgtggtaagcggcagacggggcgggagatgaaggtgcgcatcctctccgagcgtaagaagcctctggacattgactacatgggggaggaacagctccgggcccggtctgcctggctgcctccatcacagccctcctgccctgccagggagaaagcccaggagctgtcggactggatccaccagctggagtctgagaagttcgacctgatggcgaagctgaaacagcagaaatatgagatcaacgtgctgtacaaccgcatcagccacgcccagaagttccgtaagggggcagggaagggccgcgttggaggccgctggaagtgaggatgccgccccggacagtggcacctgggaagcctgggagtgtttgtcccatcggtagcttgaaataaacgctcccctcagacacccgctgggttctctgatgttattatggttgagatgc

SEQ ID NO: 32907 - DNA, 966 bp, Homo sapiens
  source 1..966: mol_type = unassigned DNA
agctataaactccccggagcttcagtgccctcagcaaggctcagcctcaagattcacagcatctcagacacagcctaggccgcaccaggatgtcggacaccgaggagcaggaatatgaggaggagcagccggaagaggaggctgcggaggaggaggaggaagaagaggaacgccccaaaccaagccgccccgtggtgcctcctttgatcccgccaaagatcccagaaggggagcgcgttgacttcgatgacatccaccgcaagcgcatggagaaagacctgctggagctgcagacactcatcgatgtacatttcgagcagcggaagaaggaggaagaggagctggttgccttgaaggagcgcattgagcggcgccggtcagagagagccgagcaacagcgcttcagaactgagaaggaacgcgaacgtcaggctaagctggcggaggagaagatgaggaaggaagaggaagaggccaagaagcgggcagaggatgatgccaagaaaaagaaggtgctgtccaacatgggggcccattttggcggctacctggtcaaggcagaacagaagcgtggtaagcggcagacggggcgggagatgaaggtgcgcatcctctccgagcgtaagaagcctctggacattgactacatgggggaggaacagctccgggagaaagcccaggagctgtcggactggatccaccagctggagtctgagaagttcgacctgatggcgaagctgaaacagcagaaatatgagatcaacgtgctgtacaaccgcatcagccacgcccagaagttccgtaagggggcagggaagggccgcgttggaggccgctggaagtgaggatgccgccccggacagtggcacctgggaagcctgggagtgtttgtcccatcggtagcttgaaataaacgctcccctcagacacccgctgggttctctgatgttattatggttgagatgc

SEQ ID NO: 32908 - DNA, 551 bp, Homo sapiens
  source 1..551: mol_type = unassigned DNA
agctataaactccccggagcttcagtgccctcagcaaggctcagcctcaagattcacagcatctcagacacagcctaggccgcaccaggatgtcggacaccgaggagcaggaatatgaggaggagcagccggaagaggaggctgcggaggaggaggaggaaggtgaggtcccggactccgcagaagaggaacgccccaaaccaagccgccccgtggtgcctcctttgatcccgccaaagatcccagaaggggagcgcgttgacttcgatgacatccaccgcaagcgcatggagaaagacctgctggagctgcagacactcatcgatgtacatttcgagcagcggaagaaggaggaagaggagctggttgccttgaaggagcgcattgagcggcgccggtcagagagagccgagcaacagcgcttcagaactgagaaggaacgcgaacgtcaggctaagctggcggaggagaagatgaggaaggaagaggaagaggccaagaagcgggcagaggatgatgccaagaaaaagaagaaaaaaaaaaaaaaaaag

SEQ ID NO: 32909 - DNA, 966 bp, Homo sapiens
  source 1..966: mol_type = unassigned DNA
agctataaactccccggagcttcagtgccctcagcaaggctcagcctcaagattcacagcatctcagacacagcctaggccgcaccaggatgtcggacaccgaggagcaggaatatgaggaggagcagccggaagaggaggctgcggaggaggaggaggaagcccccgaagagccggagccggtccgccccgtggtgcctcctttgatcccgccaaagatcccagaaggggagcgcgttgacttcgatgacatccaccgcaagcgcatggagaaagacctgctggagctgcagacactcatcgatgtacatttcgagcagcggaagaaggaggaagaggagctggttgccttgaaggagcgcattgagcggcgccggtcagagagagccgagcaacagcgcttcagaactgagaaggaacgcgaacgtcaggctaagctggcggaggagaagatgaggaaggaagaggaagaggccaagaagcgggcagaggatgatgccaagaaaaagaaggtgctgtccaacatgggggcccattttggcggctacctggtcaaggcagaacagaagcgtggtaagcggcagacggggcgggagatgaaggtgcgcatcctctccgagcgtaagaagcctctggacattgactacatgggggaggaacagctccgggagaaagcccaggagctgtcggactggatccaccagctggagtctgagaagttcgacctgatggcgaagctgaaacagcagaaatatgagatcaacgtgctgtacaaccgcatcagccacgcccagaagttccgtaagggggcagggaagggccgcgttggaggccgctggaagtgaggatgccgccccggacagtggcacctgggaagcctgggagtgtttgtcccatcggtagcttgaaataaacgctcccctcagacacccgctgggttctctgatgttattatggttgagatgc

SEQ ID NO: 32910 - DNA, 901 bp, Homo sapiens
  source 1..901: mol_type = unassigned DNA
agcaaggctcagcctcaagattcacagcatctcagacacagcctaggccgcaccaggatgtcggacaccgaggagcaggaatatgaggagtgagtgctgcactgggagaggaggctgcggaggaggaggaggaagaagaggaacgccccaaaccaagccgccccgtggtgcctcctttgatcccgccaaagatcccagaaggggagcgcgttgacttcgatgacatccaccgcaagcgcatggagaaagacctgctggagctgcagacactcatcgatgtacatttcgagcagcggaagaaggaggaagaggagctggttgccttgaaggagcgcattgagcggcgccggtcagagagagccgagcaacagcgcttcagaactgagaaggaacgcgaacgtcaggctaagctggcggaggagaagatgaggaaggaagaggaagaggccaagaagcgggcagaggatgatgccaagaaaaagaaggtgctgtccaacatgggggcccattttggcggctacctggtcaaggcagaacagaagcgtggtaagcggcagacggggcgggagatgaaggtgcgcatcctctccgagcgtaagaagcctctggacattgactacatgggggaggaacagctccgggagaaagcccaggagctgtcggactggatccaccagctggagtctgagaagttcgacctgatggcgaagctgaaacagcagaaatatgagatcaacgtgctgtacaaccgcatcagccacgcccagaagttccgtaagggggcagggaagggccgcgttggaggccgctggaagtgaggatgccgccccggacagtggcacctgggaagcctgggagtgtttgtcccatcggtagcttgaaataaacgctcccctcagac

SEQ ID NO: 32911 - DNA, 1078 bp, Homo sapiens
  source 1..1078: mol_type = unassigned DNA
atgtctgacatagaagaggtggtggaagagtacgaggaggagcaccccgaggaagaggaggactggagagaggacgaagacgagcaggaggaggcagcggaagaggatgctgaagcagaggctgagaccgaggagaccagggcagaagaagatgaagaagaagaggaagcaaaggaggctgaagatggcccaatggaggagtccaaaccaaagcccaggtcgttcatgcccaacttggtgcctcccaagatccccgatggagagagagtggactttgatgacatccaccggaagcgcatggagaaggacctgaatgagttgcaggcgctgatcgaggctcactttgagaacaggaagaaagaggaggaggagctcgtttctctcaaagacaggatcgagagacgtcgggcagagcgggccgagcagcagcgcatccggaatgagcgggagaaggagcggcagaaccgcctggctgaagagagggctcgacgagaggaggaggagaacaggaggaaggctgaggatgaggcccggaagaagaaggctttgtccaacatgatgcattttgggggttacatccagaagcaggcccagacagagcggaaaagtgggaagaggcagactgagcgggaaaagaagaagaagattctggctgagaggaggaaggtgctggccattgaccacctgaatgaagatcagctgagggagaaggccaaggagctgtggcagagcatctataacttggaggcagagaagttcgacctgcaggagaagttcaagcagcagaaatatgagatcaatgttctccgaaacaggatcaacgataaccagaaagtctccaagacccgcgggaaggctaaagtcaccgggcgctggaaatagagcctggcctccttcaccaaagatctgctcctcgctcgcacctgcctccggcctgcactcccccagttcccgggccctcctgggcaccccaggcagctcctgtttggaaatggggagctggcctaggtgggagccaccactcctgcctgcccccacacccactccacaccagtaataaaaagccaccacacactga

SEQ ID NO: 32912 - DNA, 1052 bp, Homo sapiens
  source 1..1052: mol_type = unassigned DNA
atgtctgacatagaagaggtggtggaagagtacgaggaggaaatggcagccccccagcaccaggaggaggcagcggaagaggatgctgaagcagaggctgagaccgaggagaccagggcagaagatgaagaagaagaggaagcaaaggaggctgaagatggcccaatggaggagtccaaaccaaagcccaggtcgttcatgcccaacttggtgcctcccaagatccccgatggagagagagtggactttgatgacatccaccggaagcgcatggagaaggacctgaatgagttgcaggcgctgatcgaggctcactttgagaacaggaagaaagaggaggaggagctcgtttctctcaaagacaggatcgagagacgtcgggcagagcgggccgagcagcagcgcatccggaatgagcgggagaaggagcggcagaaccgcctggctgaagagagggctcgacgagaggaggaggagaacaggaggaaggctgaggatgaggcccggaagaagaaggctttgtccaacatgatgcattttgggggttacatccagaagcaccctccagacagagcggaaaagtgggaagaggcagactgagcgggaaaagaagaagaagattctggctgagaggaggaaggtgctggccattgaccacctgaatgaagatcagctgagggagaaggccaaggagctgtggcagagcatctataacttggaggcagagaagttcgacctgcaggagaagttcaagcagcagaaatatgagatcaatgttctccgaaacaggatcaacgataaccagaaagtctccaagacccgcgggaaggctaaagtcaccgggcgctggaaatagagcctggcctccttcaccaaagatctgctcctcgctcgcacctgcctccggcctgcactcccccagttcccgggccctcctgggcaccccaggcagctcctgtttggaaatggggagctggcctaggtgggagccaccactcctgcctgcccccacacccactccacaccagtaataaaaagccaccacacactga

SEQ ID NO: 32913 - DNA, 1048 bp, Homo sapiens
  source 1..1048: mol_type = unassigned DNA
atgtctgacatagaagaggtggtggaagagtacgaggaggaggctaagctggagcaggaggaggcagcggaagaggatgctgaagcagaggctgagaccgaggagaccagggcagaagaagatgaagaagaagaggaagcaaaggaggctgaagatggcccaatggaggagtccaaaccaaagcccaggtcgttcatgcccaacttggtgcctcccaagatccccgatggagagagagtggactttgatgacatccaccggaagcgcatggagaaggacctgaatgagttgcaggcgctgatcgaggctcactttgagaacaggaagaaagaggaggaggagctcgtttctctcaaagacaggatcgagagacgtcgggcagagcgggccgagcagcagcgcatccggaatgagcgggagaaggagcggcagaaccgcctggctgaagagagggctcgacgagaggaggaggagaacaggaggaaggctgaggatgaggcccggaagaagaaggctttgtccaacatgatgcattttgggggttacatccagaagcaggcccagacagagcggaaaagtgggaagaggcagactgagcgggaaaagaagaagaagattctggctgagaggaggaaggtgctggccattgaccacctgaatgaagatcagctgagggagaaggccaaggagctgtggcagagcatctataacttggaggcagagaagttcgacctgcaggagaagttcaagcagcagaaatatgagatcaatgttctccgaaacaggatcaacgataaccagaaagtctccaagacccgcgggaaggctaaagtcaccgggcgctggaaatagagcctggcctccttcaccaaagatctgctcctcgctcgcacctgcctccggcctgcactcccccagttcccgggccctcctgggcaccccaggcagctcctgtttggaaatggggagctggcctaggtgggagccaccactcctgcctgcccccacacccactccacaccagtaataaaaagccaccacacactga

SEQ ID NO: 32914 - DNA, 1054 bp, Homo sapiens
  source 1..1054: mol_type = unassigned DNA
atgtctgacatagaagaggtggtggaagagtacgaggaggaggagcaggaagaagcagctgttgaagagcaggaggaggcagcggaagaggatgctgaagcagaggctgagaccgaggagaccagggcagaagaagatgaagaagaagaggaagcaaaggaggctgaagatggcccaatggaggagtccaaaccaaagcccaggtcgttcatgcccaacttggtgcctcccaagatccccgatggagagagagtggactttgatgacatccaccggaagcgcatggagaaggacctgaatgagttgcaggcgctgatcgaggctcactttgagaacaggaagaaagaggaggaggagctcgtttctctcaaagacaggatcgagagacgtcgggcagagcgggccgagcagcagcgcatccggaatgagcgggagaaggagcggcagaaccgcctggctgaagagagggctcgacgagaggaggaggagaacaggaggaaggctgaggatgaggcccggaagaagaaggctttgtccaacatgatgcattttgggggttacatccagaagacagagcggaaaagtgggaagaggcagactgagcgggaaaagaagaagaagattctggctgagaggaggaaggtgctggccattgaccacctgaatgaagatcagctgagggagaaggccaaggagctgtggcagagcatctataacttggaggcagagaagttcgacctgcaggagaagttcaagcagcagaaatatgagatcaatgttctccgaaacaggatcaacgataaccagaaagtctccaagacccgcgggaaggctaaagtcaccgggcgctggaaatagagcctggcctccttcaccaaagatctgctcctcgctcgcacctgcctccggcctgcactcccccagttcccgggccctcctgggcaccccaggcagctcctgtttggaaatggggagctggcctaggtgggagccaccactcctgcctgcccccacacccactccacaccagtaataaaaagccaccacacactga

SEQ ID NO: 32915 - DNA, 1063 bp, Homo sapiens
  source 1..1063: mol_type = unassigned DNA
atgtctgacatagaagaggtggtggaagagtacgaggaggaggagcaggaagaagcagctgttgaagagcaggaggaggcagcggaagaggatgctgaagcagaggctgagaccgaggagaccagggcagaagaagatgaagaagaagaggaagcaaaggaggctgaagatggcccaatggaggagtccaaaccaaagcccaggtcgttcatgcccaacttggtgcctcccaagatccccgatggagagagagtggactttgatgacatccaccggaagcgcatggagaaggacctgaatgagttgcaggcgctgatcgaggctcactttgagaacaggaagaaagaggaggaggagctcgtttctctcaaagacaggatcgagagacgtcgggcagagcgggccgagcagcagcgcatccggaatgagcgggagaaggagcggcagaaccgcctggctgaagagagggctcgacgagaggaggaggagaacaggaggaaggctgaggatgaggcccggaagaagaaggctttgtccaacatgatgcattttgggggttacatccagaagcaggcccagacagagcggaaaagtgggaagaggcagactgagcgggaaaagaagaagaagattctggctgagaggaggaaggtgctggccattgaccacctgaatgaagatcagctgagggagaaggccaaggagctgtggcagagcatctataacttggaggcagagaagttcgacctgcaggagaagttcaagcagcagaaatatgagatcaatgttctccgaaacaggatcaacgataaccagaaagtctccaagacccgcgggaaggctaaagtcaccgggcgctggaaatagagcctggcctccttcaccaaagatctgctcctcgctcgcacctgcctccggcctgcactcccccagttcccgggccctcctgggcaccccaggcagctcctgtttggaaatggggagctggcctaggtgggagccaccactcctgcctgcccccacacccactccacaccagtaataaaaagccaccacacactga

SEQ ID NO: 32916 - DNA, 1122 bp, Homo sapiens
  source 1..1122: mol_type = unassigned DNA
cagacgcctccaggatctgtcggcagctgctgttctgagggagagcagagaccatgtctgacatagaagaggtggtggaagagtacgaggaggaggagcaggaagaagcagctgttgaagagcaggaggaggcagcggaagaggatgctgaagcagaggctgagaccgaggagaccagggcagaagaagatgaagaagaagaggaagcaaaggaggctgaagatggcccaatggaggagtccaaaccaaagcccaggtcgttcatgcccaacttggtgcctcccaagatccccgatggagagagagtggactttgatgacatccaccggaagcgcatggagaaggacctgaatgagttgcaggcgctgatcgaggctcactttgagaacaggaagaaagaggaggaggagctcgtttctctcaaagacaggatcgagagacgtcgggcagagcgggccgagcagcagcgcatccggaatgagcgggagaaggagcggcagaaccgcctggctgaagagagggctcgacgagaggaggaggagaacaggaggaaggctgaggatgaggcccggaagaagaaggctttgtccaacatgatgcattttgggggttacatccagaagcaggcccagacagagcggaaaagtgggaagaggcagactgagcgggaaaagaagaagaagattctggctgagaggaggaaggtgctggccattgaccacctgaatgaagatcagctgagggagaaggccaaggagctgtggcagagcatctataacttggaggcagagaagttcgacctgcaggagaagttcaagcagcagaaatatgagatcaatgttctccgaaacaggatcaacgataaccagaaagtctccaagacccgcgggaaggctaaagtcaccgggcgctggaaatagagcctggcctccttcaccaaagatctgctcctcgctcgcacctgcctccggcctgcactcccccagttcccgggccctcctgggcaccccaggcagctcctgtttggaaatggggagctggcctaggtgggagccaccactcctgcctgcccccacacccactccacaccagtaataaaaagccaccacacactgactggca

SEQ ID NO: 32917 - DNA, 1084 bp, Homo sapiens
  source 1..1084: mol_type = unassigned DNA
gagcagacgcctccaggatctgtcggcagctgctgttctgagggagagcagagaccatgtctgacatagaagaggtggtggaagagtacgaggaggagtgagagcaggaggaggcagcggaagaggatgctgaagcagaggctgagaccgaggagaccagggcagaagaagatgaagaagaagaggaagcaaaggaggctgaagatggcccaatggaggagtccaaaccaaagcccaggtcgttcatgcccaacttggtgcctcccaagatccccgatggagagagagtggactttgatgacatccaccggaagcgcatggagaaggacctgaatgagttgcaggcgctgatcgaggctcactttgagaacaggaagaaagaggaggaggagctcgtttctctcaaagacaggatcgagagacgtcgggcagagcgggccgagcagcagcgcatccggaatgagcgggagaaggagcggcagaaccgcctggctgaagagagggctcgacgagaggaggaggagaacaggaggaaggctgaggatgaggcccggaagaagaaggctttgtccaacatgatgcattttgggggttacatccagaagacagagcggaaaagtgggaagaggcagactgagcgggaaaagaagaagaagattctggctgagaggaggaaggtgctggccattgaccacctgaatgaagatcagctgagggagaaggccaaggagctgtggcagagcatctataacttggaggcagagaagttcgacctgcaggagaagttcaagcagcagaaatatgagatcaatgttctccgaaacaggatcaacgataaccagaaagtctccaagacccgcgggaaggctaaagtcaccgggcgctggaaatagagcctggcctccttcaccaaagatctgctcctcgctcgcacctgcctccggcctgcactcccccagttcccgggccctcctgggcaccccaggcagctcctgtttggaaatggggagctggcctaggtgggagccaccactcctgcctgcccccacacccactccacaccagtaataaaaagccaccacac

SEQ ID NO: 32918 - DNA, 1132 bp, Homo sapiens
  source 1..1132: mol_type = unassigned DNA
agtccccgctgagactgagcagacgcctccaggatctgtcggcagctgctgttctgagggagagcagagaccatgtctgacatagaagaggtggtggaagagtacgaggaggaggagcaggaagaagcagctgttgaagagcaggaggaggcagcggaagaggatgctgaagcagaggctgagaccgaggagaccagggcagaagaagatgaagaagaagaggaagcaaaggaggctgaagatggcccaatggaggagtccaaaccaaagcccaggtcgttcatgcccaacttggtgcctcccaagatccccgatggagagagagtggactttgatgacatccaccggaagcgcatggagaaggacctgaatgagttgcaggcgctgatcgaggctcactttgagaacaggaagaaagaggaggaggagctcgtttctctcaaagacaggatcgagagacgtcgggcagagcgggccgagcagcagcgcatccggaatgagcgggagaaggagcggcagaaccgcctggctgaagagagggctcgacgagaggaggaggagaacaggaggaaggctgaggatgaggcccggaagaagaaggctttgtccaacatgatgcattttgggggttacatccagaagacagagcggaaaagtgggaagaggcagactgagcgggaaaagaagaagaagattctggctgagaggaggaaggtgctggccattgaccacctgaatgaagatcagctgagggagaaggccaaggagctgtggcagagcatctataacttggaggcagagaagttcgacctgcaggagaagttcaagcagcagaaatatgagatcaatgttctccgaaacaggatcaacgataaccagaaagtctccaagacccgcgggaaggctaaagtcaccgggcgctggaaatagagcctggcctccttcaccaaagatctgctcctcgctcgcacctgcctccggcctgcactcccccagttcccgggccctcctgggcaccccaggcagctcctgtttggaaatggggagctggcctaggtgggagccaccactcctgcctgcccccacacccactccacaccagtaataaaaagccaccacacactgactggca

SEQ ID NO: 32919 - DNA, 1141 bp, Homo sapiens
  source 1..1141: mol_type = unassigned DNA
ccccgctgagactgagcagacgcctccaggatctgtcggcagctgctgttctgagggagagcagagaccatgtctgacatagaagaggtggtggaagagtacgaggaggagtatctggagcatgcagaagcagctgttgaagagcaggaggaggcagcggaagaggatgctgaagcagaggctgagaccgaggagaccagggcagaagaagatgaagaagaagaggaagcaaaggaggctgaagatggcccaatggaggagtccaaaccaaagcccaggtcgttcatgcccaacttggtgcctcccaagatccccgatggagagagagtggactttgatgacatccaccggaagcgcatggagaaggacctgaatgagttgcaggcgctgatcgaggctcactttgagaacaggaagaaagaggaggaggagctcgtttctctcaaagacaggatcgagagacgtcgggcagagcgggccgagcagcagcgcatccggaatgagcgggagaaggagcggcagaaccgcctggctgaagagagggctcgacgagaggaggaggagaacaggaggaaggctgaggatgaggcccggaagaagaaggctttgtccaacatgatgcattttgggggttacatccagaagcacaccctccagacagagcggaaaagtgggaagaggcagactgagcgggaaaagaagaagaagattctggctgagaggaggaaggtgctggccattgaccacctgaatgaagatcagctgagggagaaggccaaggagctgtggcagagcatctataacttggaggcagagaagttcgacctgcaggagaagttcaagcagcagaaatatgagatcaatgttctccgaaacaggatcaacgataaccagaaagtctccaagacccgcgggaaggctaaagtcaccgggcgctggaaatagagcctggcctccttcaccaaagatctgctcctcgctcgcacctgcctccggcctgcactcccccagttcccgggccctcctgggcaccccaggcagctcctgtttggaaatggggagctggcctaggtgggagccaccactcctgcctgcccccacacccactccacaccagtaataaaaagccaccacacactga

SEQ ID NO: 32920 - DNA, 1159 bp, Homo sapiens
  source 1..1159: mol_type = unassigned DNA
ccccgctgagactgagcagacgcctccaggatctgtcggcagctgctgttctgagggagagcagagaccatgtctgacatagaagaggtggtggaagagtacgaggaggagtatctggagcatgcagaagcagctgttgaagaagaggaggactggagagaggacgaagacgagcaggaggaggcagcggaagaggatgctgaagcagaggctgagaccgaggagaccagggcagaagaagatgaagaagaagaggaagcaaaggaggctgaagatggcccaatggaggagtccaaaccaaagcccaggtcgttcatgcccaacttggtgcctcccaagatccccgatggagagagagtggactttgatgacatccaccggaagcgcatggagaaggacctgaatgagttgcaggcgctgatcgaggctcactttgagaacaggaagaaagaggaggaggagctcgtttctctcaaagacaggatcgagagacgtcgggcagagcgggccgagcagcagcgcatccggaatgagcgggagaaggagcggcagaaccgcctggctgaagagagggctcgacgagaggaggaggagaacaggaggaaggctgaggatgaggcccggaagaagaaggctttgtccaacatgatgcattttgggggttacatccagaagacagagcggaaaagtgggaagaggcagactgagcgggaaaagaagaagaagattctggctgagaggaggaaggtgctggccattgaccacctgaatgaagatcagctgagggagaaggccaaggagctgtggcagagcatctataacttggaggcagagaagttcgacctgcaggagaagttcaagcagcagaaatatgagatcaatgttctccgaaacaggatcaacgataaccagaaagtctccaagacccgcgggaaggctaaagtcaccgggcgctggaaatagagcctggcctccttcaccaaagatctgctcctcgctcgcacctgcctccggcctgcactcccccagttcccgggccctcctgggcaccccaggcagctcctgtttggaaatggggagctggcctaggtgggagccaccactcctgcctgcccccacacccactccacaccagtaataaaaagccaccacacactga

SEQ ID NO: 32921 - DNA, 1330 bp, Homo sapiens
  source 1..1330: mol_type = unassigned DNA
acattcctccctccgcagggctggctcaccaggccccagcccacatgcctgcttaaagccctctccatcctctgcctcacccagtccccgctgagactgagcagacgcctccaggatctgtcggcagctgctgttctgaggtcacacagctcatgaggggtggaactagattcaccctaggcctcgctgatctctgtacaacgggggccagagctcttctgaggaaggcaggcttccctttgtacctgcactgacttttttctccttttggagggagagcagagaccatgtctgacatagaagaggtggtggaagagtacgaggaggaggagcaggaagaagcagctgttgaagagcaggaggaggcagcggaagaggatgctgaagcagaggctgagaccgaggagaccagggcagaagaagatgaagaagaagaggaagcaaaggaggctgaagatggcccaatggaggagtccaaaccaaagcccaggtcgttcatgcccaacttggtgcctcccaagatccccgatggagagagagtggactttgatgacatccaccggaagcgcatggagaaggacctgaatgagttgcaggcgctgatcgaggctcactttgagaacaggaagaaagaggaggaggagctcgtttctctcaaagacaggatcgagagacgtcgggcagagcgggccgagcagcagcgcatccggaatgagcgggagaaggagcggcagaaccgcctggctgaagagagggctcgacgagaggaggaggagaacaggaggaaggctgaggatgaggcccggaagaagaaggctttgtccaacatgatgcattttgggggttacatccagaagcaggcccagacagagcggaaaagtgggaagaggcagactgagcgggaaaagaagaagaagattctggctgagaggaggaaggtgctggccattgaccacctgaatgaagatcagctgagggagaaggccaaggagctgtggcagagcatctataacttggaggcagagaagttcgacctgcaggagaagttcaagcagcagaaatatgagatcaatgttctccgaaacaggatcaacgataaccagaaagtctccaagacccgcgggaaggctaaagtcaccgggcgctggaaatagagcctggcctccttcaccaaagatctgctcctcgctcgcacctgcctccggcctgcactcccccagttcccgggccctcctgggcaccccaggcagctcctgtttggaaatggggagctggcctaggtgggagccaccactcctgcctgcccccacacccactccacaccagtaat

SEQ ID NO: 32922 - DNA, 1060 bp, Homo sapiens
  source 1..1060: mol_type = unassigned DNA
gcctgcagccggtgctgtccacagggagctccagcccttctcacactcgacccgcagaaaccacccaccttcaccatgtctgacgaggaagttgaacaggtggaggagcagtacgaagaagaagaggaagcccaggaggaagctgcagaagtccatgaggaagttcatgaaccagaggagaaaccgagacccaaactcactgctcctaagatcccagaaggggagaaagtggacttcgatgacatccagaagaagcgtcagaacaaagacctaatggagctccaggccctcatcgacagccactttgaagcccggaagaaggaggaggaggagctggtcgctctcaaagagagaatcgagaagcgccgtgcagagagagcggagcagcagaggattcgtgcagagaaggagagggagcgccagaacagactggcggaggaaaaggccagaagggaggaggaggatgccaagaggagggcagaggacgacctgaagaagaagaaagctctgtcttccatgggagccaactacagcagctacctggccaaggctgaccagaagagaggcaagaagcagacagcccgggaaatgaagaagaagattctggctgagagacgcaagccgctcaacatcgatcaccttggtgaagacaaactgagggacaaggccaaggagctctgggagaccctgcaccagctggagattgacaagttcgagtttggggagaagctgaaacgccagaaatatgacatcaccacgctcaggagccgcattgaccaggcccagaagcacagcaagaaggctgggaccccagccaagggcaaagtcggcgggcgctggaagtagagaggccagaaaggcccctcgaggcagagaccctccgccctcttgcacaccagggccgctcgtgggactccacatcctccagcccccacaatcctgtcaggggctccctgacagtcctgggggtggagaggccatcccggggcgtcccccgcgtctgtgtccttgctgccttcatcccctggggcctgtgaataaagctgcagaacccccttca

SEQ ID NO: 32923 - DNA, 1210 bp, Homo sapiens
  source 1..1210: mol_type = unassigned DNA
ttcctatacttggtaaggggcctgcacgggcatagccccccccagcaagactccgcacacaccccggccacccagtcactggccaatgggctcctaggaagatcaaatgtcactataacacgagggtgtgagccgggcgccagtgcctgcagccggtgctgtccacagggagctccagcccttctcacactcgacccgcagaaaccacccaccttcaccatgtctgacgaggaagttgaacaggtggaggagcagtacgaagaagaagaggaagcccaggaggaagaggaagttcaagaagacaccgcagaggaggacgcggaagaggagaaaccgagacccaaactcactgctcctaagatcccagaaggggagaaagtggacttcgatgacatccagaagaagcgtcagaacaaagacctaatggagctccaggccctcatcgacagccactttgaagcccggaagaaggaggaggaggagctggtcgctctcaaagagagaatcgagaagcgccgtgcagagagagcggagcagcagaggattcgtgcagagaaggagagggagcgccagaacagactggcggaggaaaaggccagaagggaggaggaggatgccaagaggagggcagaggacgacctgaagaagaagaaagctctgtcttccatgggagccaactacagcagctacctggccaaggctgaccagaagagaggcaagaagcagacagcccgggaaatgaagaagaagattctggctgagagacgcaagccgctcaacatcgatcaccttggtgaagacaaactgagggacaaggccaaggagctctgggagaccctgcaccagctggagattgacaagttcgagtttggggagaagctgaaacgccagaaatatgacatcaccacgctcaggagccgcattgaccaggcccagaagcacagcaagaaggctgggaccccagccaagggcaaagtcggcgggcgctggaagtagagaggccagaaaggcccctcgaggcagagaccctccgccctcttgcacaccagggccgctcgtgggactccacatcctccagcccccacaatcctgtcaggggctccctgacagtcctgggggtggagaggccatcccggggcgtcccccgcgtctgtgtccttgctgccttcatcccctggggcctgtgaataaagctgcagaacccccttca

SEQ ID NO: 32924 - DNA, 794 bp, Homo sapiens
  source 1..794: mol_type = unassigned DNA
cacagggagctccagcccttctcacactcgacccgcagaaaccacccaccttcaccatgtctgacgaggaagttgaacaggtggaggagcagtacgaagaagaagaggaagcccaggaggaagaggagaaaccgagacccaaactcactgctcctaagatcccagaaggggagaaagtggacttcgatgacatccagaagaagcgtcagaacaaagacctaatggagctccaggccctcatcgacagccactttgaagcccggaagaaggaggaggaggagctggtcgctctcaaagagagaatcgagaagcgccgtgcagagagagcggagcagcagaggattcgtgcagagaaggagagggagcgccagaacagactggcggaggaaaaggccagaagggaggaggaggatgccaagaggagggcagaggacgacctgaagaagaagaaagctctgtcttccatgggagccaactacagcagctacctggccaaggctgaccagaagagaggcaagaagcagacagcccgggaaatgaagaagaagattctggctgagagacgcaagccgctcaacatcgatcaccttggtgaagacaaactgagggacaaggccaaggagctctgggagaccctgcaccagctggagattgacaagttcgagtttggggagaagctgaaacgccagaaatatgacatcaccacgctcaggagccgcattgaccaggcccagaagcacagcaagaaggctgggaccccagccaagggcaaagtcggcgggcgctggaagtag

SEQ ID NO: 32925 - DNA, 1184 bp, Homo sapiens
  source 1..1184: mol_type = unassigned DNA
acttggtaaggggcctgcacgggcatagccccccccagcaagactccgcacacaccccggccacccagtcactggccaatgggctcctaggaagatcaaatgtcactataacacgagggtgtgagccgggcgccagtgcctgcagccggtgctgtccacagggagctccagcccttctcacactcgacccgcagaaaccacccaccttcaccatgtctgacgaggaagttgaacaggtggaggagcagtacgaagaagaagaggaagcccaggaggaagctgcagaagtccatgaggaagaggagaaaccgagacccaaactcactgctcctaagatcccagaaggggagaaagtggacttcgatgacatccagaagaagcgtcagaacaaagacctaatggagctccaggccctcatcgacagccactttgaagcccggaagaaggaggaggaggagctggtcgctctcaaagagagaatcgagaagcgccgtgcagagagagcggagcagcagaggattcgtgcagagaaggagagggagcgccagaacagactggcggaggaaaaggccagaagggaggaggaggatgccaagaggagggcagaggacgacctgaagaagaagaaagctctgtcttccatgggagccaactacagcagctacctggccaaggctgaccagaagagaggcaagaagcagacagcccgggaaatgaagaagaagattctggctgagagacgcaagccgctcaacatcgatcaccttggtgaagacaaactgagggacaaggccaaggagctctgggagaccctgcaccagctggagattgacaagttcgagtttggggagaagctgaaacgccagaaatatgacatcatgaatgtccgggccagagtgcagatgctggccaagttcagcaagaaggctgggaccccagccaagggcaaagtcggcgggcgctggaagtagagaggccagaaaggcccctcgaggcagagaccctccgccctcttgcacaccagggccgctcgtgggactccacatcctccagcccccacaatcctgtcaggggctccctgacagtcctgggggtggagaggccatcccggggcgtcccccgcgtctgtgtccttgctgccttcatcccctggggcctgtgaataaagctgcagaacccccttc

SEQ ID NO: 32926 - DNA, 1208 bp, Homo sapiens
  source 1..1208: mol_type = unassigned DNA
acttggtaaggggcctgcacgggcatagccccccccagcaagactccgcacacaccccggccacccagtcactggccaatgggctcctaggaagatcaaatgtcactataacacgagggtgtgagccgggcgccagtgcctgcagccggtgctgtccacagggagctccagcccttctcacactcgacccgcagaaaccacccaccttcaccatgtctgacgaggaagttgaacaggtggaggagcagtacgaagaagaagaggaagcccaggaggaagctgcagaagtccatgaggaagacaccgcagaggaggacgcggaagaggagaaaccgagacccaaactcactgctcctaagatcccagaaggggagaaagtggacttcgatgacatccagaagaagcgtcagaacaaagacctaatggagctccaggccctcatcgacagccactttgaagcccggaagaaggaggaggaggagctggtcgctctcaaagagagaatcgagaagcgccgtgcagagagagcggagcagcagaggattcgtgcagagaaggagagggagcgccagaacagactggcggaggaaaaggccagaagggaggaggaggatgccaagaggagggcagaggacgacctgaagaagaagaaagctctgtcttccatgggagccaactacagcagctacctggccaaggctgaccagaagagaggcaagaagcagacagcccgggaaatgaagaagaagattctggctgagagacgcaagccgctcaacatcgatcaccttggtgaagacaaactgagggacaaggccaaggagctctgggagaccctgcaccagctggagattgacaagttcgagtttggggagaagctgaaacgccagaaatatgacatcaccacgctcaggagccgcattgaccaggcccagaagcacagcaagaaggctgggaccccagccaagggcaaagtcggcgggcgctggaagtagagaggccagaaaggcccctcgaggcagagaccctccgccctcttgcacaccagggccgctcgtgggactccacatcctccagcccccacaatcctgtcaggggctccctgacagtcctgggggtggagaggccatcccggggcgtcccccgcgtctgtgtccttgctgccttcatcccctggggcctgtgaataaagctgcagaacccccttc

SEQ ID NO: 32927 - DNA, 1178 bp, Homo sapiens
  source 1..1178: mol_type = unassigned DNA
acttggtaaggggcctgcacgggcatagccccccccagcaagactccgcacacaccccggccacccagtcactggccaatgggctcctaggaagatcaaatgtcactataacacgagggtgtgagccgggcgccagtgcctgcagccggtgctgtccacagggagctccagcccttctcacactcgacccgcagaaaccacccaccttcaccatgtctgacgaggaagttgaacaggtggaggagcagtacgaagaagaagaggaagcccaggaggaagaggaagttcaagaagaggagaaaccgagacccaaactcactgctcctaagatcccagaaggggagaaagtggacttcgatgacatccagaagaagcgtcagaacaaagacctaatggagctccaggccctcatcgacagccactttgaagcccggaagaaggaggaggaggagctggtcgctctcaaagagagaatcgagaagcgccgtgcagagagagcggagcagcagaggattcgtgcagagaaggagagggagcgccagaacagactggcggaggaaaaggccagaagggaggaggaggatgccaagaggagggcagaggacgacctgaagaagaagaaagctctgtcttccatgggagccaactacagcagctacctggccaaggctgaccagaagagaggcaagaagcagacagcccgggaaatgaagaagaagattctggctgagagacgcaagccgctcaacatcgatcaccttggtgaagacaaactgagggacaaggccaaggagctctgggagaccctgcaccagctggagattgacaagttcgagtttggggagaagctgaaacgccagaaatatgacatcaccacgctcaggagccgcattgaccaggcccagaagcacagcaagaaggctgggaccccagccaagggcaaagtcggcgggcgctggaagtagagaggccagaaaggcccctcgaggcagagaccctccgccctcttgcacaccagggccgctcgtgggactccacatcctccagcccccacaatcctgtcaggggctccctgacagtcctgggggtggagaggccatcccggggcgtcccccgcgtctgtgtccttgctgccttcatcccctggggcctgtgaataaagctgcagaacccccttc

SEQ ID NO: 32928 - DNA, 1211 bp, Homo sapiens
  source 1..1211: mol_type = unassigned DNA
acttggtaaggggcctgcacgggcatagccccccccagcaagactccgcacacaccccggccacccagtcactggccaatgggctcctaggaagatcaaatgtcactataacacgagggtgtgagccgggcgccagtgcctgcagccggtgctgtccacagggagctccagcccttctcacactcgacccgcagaaaccacccaccttcaccatgtctgacgaggaagttgaacaggtggaggagcagtacgaagaagaagaggaagcccaggaggaagctgcagaagtccatgaggaaggtatgaggacacaggacttcttccacgaggagaaaccgagacccaaactcactgctcctaagatcccagaaggggagaaagtggacttcgatgacatccagaagaagcgtcagaacaaagacctaatggagctccaggccctcatcgacagccactttgaagcccggaagaaggaggaggaggagctggtcgctctcaaagagagaatcgagaagcgccgtgcagagagagcggagcagcagaggattcgtgcagagaaggagagggagcgccagaacagactggcggaggaaaaggccagaagggaggaggaggatgccaagaggagggcagaggacgacctgaagaagaagaaagctctgtcttccatgggagccaactacagcagctacctggccaaggctgaccagaagagaggcaagaagcagacagcccgggaaatgaagaagaagattctggctgagagacgcaagccgctcaacatcgatcaccttggtgaagacaaactgagggacaaggccaaggagctctgggagaccctgcaccagctggagattgacaagttcgagtttggggagaagctgaaacgccagaaatatgacatcaccacgctcaggagccgcattgaccaggcccagaagcacagcaagaaggctgggaccccagccaagggcaaagtcggcgggcgctggaagtagagaggccagaaaggcccctcgaggcagagaccctccgccctcttgcacaccagggccgctcgtgggactccacatcctccagcccccacaatcctgtcaggggctccctgacagtcctgggggtggagaggccatcccggggcgtcccccgcgtctgtgtccttgctgccttcatcccctggggcctgtgaataaagctgcagaacccccttc

SEQ ID NO: 32929 - DNA, 844 bp, Homo sapiens
  source 1..844: mol_type = unassigned DNA
tccacagggagctccagcccttctcacactcgacccgcagaaaccacccaccttcaccatgtctgacgaggaagttgaacaggtggaggagcagtacgaagaagaagaggaagcccaggaggaagctgcagaagtccatgaggaagttcatgaaccagaggaagttcaagaagaggagaaaccgagacccaaactcactgctcctaagatcccagaaggggagaaagtggacttcgatgacatccagaagaagcgtcagaacaaagacctaatggagctccaggccctcatcgacagccactttgaagcccggaagaaggaggaggaggagctggtcgctctcaaagagagaatcgagaagcgccgtgcagagagagcggagcagcagaggattcgtgcagagaaggagagggagcgccagaacagactggcggaggaaaaggccagaagggaggaggaggatgccaagaggagggcagaggacgacctgaagaagaagaaagctctgtcttccatgggagccaactacagcagctacctggccaaggctgaccagaagagaggcaagaagcagacagcccgggaaatgaagaagaagattctggctgagagacgcaagccgctcaacatcgatcaccttggtgaagacaaactgagggacaaggccaaggagctctgggagaccctgcaccagctggagattgacaagttcgagtttggggagaagctgaaacgccagaaatatgacatcaccacgctcaggagccgcattgaccaggcccagaagcacagcaagaaggctgggaccccagccaagggcaaagtcggcgggcgctggaagtag

SEQ ID NO: 32930 - DNA, 1042 bp, Homo sapiens
  source 1..1042: mol_type = unassigned DNA
gcctgcagccggtgctgtccacagggagctccagcccttctcacactcgacccgcagaaaccacccaccttcaccatgtctgacgaggaagttgaacaggtggaggagcagtacgaagaagaagaggaagcccaggaggaagaggaagttcaagaagaggagaaaccgagacccaaactcactgctcctaagatcccagaaggggagaaagtggacttcgatgacatccagaagaagcgtcagaacaaagacctaatggagctccaggccctcatcgacagccactttgaagcccggaagaaggaggaggaggagctggtcgctctcaaagagagaatcgagaagcgccgtgcagagagagcggagcagcagaggattcgtgcagagaaggagagggagcgccagaacagactggcggaggaaaaggccagaagggaggaggaggatgccaagaggagggcagaggacgacctgaagaagaagaaagctctgtcttccatgggagccaactacagcagctacctggccaaggctgaccagaagagaggcaagaagcagacagcccgggaaatgaagaagaagattctggctgagagacgcaagccgctcaacatcgatcaccttggtgaagacaaactgagggacaaggccaaggagctctgggagaccctgcaccagctggagattgacaagttcgagtttggggagaagctgaaacgccagaaatatgacatcatgaatgtccgggccagagtgcagatgctggccaagttcagcaagaaggctgggaccccagccaagggcaaagtcggcgggcgctggaagtagagaggccagaaaggcccctcgaggcagagaccctccgccctcttgcacaccagggccgctcgtgggactccacatcctccagcccccacaatcctgtcaggggctccctgacagtcctgggggtggagaggccatcccggggcgtcccccgcgtctgtgtccttgctgccttcatcccctggggcctgtgaataaagctgcagaacccccttca

SEQ ID NO: 32931 - DNA, 818 bp, Homo sapiens
  source 1..818: mol_type = unassigned DNA
ccttcaccatgtctgacgaggaagttgaacaggtggaggagcagtacgaagaagaagaggaagcccaggaggaagctgcagaagtccatgaggaagttcatgaaccagaggaagttcaagaagacaccgcagaggaggacgcggaagaggagaaaccgagacccaaactcactgctcctaagatcccagaaggggagaaagtggacttcgatgacatccagaagaagcgtcagaacaaagacctaatggagctccaggccctcatcgacagccactttgaagcccggaagaaggaggaggaggagctggtcgctctcaaagagagaatcgagaagcgccgtgcagagagagcggagcagcagaggattcgtgcagagaaggagagggagcgccagaacagactggcggaggaaaaggccagaagggaggaggaggatgccaagaggagggcagaggacgacctgaagaagaagaaagctctgtcttccatgggagccaactacagcagctacctggccaaggctgaccagaagagaggcaagaagcagacagcccgggaaatgaagaagaagattctggctgagagacgcaagccgctcaacatcgatcaccttggtgaagacaaactgagggacaaggccaaggagctctgggagaccctgcaccagctggagattgacaagttcgagtttggggagaagctgaaacgccagaaatatgacatcaccacgctcaggagccgcattgaccaggcccagaagcacagcaagaaggctgggaccccagccaagggcaaagtcggcgggcgctggaagtag

SEQ ID NO: 32932 - DNA, 1238 bp, Homo sapiens
  source 1..1238: mol_type = unassigned DNA
acttggtaaggggcctgcacgggcatagccccccccagcaagactccgcacacaccccggccacccagtcactggccaatgggctcctaggaagatcaaatgtcactataacacgagggtgtgagccgggcgccagtgcctgcagccggtgctgtccacagggagctccagcccttctcacactcgacccgcagaaaccacccaccttcaccatgtctgacgaggaagttgaacaggtggaggagcagtacgaagaagaagaggaagcccaggaggaagctgcagaagtccatgaggaagcacaccctggagaagagagtgtccgagaagacaccgcagaggaggacgcggaagaggagaaaccgagacccaaactcactgctcctaagatcccagaaggggagaaagtggacttcgatgacatccagaagaagcgtcagaacaaagacctaatggagctccaggccctcatcgacagccactttgaagcccggaagaaggaggaggaggagctggtcgctctcaaagagagaatcgagaagcgccgtgcagagagagcggagcagcagaggattcgtgcagagaaggagagggagcgccagaacagactggcggaggaaaaggccagaagggaggaggaggatgccaagaggagggcagaggacgacctgaagaagaagaaagctctgtcttccatgggagccaactacagcagctacctggccaaggctgaccagaagagaggcaagaagcagacagcccgggaaatgaagaagaagattctggctgagagacgcaagccgctcaacatcgatcaccttggtgaagacaaactgagggacaaggccaaggagctctgggagaccctgcaccagctggagattgacaagttcgagtttggggagaagctgaaacgccagaaatatgacatcaccacgctcaggagccgcattgaccaggcccagaagcacagcaagaaggctgggaccccagccaagggcaaagtcggcgggcgctggaagtagagaggccagaaaggcccctcgaggcagagaccctccgccctcttgcacaccagggccgctcgtgggactccacatcctccagcccccacaatcctgtcaggggctccctgacagtcctgggggtggagaggccatcccggggcgtcccccgcgtctgtgtccttgctgccttcatcccctggggcctgtgaataaagctgcagaacccccttc

SEQ ID NO: 32933 - DNA, 644 bp, Homo sapiens
  source 1..644: mol_type = unassigned DNA
acttggtaaggggcctgcacgggcatagccccccccagcaagactccgcacacaccccggccacccagtcactggccaatgggctcctaggaagatcaaatgtcactataacacgagggtgtgagccgggcgccagtgcctgcagccggtgctgtccacagggagctccagcccttctcacactcgacccgcagaaaccacccaccttcaccatgtctgacgaggaagttgaacaggtggaggagcagtacgaagaagaagaggaagcccaggaggaagctgcagaagtccatgaggaagagaggagggcagaggacgacctgaagaagaagaaagctctgtcttccatgggagccaactacagcagctacctggccaaggctgaccagaagagaggcaagaagcagacagcccgggaaatgaagaagaagattctggctgagagacgcaagccgctcaacatcgatcaccttggtgaagacaaactgagggacaaggccaaggagctctgggagcccccacaatcctgtcaggggctccctgacagtcctgggggtggagaggccatcccggggcgtcccccgcgtctgtgtccttgctgccttcatcccctggggcctgtgaataaagctgcagaaccccct

SEQ ID NO: 32934 - DNA, 1791 bp, Homo sapiens
  source 1..1791: mol_type = unassigned DNA
attttgcctttttgttaggtttcctaaagacaaaaaaaaatggaggaatctgtaaaccaaatgcagccactgaatgagaagcagatagccaattctcaggatggatatgtatggcaagtcactgacatgaatcgactacaccggttcttatgtttcggttctgaaggtgggacttattatatcaaagaacagaagttgggccttgaaaatgctgaagctttaattagattgattgaagatggcagaggatgtgaagtgatacaagaaataaagtcatttagtcaagaaggcagaaccacaaagcaagagcctatgctctttgcacttgccatttgttcccagtgctccgacataagcacaaaacaagcagcatttaaagctgtttctgaagtttgtcgcattcctacccatctctttacttttatccagtttaagaaagatctgaaggaaagcatgaaatgtggcatgtggggtcgtgccctccggaaggctatagcggactggtacaatgagaaaggtggcatggcccttgctctggcagttacaaaatataaacagagaaatggctggtctcacaaagatctattaagattgtcacatcttaaaccttccagtgaaggacttgcaattgtgaccaaatatattacaaagggctggaaagaagttcatgaattgtataaagaaaaagcactctctgtggagactgaaaaattattaaagtatctggaggctgtagagaaagtgaagcgcacaagagatgagctagaagtcattcatctaatagaagaacatagattagttagagaacatcttttaacaaatcacttaaagtctaaagaggtatggaaggctttgttacaagaaatgccgcttactgcattactaaggaatctaggaaagatgactgctaattcagtacttgaaccaggaaattcagaagtatctttagtatgtgaaaaactgtgtaatgaaaaactattaaaaaaggctcgtatacatccatttcatattttgatcgcattagaaacttacaagacaggtcatggtctcagagggaaactgaagtggcgccctgatgaagaaattttgaaagcattggatgctgctttttataaaacatttaagacagttgaaccaactggaaaacgtttcttactagctgttgatgtcagtgcttctatgaaccaaagagttttgggtagtatactcaacgctagtacagttgctgcagcaatgtgcatggttgtcacacgaacagaaaaagattcttatgtagttgctttttccgatgaaatggtaccatgtccagtgactacagatatgaccttacaacaggttttaatggctatgagtcagatcccagcaggtggaactgattgctctcttccaatgatctgggctcagaagacaaacacacctgctgatgtcttcattgtattcactgataatgagacctttgctggaggtgtccatcctgctattgctctgagggagtatcgaaagaaaatggatattccagctaaattgattgtttgtggaatgacatcaaatggtttcaccattgcagacccagatgatagaggcatgttggatatgtgcggctttgatactggagctctggatgtaattcgaaatttcacattagatatgatttaaccataagcagcagcacgatccagagatccattgccatcagtgatctcactaaaaatatacagctacttcccagctaatctccacccaatgaatgatgatggtatagtatgtgcataatggaaagttaccttactg

SEQ ID NO: 32935 - DNA, 1909 bp, Homo sapiens
  source 1..1909: mol_type = unassigned DNA
cacaggccgacgtcgagagggcctgctttactcctcctctttctcctccttctcccgcggcttctgcgcggagaggcgtcgcccgggatctgggttttggaagaaggatctttgtgggaagacagggtgaatttatcacagaggaataacgagggagaggagaaaggtttcctaaagacaaaaaaaaatggaggaatctgtaaaccaaatgcagccactgaatgagaagcagatagccaattctcaggatggatatgtatggcaagtcactgacatgaatcgactacaccggttcttatgtttcggttctgaaggtgggacttattatatcaaagaacagaagttgggccttgaaaatgctgaagctttaattagattgattgaagatggcagaggatgtgaagtgatacaagaaataaagtcatttagtcaagaaggcagaaccacaaagcaagagcctatgctctttgcacttgccatttgttcccagtgctccgacataagcacaaaacaagcagcatttaaagctgtttctgaagtttgtcgcattcctacccatctctttacttttatccagtttaagaaagatctgaaggaaagcatgaaatgtggcatgtggggtcgtgccctccggaaggctatagcggactggtacaatgagaaaggtggcatggcccttgctctggcagttacaaaatataaacagagaaatggctggtctcacaaagatctattaagattgtcacatcttaaaccttccagtgaaggacttgcaattgtgaccaaatatattacaaagggctggaaagaagttcatgaattgtataaagaaaaagcactctctgtggagactgaaaaattattaaagtatctggaggctgtagagaaagtgaagcgcacaagagatgagctagaagtcattcatctaatagaagaacatagattagttagagaacatcttttaacaaatcacttaaagtctaaagaggtatggaaggctttgttacaagaaatgccgcttactgcattactaaggaatctaggaaagatgactgctaattcagtacttgaaccaggaaattcagaagtatctttagtatgtgaaaaactgtgtaatgaaaaactattaaaaaaggctcgtatacatccatttcatattttgatcgcattagaaacttacaagacaggtcatggtctcagagggaaactgaagtggcgccctgatgaagaaattttgaaagcattggatgctgctttttataaaacatttaagacagttgaaccaactggaaaacgtttcttactagctgttgatgtcagtgcttctatgaaccaaagagttttgggtagtatactcaacgctagtacagttgctgcagcaatgtgcatggttgtcacacgaacagaaaaagattcttatgtagttgctttttccgatgaaatggtaccatgtccagtgactacagatatgaccttacaacaggttttaatggctatgagtcagatcccagcaggtggaactgattgctctcttccaatgatctgggctcagaagacaaacacacctgctgatgtcttcattgtattcactgataatgagacctttgctggaggtgtccatcctgctattgctctgagggagtatcgaaagaaaatggatattccagctaaattgattgtttgtggaatgacatcaaatggtttcaccattgcagacccagatgatagagacactgtaaaatagttttgctttgttgaataatacgtgtgtacctaaaagagccttgcaaaataccctactaaataaatcattttagacatggagtgcaggtggacactgtgtgaactgtttttggtcagttattgtagaaattgatagatgtaccaaataaactctatgcacattaaa

SEQ ID NO: 32936 - DNA, 1857 bp, Homo sapiens
  source 1..1857: mol_type = unassigned DNA
cacaggccgacgtcgagagggcctgctttactcctcctctttctcctccttctcccgcggcttctgcgcggagaggcgtcgcccgggatctgggttttggaagaaggatctttgtgggaagacagggtgaatttatcacagaggaataacgagggagaggagaaaggtttcctaaagacaaaaaaaaatggaggaatctgtaaaccaaatgcagccactgaatgagaagcagatagccaattctcaggatggatatgtatggcaagtcactgacatgaatcgactacaccggttcttatgtttcggttctgaaggtgggacttattatatcaaagaacagaagttgggccttgaaaatgctgaagctttaattagattgattgaagatggcagaggatgtgaagtgatacaagaaataaagtcatttagtcaagaaggcagaaccacaaagcaagagcctatgctctttgcacttgccatttgttcccagtgctccgacataagcacaaaacaagcagcatttaaagctgtttctgaagtttgtcgcattcctacccatctctttacttttatccagtttaagaaagatctgaaggaaagcatgaaatgtggcatgtggggtcgtgccctccggaaggctatagcggactggtacaatgagaaaggtggcatggcccttgctctggcagttacaaaatataaacagagaaatggctggtctcacaaagatctattaagattgtcacatcttaaaccttccagtgaaggacttgcaattgtgaccaaatatattacaaagggctggaaagaagttcatgaattgtataaagaaaaagcactctctgtggagactgaaaaattattaaagtatctggaggctgtagagaaagtgaagcgcacaagagatgagctagaagtcattcatctaatagaagaacatagattagttagagaacatcttttaacaaatcacttaaagtctaaagaggtatggaaggctttgttacaagaaatgccgcttactgcattactaaggaatctaggaaagatgactgctaattcagtacttgaaccaggaaattcagaagtatctttagtatgtgaaaaactgtgtaatgaaaaactattaaaaaaggctcgtatacatccatttcatattttgatcgcattagaaacttacaagacaggtcatggtctcagagggaaactgaagtggcgccctgatgaagaaattttgaaagcattggatgctgctttttataaaacatttaagacagttgaaccaactggaaaacgtttcttactagctgttgatgtcagtgcttctatgaaccaaagagttttgggtagtatactcaacgctagtacagttgctgcagcaatgtgcatggttgtcacacgaacagaaaaagattcttatgtagttgctttttccgatgaaatggtaccatgtccagtgactacagatatgaccttacaacaggttttaatggctatgagtcagatcccagcaggtggaactgattgctctcttccaatgatctgggctcagaagacaaacacacctgctgatgtcttcattgtattcactgataatgagacctttgctggaggtgtccatcctgctattgctctgagggagtatcgaaagaaaatggatattccagctaaattgattgtttgtggaatgacatcaaatggtttcaccattgcagacccagatgatagagccttgcaaaataccctactaaataaatcattttagacatggagtgcaggtggacactgtgtgaactgtttttggtcagttattgtagaaattgatagatgtaccaaataaactctatgcacattaaa

SEQ ID NO: 32937 - DNA, 1898 bp, Homo sapiens
  source 1..1898: mol_type = unassigned DNA
cacaggccgacgtcgagagggcctgctttactcctcctctttctcctccttctcccgcggcttctgcgcggagaggcgtcgcccgggatctgggttttggaagaaggatctttgtgggaagacagggtgaatttatcacagaggaataacgagggagaggagaaaggtttcctaaagacaaaaaaaaatggaggaatctgtaaaccaaatgcagccactgaatgagaagcagatagccaattctcaggatggatatgtatggcaagtcactgacatgaatcgactacaccggttcttatgtttcggttctgaaggtgggacttattatatcaaagaacagaagttgggccttgaaaatgctgaagctttaattagattgattgaagatggcagaggatgtgaagtgatacaagaaataaagtcatttagtcaagaaggcagaaccacaaagcaagagcctatgctctttgcacttgccatttgttcccagtgctccgacataagcacaaaacaagcagcatttaaagctgtttctgaagtttgtcgcattcctacccatctctttacttttatccagtttaagaaagatctgaaggaaagcatgaaatgtggcatgtggggtcgtgccctccggaaggctatagcggactggtacaatgagaaaggtggcatggcccttgctctggcagttacaaaatataaacagagaaatggctggtctcacaaagatctattaagattgtcacatcttaaaccttccagtgaaggacttgcaattgtgaccaaatatattacaaagggctggaaagaagttcatgaattgtataaagaaaaagcactctctgtggagactgaaaaattattaaagtatctggaggctgtagagaaagtgaagcgcacaagagatgagctagaagtcattcatctaatagaagaacatagattagttagagaacatcttttaacaaatcacttaaagtctaaagaggtatggaaggctttgttacaagaaatgccgcttactgcattactaaggaatctaggaaagatgactgctaattcagtacttgaaccaggaaattcagaagtatctttagtatgtgaaaaactgtgtaatgaaaaactattaaaaaaggctcgtatacatccatttcatattttgatcgcattagaaacttacaagacaggtcatggtctcagagggaaactgaagtggcgccctgatgaagaaattttgaaagcattggatgctgctttttataaaacatttaagacagttgaaccaactggaaaacgtttcttactagctgttgatgtcagtgcttctatgaaccaaagagttttgggtagtatactcaacgctagtacagttgctgcagcaatgtgcatggttgtcacacgaacagaaaaagattcttatgtagttgctttttccgatgaaatggtaccatgtccagtgactacagatatgaccttacaacaggttttaatggctatgagtcagatcccagcaggtggaactgattgctctcttccaatgatctgggctcagaagacaaacacacctgctgatgtcttcattgtattcactgataatgagacctttgctggaggtgtccatcctgctattgctctgagggagtatcgaaagaaaatggatattccagctaaattgattgtttgtggaatgacatcaaatggtttcaccattgcagacccagatgatagaggcatgttggatatgtgcggctttgatactggagctctggatccttgcaaaataccctactaaataaatcattttagacatggagtgcaggtggacactgtgtgaactgtttttggtcagttattgtagaaattgatagatgtaccaaataaactctatgcacattaaa

SEQ ID NO: 32938 - DNA, 3081 bp, Homo sapiens
  source 1..3081: mol_type = unassigned DNA
tcctgcttgtcggcatcgctccccacaggccgacgtcgagagggcctgctttactcctcctctttctcctccttctcccgcggcttctgcgcggagaggcgtcgcccgggatctgggttttggaagaaggatctttgtgggaagacagggtgaatttatcacagaggaataacgagggagaggagaaaggtttcctaaagacaaaaaaaaatggaggaatctgtaaaccaaatgcagccactgaatgagaagcagatagccaattctcaggatggatatgtatggcaagtcactgacatgaatcgactacaccggttcttatgtttcggttctgaaggtgggacttattatatcaaagaacagaagttgggccttgaaaatgctgaagctttaattagattgattgaagatggcagaggatgtgaagtgatacaagaaataaagtcatttagtcaagaaggcagaaccacaaagcaagagcctatgctctttgcacttgccatttgttcccagtgctccgacataagcacaaaacaagcagcatttaaagctgtttctgaagtttgtcgcattcctacccatctctttacttttatccagtttaagaaagatctgaaggaaagcatgaaatgtggcatgtggggtcgtgccctccggaaggctatagcggactggtacaatgagaaaggtggcatggcccttgctctggcagttacaaaatataaacagagaaatggctggtctcacaaagatctattaagattgtcacatcttaaaccttccagtgaaggacttgcaattgtgaccaaatatattacaaagggctggaaagaagttcatgaattgtataaagaaaaagcactctctgtggagactgaaaaattattaaagtatctggaggctgtagagaaagtgaagcgcacaagagatgagctagaagtcattcatctaatagaagaacatagattagttagagaacatcttttaacaaatcacttaaagtctaaagaggtatggaaggctttgttacaagaaatgccgcttactgcattactaaggaatctaggaaagatgactgctaattcagtacttgaaccaggaaattcagaagtatctttagtatgtgaaaaactgtgtaatgaaaaactattaaaaaaggctcgtatacatccatttcatattttgatcgcattagaaacttacaagacaggtcatggtctcagagggaaactgaagtggcgccctgatgaagaaattttgaaagcattggatgctgctttttataaaacatttaagacagttgaaccaactggaaaacgtttcttactagctgttgatgtcagtgcttctatgaaccaaagagttttgggtagtatactcaacgctagtacagttgctgcagcaatgtgcatggttgtcacacgaacagaaaaagattcttatgtagttgctttttccgatgaaatggtaccatgtccagtgactacagatatgaccttacaacaggttttaatggctatgagtcagatcccagcaggtggaactgattgctctcttccaatgatctgggctcagaagacaaacacacctgctgatgtcttcattgtattcactgataatgagacctttgctggaggtgtccatcctgctattgctctgagggagtatcgaaagaaaatggatattccagctaaattgattgtttgtggaatgacatcaaatggtttcaccattgcagacccagatgatagaggcatgttggatatgtgcggctttgatactggagctctggatgtaattcgaaatttcacattagatatgatttaaccataagcagcagcacgatccagagatccattgccatcagtgatctcactaaaaatatacagctacttcccagctaatctccacccaatgaatgatgatggtatagtatgtgcataatggaaagttaccttactgaaaaaaaaaaaagaaggaaaaataagatgggcccaaaggtctatctactaaactagctcttggggaaatagcttcaggatactgtagtttcctctatctaatagagaactttttgttaacagacactgtaaaatagttttgctttgttgaataatacgtgtgtacctaaaagaggtaagagcaaaaagtgtaattccacatcatgttacttgagaagtgcttaacgttttcttaaatgttttcattgggaaaggacagctttgataatgtccaaatactctgaaatgcactagaccatataactgtgatgaaatatgaaactcatctgtaaacttttataccaagggggtaaaaaaaaaaactaaggcatttgattaaattatgaatgagttttacaaattcctttcagagttttactaagatcacacaaataacagctttcttattcagtgaaaaagatattttatttctgatgttttatttgcacttgtggaatatgttaccattaatcagaaacatcatggcaacccctaagaatagactaagtttgtgttggctgagggattctatttggtttgcttttttttttttgctttgttatattttattgctacaaggggtgtgacttgataatgatttcctctgaattataataacatagccagatgtagtctcacactgtttttcatactcttaagtgtaaataatataaaatgtttcaagcgcttaactccccctcattcacaaagtataacaattaaaatctcaactataaccagtttagctttttccttacttttaaaataaaattttttacttttaactatttttttagttaatatttttaaaagtatacatgtcaatggcctctttgtccattattcattttgtggcaaaatattcttctttgatagtgtaaacaaataataaagcaatctaggtcctttaggtttgaaaggcaatttttgagtagcatattaccagctagccagtcactaggaatttttttcagtattatttgtatgtattaaacttttcattacactaaagtgcattattttattgagcaagtatccttcattgtgaggtttaacattaaagcaatctgttgaaatgcca

SEQ ID NO: 32939 - DNA, 2143 bp, Homo sapiens
  source 1..2143: mol_type = unassigned DNA
gactgagcgcgggaggacgctctagccaccctagagacatcgaaactcttcccaggccttgcagcacccgtagcggattcggaagggctggggcctgagaagaaagggcggtgattcacagcgccgaggaggcaacatccgggatcctcgcccctctggggcggaggcggggcaaaagaagaggggcaggactcgttcccgggaaccgaacctggaatccccggcggcagtggggctgttgctgttgctgtggctgtcgctgcccgtcaggctgccttcttttgtcgtttcccagcgctgcgcaggacttctcctggcggcgctgcggatccagggggtcggctgccaggtacaggtttcctaaagacaaaaaaaaatggaggaatctgtaaaccaaatgcagccactgaatgagaagcagatagccaattctcaggatggatatgtatggcaagtcactgacatgaatcgactacaccggttcttatgtttcggttctgaaggtgggacttattatatcaaagaacagaagttgggccttgaaaatgctgaagctttaattagattgattgaagatggcagaggatgtgaagtgatacaagaaataaagtcatttagtcaagaaggcagaaccacaaagcaagagcctatgctctttgcacttgccatttgttcccagtgctccgacataagcacaaaacaagcagcatttaaagctgtttctgaagtttgtcgcattcctacccatctctttacttttatccagtttaagaaagatctgaaggaaagcatgaaatgtggcatgtggggtcgtgccctccggaaggctatagcggactggtacaatgagaaaggtggcatggcccttgctctggcagttacaaaatataaacagagaaatggctggtctcacaaagatctattaagattgtcacatcttaaaccttccagtgaaggacttgcaattgtgaccaaatatattacaaagggctggaaagaagttcatgaattgtataaagaaaaagcactctctgtggagactgaaaaattattaaagtatctggaggctgtagagaaagtgaagcgcacaagagatgagctagaagtcattcatctaatagaagaacatagattagttagagaacatcttttaacaaatcacttaaagtctaaagaggtatggaaggctttgttacaagaaatgccgcttactgcattactaaggaatctaggaaagatgactgctaattcagtacttgaaccaggaaattcagaagtatctttagtatgtgaaaaactgtgtaatgaaaaactattaaaaaaggctcgtatacatccatttcatattttgatcgcattagaaacttacaagacaggtcatggtctcagagggaaactgaagtggcgccctgatgaagaaattttgaaagcattggatgctgctttttataaaacatttaagacagttgaaccaactggaaaacgtttcttactagctgttgatgtcagtgcttctatgaaccaaagagttttgggtagtatactcaacgctagtacagttgctgcagcaatgtgcatggttgtcacacgaacagaaaaagattcttatgtagttgctttttccgatgaaatggtaccatgtccagtgactacagatatgaccttacaacaggttttaatggctatgagtcagatcccagcaggtggaactgattgctctcttccaatgatctgggctcagaagacaaacacacctgctgatgtcttcattgtattcactgataatgagacctttgctggaggtgtccatcctgctattgctctgagggagtatcgaaagaaaatggatattccagctaaattgattgtttgtggaatgacatcaaatggtttcaccattgcagacccagatgatagaggcatgttggatatgtgcggctttgatactggagctctggatgtaattcgaaatttcacattagatatgatttaaccataagcagcagcacgatccagagatccattgccatcagtgatctcactaaaaatatacagctacttcccagctaatctccacccaatgaatgatgatggtatagtatgtgcataatggaaagttaccttactgaaaaaaaaaaaagaa

SEQ ID NO: 32940 - DNA, 1987 bp, Homo sapiens
  source 1..1987: mol_type = unassigned DNA
gggttgaggctgggcaaacgccgcgaaactatcgctcttccccgtcccgcttccgcgcctgtccaccctgggtaacggaaccagcatcgcggtagggacatcctcgctaggcccggccggaccattcctcagggtgggccctttccgaagccgggaccgctcctgcttgtcggcatcgctccccacaggccgacgtcgagagggcctgctttactcctcctctttctcctccttctcccgcggcttctgcgcggagaggcgtcgcccgggatctgggttttggaagaaggatctttgtgggaagacagggtgaatttatcacagaggaataacgagggagaggagaaaggtttcctaaagacaaaaaaaaatggaggaatctgtaaaccaaatgcagccactgaatgagaagcagatagccaattctcaggatggatatgtatggcaagtcactgacatgaatcgactacaccggttcttatgtttcggttctgaaggtgggacttattatatcaaagaacagaagttgggccttgaaaatgctgaagctttaattagattgattgaagatggcagaggatgtgaagtgatacaagaaataaagtcatttagtcaagaaggcagaaccacaaagcaagagcctatgctctttgcacttgccatttgttcccagtgctccgacataagcacaaaacaagcagcatttaaagctgtttctgaagtttgtcgcattcctacccatctctttacttttatccagtttaagaaagatctgaaggaaagcatgaaatgtggcatgtggggtcgtgccctccggaaggctatagcggactggtacaatgagaaaggtggcatggcccttgctctggcagttacaaaatataaacagagaaatggctggtctcacaaagatctattaagattgtcacatcttaaaccttccagtgaaggacttgcaattgtgaccaaatatattacaaagggctggaaagaagttcatgaattgtataaagaaaaagcactctctgtggagactgaaaaattattaaagtatctggaggctgtagagaaagtgaagcgcacaagagatgagctagaagtcattcatctaatagaagaacatagattagttagagaacatcttttaacaaatcacttaaagtctaaagaggtatggaaggctttgttacaagaaatgccgcttactgcattactaaggaatctaggaaagatgactgctaattcagtacttgaaccaggaaattcagaagtatctttagtatgtgaaaaactgtgtaatgaaaaactattaaaaaaggctcgtatacatccatttcatattttgatcgcattagaaacttacaagacaggtcatggtctcagagggaaactgaagtggcgccctgatgaagaaattttgaaagcattggatgctgctttttataaaacatttaagacagttgaaccaactggaaaacgtttcttactagctgttgatgtcagtgcttctatgaaccaaagagttttgggtagtatactcaacgctagtacagttgctgcagcaatgtgcatggttgtcacacgaacagaaaaagattcttatgtagttgctttttccgatgaaatggtaccatgtccagtgactacagatatgaccttacaacaggttttaatggctatgagtcagatcccagcaggtggaactgattgctctcttccaatgatctgggctcagaagacaaacacacctgctgatgtcttcattgtattcactgataatgagacctttgctggaggtgtccatcctgctattgctctgagggagtatcgaaagaaaatggatattccagctaaattgattgtttgtggaatgacatcaaatggtttcaccattgcagacccagatgatagaggcatgttggatatgtgcggctttgatactggagctctggatgtaattcgaaatttcacattagatatgatttaa

SEQ ID NO: 32941 - DNA, 613 bp, Homo sapiens
  source 1..613: mol_type = unassigned DNA
gttgctgttgctgtggctgtcgctgcccgtcaggctgccttcttttgtcgtttcccagcgctgcgcaggacttctcctggcggcgctgcggatccagggggtcggctgccaggtacaggggttgaggctgggcaaacgccgcgaaactatcgctcttccccgtcccgcttccgcgcctgtccaccctgggtaacggaaccagcatcgcggtagggacatcctcgctaggcccggccggaccattcctcagggtgggccctttccgaagccgggaccgctcctgcttgtcggcatcgctccccacaggccgacgtcgagagggcctgctttactcctcctctttctcctccttctcccgcggcttctgcgcggagaggcgtcgcccgggatctgggttttggaagaaggatctttgtgggaagacagggtgaatttatcacagaggaataacgagggagaggagaaaggtttcctaaagacaaaaaaaaatggaggaatctgtaaaccaaatgcagccactgaatgagaagcagatagccaattctcaggatggatatgtatggcaagtcactgacatgaatcgactacaccggttcttatgtttcggttctga

SEQ ID NO: 32942 - DNA, 3403 bp, Homo sapiens
  source 1..3403: mol_type = unassigned DNA
gcactcttgttgcatcatcagcgtgcacctccacgatgaaacaggtctgggctacaaaagtatggccgcttctgaggcggcggtggtgtcttcgccgtctttgaaaacagacacatcccctgtccttgaaactgcaggaacggtcgcagcaatggctgcgaccccgtcagcaagggctgcagccgcggtggttgcggccgcggccaggaccggatccgaagccagggtctccaaggccgctttggctaccaagctgctgtccttgagcggcgtgttcgccgtgcacaagcccaaagggcccacttcagccgagctgctgaatcggttgaaggagaagctgctggcagaagctggaatgccttctccagaatggaccaagaggaaaaagcagactttgaaaattgggcatggagggactctagacagcgcagcccgaggagttctggttgttggaattggaagcggaacaaaaatgttgaccagtatgttgtcagggtccaagagatatactgccattggagaactggggaaagctactgatacactagattctacggggagggtaacagaagaaaaaccttacgataaaataacacaagaagatattgaaggcattctacagaaatttactggaaatataatgcaagtgccccccctctattctgcattaaagaaagatggacaaagactttcgactttgatgaagagaggtgaagtcgtagaagcaaaacctgccaggccagtgactgtatacagtatctcccttcaaaaattccagccaccatttttcacattagatgttgaatgtggaggaggtttttatatcagaagcttggtcagtgacattggaaaagaactatcttcctgtgccaatgtgctagagctgacccgaaccaaacagggaccatttacgctagaagaacatgcccttcctgaagacaaatggacaattgatgacattgcacagtctcttgagcattgctcatctcttttcccagcagagttggcacttaaaaaatcaaaacctgagtctaatgaacaggttttgagctgtgaatatataactctaaatgagccaaagagagaagatgatgtaattaagacgtgttgagattggcctgggaatatcatcattttctagttgacatttgaatcctgtgtgcagatgcagaatgacaagctgcattcaaaagacaaacaatatgtcttttttttttttgcatgaagaaaaatgtctatcatttacagtttcaatagcacataatttattttctatgcattataaatggccttgcagttggctcagttgtttgttgtgttgtgaaatgttttaggattttttgtattgtgaaaatatgaatatgattggattcagaaaaattaactttctgaatttgatctgtcttcagtcttgtgaaaaagttgaacaaatttcctaatcaaagaaaaaagtatgagctccatgtttctttagtttcacaaaaatgaccataatttagtgttatttttactttatttaggcttcctggtggcttcattttattgaaattctttaaattgtttaaagtggccattattgatctctttcttctgttttggagagtttattattaaaaacatttctttgataaaatggccatcatctagtaatacctgtgtttgtttagatcttggaaatgaataagctttgataatatttgtaaatgaaccaaattattactgctaccactaacaggttgtaaatagaagactaatacttaattaaagtcaccttcctaccattagagcagaagacagctcctatagttttgtattttggcagctatgagatattttcatggtaatgtcaacatggtcaagcactttgtaccaagttattaagtaacataatttttaaaatttaaagaatgtgtcttcaactaaaaactttattctttagcatttatttatatttctctgtagggtgttccctgtgacattgtctctttagtttgctctttcaagagatacttacagatgttgagatggctgccctgcatttccagctaatctcttctgctctaaatatttaaaaacagttcttctcaaacattttcattcagatagctttctgaaagttccctatccctctttaccataattttttaaatgtagccacattgtaatagtaaacttcatatataatgagtgcttcatatttttgttatgggaaagcaatatattatgcagccagtctgtagaaacattcagatccctcttcctttactcaaatacagtttcaaaaggaagactcatgagaaatttcataaaatacaagtttttagatgtttatgctttgcctttctttttaaaggtgttttcctgctttgtagtctctaactctgaaatttaaaatatgtaaactaaagtggttttatttgtgcttaacccaatttaaactcaatgtaaaatgttatatatgcatcagtacagcattttcaacatattggcaacatattttaaatgaaaacactaaaacaattcttagtatgagacaaaactgtaaggaaaaagagtgttaataccatgatgcattaacataaaatatcaaacacacaaagtcataaaatgaaaatttacagttttacctgttcatatctagtgccccacagtgtgtgtcaaccaaaggtggcagtggctacatctgcctgttggactggtacaggttacaatatgtcctcttccattgcaaattaaagtccaaatagagaaatacttaggttttagaacacatcagaggtatttctgctgtatttttcaccttaaaaattgacacagagtttactaatagaggagtagagattgttgaccatttttaaaaaacgatagccactctttttcttttatgtttaaaactgaagttttgccaaatgggaaaattactgttacctctaccatcttaatgtagtaactttagaatttaaatttttatattactattttcctttttgttgttcacatagtcttaaggcacctatacttttaaattgactttttcatttgatattatctatatgtatgtagttgtgataatgattattttaattatattactttatactcttaatttatttagagtatttctctattgctgaatacttaagtagttttaaattttattatgataaattcctgggagggggattatttagtgaaataatatgaagaactttatgacttatgtttgccttattgcattcccaaagagttgtaacattttacagtgttaccatttgagtaggggttttatatgttgttgctaatttagtaaacataggagagaaatcaaagtttttctgatttgcttttatgtgatttatctgtatactttgttcatttatataaataaatgtcttaatggttt

SEQ ID NO: 32943 - DNA, 1777 bp, Homo sapiens
  source 1..1777: mol_type = unassigned DNA
cggcctttcgaggggaaacatcgcttcacgggcagaaggcatgtaggccaagtaggcgaaggaaacgcacgcgaactgtctaccgtctacgtccaccgatccaagactctcgccatgtcacctcgccccagaaagtgtctgcaaaggacacgcaaccacgctcactcagcgccgggccctatttccttctccacagccggttttccccgaagactataaaatgcgaacctcttccggctgtggaacatggcggcgcccgtggaaaggaccacatttgggggcggggcctggcggtacttccgtccaggtccagcgggtgctgtgatcttcaagtatggggtctgctggcttgtcgcggctgcatgggcttttcgcggtctataagcccccggggctaaaatggaagcacctgcgggatacagtggagctacaacttctgaagggtctcaatgccaggaagcctcccgctcctaaacagcgtgttcgcttcttgctgggccccatggaaggcagcgaagagaaggagctgaccctcacagccaccagcgtaccctctttcatcaaccatccactggtatgtggaccagcattcgcccatctcaaggttggcgtgggacatcggttggatgcccaggcttctggagtacttgtgctcggcgtgggacatggatgcaggctcctcaccgatatgtacaatgctcatcttaccaaggattacacagtgcgtggcctcctgggcaaagctacagatgacttccgtgaggacgggaggctggtagagaagacaacctatgaccacgtgaccagagagaagctggaccgcattctggccgttatccaaggctcccatcagaaggccctggtgatgtactccaacctcgacctgaagacccaggaggcctatgagatggccgtgagaggcctgatccggcccatgaacaagtccccgatgctgataactggcatccgatgcctctactttgcacctccggaattcctcttagaggtgcagtgcatgcatgagacgcagaaagagctgcggaagttggttcatgaaatcggcctggaactaaagaccactgctgtctgcacccaagtgcggcgcacgcgcgacggcttcttcacgctagacagtgccctcctgaggacccagtgggacctaaccaacatccaggatgctatccgggctgctacccctcaggtagctgcagagctggagaagagcttgagcccggggctggacaccaagcagctccccagtccgggatggtcctgggactcccagggcccgagctctaccttggggctggagaggggtgcggggcagtgaatgcccaggcagctcctggggcagtggatggataaatagaagaactgctatgagctggacctgatagctgtgcagaaagtgagagcaggggcaccttttctacgtaagacacaaaactcaagctgtaacagaaaggtcaatggacttgacccaactgagaaggaaaaacttctgtatggaggaaaagacagtaaacatgacagactgatagaaagtattggcagaccaggcgtggtggcgggcacttgtaatcccagctactcccaaggctgaggcaggagaattgcttgagcccaggagtttaaggttgtagtgcgctagacggcgcctgtgaatagccactgcactctagtctggggaacatatgagacccctgccatctcaaaaaaaaaaaaattctcaataaactatgtgcccacgaaaattaaaaattaaaaaaaattgtaa

SEQ ID NO: 32944 - DNA, 1606 bp, Homo sapiens
  source 1..1606: mol_type = unassigned DNA
aaaatcacgtgacctattcacctgggcagagcgctttcccaaacgcctgttctctgtgctttcttactcctcactttcctctgttttccgagggggaaactgactcagtattgttccttgtcacacggttactacgttgtagagtctgtttgaatccgcctgtttcttaactactgctatactgccctctgcaccatgggcttctgctttgtcttctacatcatacttccctgttgtctaatcccccaagtgtttggacagaacaagatattcctggtcagcatcgtggtgcacgcctgtaatcccagctactctggaggctgaggcaggaggatcgcttgagcccaagagtttgacgttacagtctcaatgccaggaagcctcccgctcctaaacagcgtgttcgcttcttgctgggccccatggaaggcagcgaagagaaggagctgaccctcacagccaccagcgtaccctctttcatcaaccatccactggtatgtggaccagcattcgcccatctcaaggttggcgtgggacatcggttggatgcccaggcttctggagtacttgtgctcggcgtgggacatggatgcaggctcctcaccgatatgtacaatgctcatcttaccaaggattacacagtgcgtggcctcctgggcaaagctacagatgacttccgtgaggacgggaggctggtagagaagacaacctatgaccacgtgaccagagagaagctggaccgcattctggccgttatccaaggctcccatcagaaggccctggtgatgtactccaacctcgacctgaagacccaggaggcctatgagatggccgtgagaggcctgatccggcccatgaacaagtccccgatgctgataactggcatccgatgcctctactttgcacctccggaattcctcttagaggtgcagtgcatgcatgagacgcagaaagagctgcggaagttggttcatgaaatcggcctggaactaaagaccactgctgtctgcacccaagtgcggcgcacgcgcgacggcttcttcacgctagacagtgccctcctgaggacccagtgggacctaaccaacatccaggatgctatccgggctgctacccctcaggtagctgcagagctggagaagagcttgagcccggggctggacaccaagcagctccccagtccgggatggtcctgggactcccagggcccgagctctaccttggggctggagaggggtgcggggcagtgaatgcccaggcagctcctggggcagtggatggataaatagaagaactgctatgagctggacctgatagctgtgcagaaagtgagagcaggggcaccttttctacgtaagacacaaaactcaagctgtaacagaaaggtcaatggacttgacccaactgagaaggaaaaacttctgtatggaggaaaagacagtaaacatgacagactgatagaaagtattggcagaccaggcgtggtggcgggcacttgtaatcccagctactcccaaggctgaggcaggagaattgcttgagcccaggagtttaaggttgtagtgcgctagacggcgcctgtgaatagccactgcactctagtctg

SEQ ID NO: 32945 - DNA, 3644 bp, Homo sapiens
  source 1..3644: mol_type = unassigned DNA
atgagaaggcagtgggggtctgccatgagggcggccgagcaggcgggctgcatggtgagcgcctcccgggccggacagcccgaggcgggcccgtggagctgcagcggggtaatcctgagccgtagcccgggcctggtgctttgccacgggggcatcttcgtccccttcctgcgagctggcagcgaagtcctgaccgcggccggcgccgtcttcctgcctggcgacagttgcagggacgacctgcgcctgcacgtgcagtgggccccaacggccgcgggtcccgggggcggcgcggagcggggccgcccagggctgtgcacgccccagtgcgcgagcctcgagcccggcccacctgccccgtcccgcgggcgtcccctgcagccccggcttcctgctgagctgctgctgctgctgagctgcccggccttctgggcccacttcgcgcgcctcttcggggacgaggcagcggaacagtggcgcttctcgagcgcggcgcgggatgacgaagtgtcggaggacgaggaggcggatcaactgagagcgctgggctggtttgcgctgctgggcgtgcggctaggccaggaggaggtggaggaggagcgcgggccagccatggcggtgtcgcctctcggggccgtgcccaagggtgcgccattgctggtctgcggctcccctttcggcgccttctgccccgacatctttctcaacacgctgagctgcggggtgctcagcaacgtggccggcccactgctgcttaccgacgcacgctgcctgcccggcaccgagggcggcggcgtgttcaccgcgcggcccgcgggggcgctggtggcgctggtggtggcgccgctctgttggaaggccggcgaatgggtgggcttcacgctgctctgcgccgccgccccccttttccgcgccgcccgcgacgcgcttcaccgcctgccgcacagcaccgctgccctggccgcccttctgccgccagaggtgggcgtcccgtggggtctgcccctccgagactccgggcccctgtgggcagccgcggcagtgttggtggagtgcggcaccgtatggggctccggagtggctgtggcaccccgccttgtagtgacctgtcggcacgtgtcccctcgggaagcagccagggtcctggtgcgctccaccacccccaagagtgtggccatctggggccgtgtggtatttgccactcaggagacatgtccctatgacatagcagtggtgagcctggaggaggacctggatgatgtccccatccctgtgcccgctgagcacttccatgaaggcgaggctgtgagtgtggtgggctttggcgtctttggccagtcttgcgggccctcggtgacctcaggcatcctttcggctgtggtgcaggtgaatggcacgcccgtaatgctgcagaccacgtgtgctgtgcacagcggctccagtgggggacccctcttctccaaccactcaggaaacctccttggcataatcaccagcaacacccgggacaataatacgggggccacctacccccacctgaacttcagcattcccatcacggtgctccagccggccctgcagcagtacagccagacccaagacctaggtggcctccgtgagctggaccgcgctgctgagccagtcagggtggtgtggcggttgcagcggcccctggcagaggccccgcggagcaagctctgaggctgtgttaccacctttggaaagaagagtgacctttttctgctgtaggaagtgatgttgaggtgacggtggcctcaggattcagggcccagcccctgcaggggcccaggctgcctctcatctccacccactgactgcagactgggctttgggctctggggcaaacttctcttcagccccatggatccttaacctggcagcccgttttggggtgctttcttgagcccccagttctctgtcccctagcactagactcagctgtattgtttttccttctggggagcccactccaactgcacagaagttctgggcctgacaggtagattccagctggaaggcaggcccgtgcctggttttgcgtctgttcccctgagggccatcgtcatcctggagcttcaatggggccttggctcctgtctgcctctcagtcagagtcagggctgacaaaggactcagcttccttagcatctcagcagaaaccttgctctgaagaccagagacagaagggacagaaacaggagtgcctcctgctgtgccaggcccatgggcagtgcaggcagatccctgaaggtcagcactcctgggtcttcatatgccaacaggggcgctcttgacactgtgccttcattttccagcccacagcctgggtctcagggatcttgaggggtagaacatgtctggttggggcttgggaataaacatgatctattgaaaaacctctgtatttatatatcaaattgtttctttttttcaggagttgaactgggaataggcaagtaccaggcaaagaaacacaccctttccttttttttttttttttttctttagagctgtggtcttgctctctcacccaggctggagtgcagtgttgcgatcacagctcactgcagcctcaaactcctgggctccaggagacctcctgcctcagcctcctgaatagctgggactacagtcgcgcaccaccacgcctggctaattttttatttttgtagaaatggggtattgctttgttgcccgtgctggcttcagccttctggtttcaagcagtcctcctgcctcagcttcccaaagtgctgggattacaggtgtgagccactgtgcccaacccagaaatacaccctttctgtgctgttttctcagcagggtgtgagctcacgggatacggtcctgccagactggccctcatagctggtcatgtgccagtcagagctgggtggggcttgcaggtcccggaaggtggtggtcttgacctggcagcagatgcttaaagaatgcctaaggtgggtggcagttggggagttcaagggtgaatgaggccagggcagcccccaggagctgaggccaactctttgagtcaggactgtgccgtgtgcccagggccttgcatgtgtgggccctcgagtgatttctactggcaggctgaaagccctgtgaggggcggctgtgggcggaggccacgcaggaagagtgcttaggagtaacttgtttctaacacctgtgtgctgagtgccaatgctgggtgtggtgttatgatatatattggttttcatccagcattcctgactcgtaactctcatagtccttgttccagtctttgttagaatactgggtatgttagggcttgggacaggcctctgacctctgggtatcctttcactaatgttcgcccacctttttcacagtgggtcctaaagaccttcccatgagagggtctcaatcctaggggaaggaatgttgatgtcatgaaccttccataaaaacccaagaggacagggttcagagagcttctggatagctgaacacctggcacttcctggagtgtggcgtgcccagggagggcacggaagctctgcactccttccccttccctcattccttgctctatgtgcatctcttcatctgtatcctttgcgatatcctttataataaaccggtaaacataa

SEQ ID NO: 32946 - DNA, 3397 bp, Homo sapiens
  source 1..3397: mol_type = unassigned DNA
ccgggtaggggtcctcgctcgctagcttgctgtttctcggagaagctcccgagtgtccggcctagaggccatgagaaggcagtgggggtctgccatgagggcggccgagcaggcgggctgcatggtgagcgcctcccgggccggacagcccgaggcgggcccgtggagctgcagcggggtaatcctgagccgtagcccgggcctggtgctttgccacgggggcatcttcgtccccttcctgcgagctggcagcgaagtcctgaccgcggccggcgccgtcttcctgcctggcgacagttgcagggacgacctgcgcctgcacgtgcagtgggccccaacggccgcgggtcccgggggcggcgcggagcggggccgcccagggctgtgcacgccccagtgcgcgagcctcgagcccggcccacctgccccgtcccgcgggcgtcccctgcagccccggcttcctgctgagctgctgctgctgctgagctgcccggccttctgggcccacttcgcgcgcctcttcggggacgaggcagcggaacagtggcgcttctcgagcgcggcgcgggatgacgaagtgtcggaggacgaggaggcggatcaactgagagcgctgggctggtttgcgctgctgggcgtgcggctaggccaggaggaggtggaggaggagcgcgggccagccatggcggtgtcgcctctcggggccgtgcccaagggtgcgccattgctggtctgcggctcccctttcggcgccttctgccccgacatctttctcaacacgctgagctgcggggtgctcagcaacgtggccggcccactgctgcttaccgacgcacgctgcctgcccggcaccgagggcggcggcgtgttcaccgcgcggcccgcgggggcgctggtggcgctggtggtggcgccgctctgttggaaggccggcgaatgggtgggcttcacgctgctctgcgccgccgccccccttttccgcgccgcccgcgacgcgcttcaccgcctgccgcacagcaccgctgccctggccgcccttctgccgccagaggtgggcgtcccgtggggtctgcccctccgagactccgggcccctgtgggcagccgcggcagtgttggtggagtgcggcaccgtatggggctccggagtggctgtggcaccccgccttgtagtgacctgtcggcacgtgtcccctcgggaagcagccagggtcctggtgcgctccaccacccccaagcataatcaccagcaacacccgggacaataatacgggggccacctacccccacctgaacttcagcattcccatcacggtgctccagccggccctgcagcagtacagccagacccaagacctaggtggcctccgtgagctggaccgcgctgctgagccagtcagggtggtgtggcggttgcagcggcccctggcagaggccccgcggagcaagctctgaggctgtgttaccacctttggaaagaagagtgacctttttctgctgtaggaagtgatgttgaggtgacggtggcctcaggattcagggcccagcccctgcaggggcccaggctgcctctcatctccacccactgactgcagactgggctttgggctctggggcaaacttctcttcagccccatggatccttaacctggcagcccgttttggggtgctttcttgagcccccagttctctgtcccctagcactagactcagctgtattgtttttccttctggggagcccactccaactgcacagaagttctgggcctgacaggtagattccagctggaaggcaggcccgtgcctggttttgcgtctgttcccctgagggccatcgtcatcctggagcttcaatggggccttggctcctgtctgcctctcagtcagagtcagggctgacaaaggactcagcttccttagcatctcagcagaaaccttgctctgaagaccagagacagaagggacagaaacaggagtgcctcctgctgtgccaggcccatgggcagtgcaggcagatccctgaaggtcagcactcctgggtcttcatatgccaacaggggcgctcttgacactgtgccttcattttccagcccacagcctgggtctcagggatcttgaggggtagaacatgtctggttggggcttgggaataaacatgatctattgaaaaacctctgtatttatatatcaaattgtttctttttttcaggagttgaactgggaataggcaagtaccaggcaaagaaacacaccctttccttttttttttttttttttctttagagctgtggtcttgctctctcacccaggctggagtgcagtgttgcgatcacagctcactgcagcctcaaactcctgggctccaggagacctcctgcctcagcctcctgaatagctgggactacagtcgcgcaccaccacgcctggctaattttttatttttgtagaaatggggtattgctttgttgcccgtgctggcttcagccttctggtttcaagcagtcctcctgcctcagcttcccaaagtgctgggattacaggtgtgagccactgtgcccaacccagaaatacaccctttctgtgctgttttctcagcagggtgtgagctcacgggatacggtcctgccagactggccctcatagctggtcatgtgccagtcagagctgggtggggcttgcaggtcccggaaggtggtggtcttgacctggcagcagatgcttaaagaatgcctaaggtgggtggcagttggggagttcaagggtgaatgaggccagggcagcccccaggagctgaggccaactctttgagtcaggactgtgccgtgtgcccagggccttgcatgtgtgggccctcgagtgatttctactggcaggctgaaagccctgtgaggggcggctgtgggcggaggccacgcaggaagagtgcttaggagtaacttgtttctaacacctgtgtgctgagtgccaatgctgggtgtggtgttatgatatatattggttttcatccagcattcctgactcgtaactctcatagtccttgttccagtctttgttagaatactgggtatgttagggcttgggacaggcctctgacctctgggtatcctttcactaatgttcgcccacctttttcacagtgggtcctaaagaccttcccatgagagggtctcaatcctaggggaaggaatgttgatgtcatgaaccttccataaaaacccaagaggacagggttcagagagcttctggatagctgaacacctggcacttcctggagtgtggcgtgcccagggagggcacggaagctctgcactccttccccttccctcattccttgctctatgtgcatctcttcatctgtatcctttgcgatatcctttataataaaccggtaaacataa

SEQ ID NO: 32947 - DNA, 1175 bp, Homo sapiens
  source 1..1175: mol_type = unassigned DNA
cccactgggtagaaggaacagggagcggccaggatgctgaatctgctgctgctggcgctgcccgtcctggcgagccgcgcctacgcggcccctgccccaggccaggccctgcagcgagtgggcatcgtcgggggtcaggaggcccccaggagcaagtggccctggcaggtgagcctgagagtccacggcccatactggatgcacttctgcgggggctccctcatccacccccagtgggtgctgaccgcagcgcactgcgtgggaccggacgtcaaggatctggccgccctcagggtgcaactgcgggagcagcacctctactaccaggaccagctgctgccggtcagcaggatcatcgtgcacccacagttctacaccgcccagatcggagcggacatcgccctgctggagctggaggagccggtgaacgtctccagccacgtccacacggtcaccctgccccctgcctcagagaccttccccccggggatgccgtgctgggtcactggctggggcgatgtggacaatgatgagcgcctcccaccgccatttcctctgaagcaggtgaaggtccccataatggaaaaccacatttgtgacgcaaaataccaccttggcgcctacacgggagacgacgtccgcatcgtccgtgacgacatgctgtgtgccgggaacacccggagggactcatgccagggcgactccggagggcccctggtgtgcaaggtgaatggcacctggctgcaggcgggcgtggtcagctggggcgagggctgtgcccagcccaaccggcctggcatctacacccgtgtcacctactacttggactggatccaccactatgtccccaaaaagccgtgagtcaggcctgggttggccacctgggtcactggaggaccaacccctgctgtccaaaacaccactgcttcctacccaggtggcgactgccccccacaccttccctgccccgtcctgagtgccccttcctgtcctaagccccctgctctcttctgagccccttcccctgtcctgaggacccttccctatcctgagcccccttccctgtcctaagcctgacgcctgcaccgggccctccagccctcccctgcccagatagctggtggtgggcgctaatcctcctgagtgctggacctcattaaagtgcatggaaatca

SEQ ID NO: 32948 - DNA, 1353 bp, Homo sapiens
  source 1..1353: mol_type = unassigned DNA
ggtaagtccccactctcagagaccctgacatcagcgtcacctggagcagagtggcccagcctcagactcagagcaccaagacccaggcccgcaggcctggacccaccccggtccccccgtcccagctccattcttcaccccacaatctgtagcccccagccctgccctgtgaggcccggccaggcccacgatgctcctccttgctccccagatgctgaatctgctgctgctggcgctgcccgtcctggcgagccgcgcctacgcggcccctgccccaggccaggccctgcagcgagtgggcatcgtcgggggtcaggaggcccccaggagcaagtggccctggcaggtgagcctgagagtccacggcccatactggatgcacttctgcgggggctccctcatccacccccagtgggtgctgaccgcagcgcactgcgtgggaccggacgtcaaggatctggccgccctcagggtgcaactgcgggagcagcacctctactaccaggaccagctgctgccggtcagcaggatcatcgtgcacccacagttctacaccgcccagatcggagcggacatcgccctgctggagctggaggagccggtgaacgtctccagccacgtccacacggtcaccctgccccctgcctcagagaccttccccccggggatgccgtgctgggtcactggctggggcgatgtggacaatgatgagcgcctcccaccgccatttcctctgaagcaggtgaaggtccccataatggaaaaccacatttgtgacgcaaaataccaccttggcgcctacacgggagacgacgtccgcatcgtccgtgacgacatgctgtgtgccgggaacacccggagggactcatgccagggcgactccggagggcccctggtgtgcaaggtgaatggcacctggctgcaggcgggcgtggtcagctggggcgagggctgtgcccagcccaaccggcctggcatctacacccgtgtcacctactacttggactggatccaccactatgtccccaaaaagccgtgagtcaggcctgggttggccacctgggtcactggaggaccaacccctgctgtccaaaacaccactgcttcctacccaggtggcgactgccccccacaccttccctgccccgtcctgagtgccccttcctgtcctaagccccctgctctcttctgagccccttcccctgtcctgaggacccttccctatcctgagcccccttccctgtcctaagcctgacgcctgcaccgggccctccagccctcccctgcccagatagctggtggtgggcgctaatcctcctgagtgctggacctcattaaagtgcatggaaatca

SEQ ID NO: 32949 - DNA, 963 bp, Homo sapiens
  source 1..963: mol_type = unassigned DNA
ggagcagagtggcccagcctcagactcagagcaccaagacccaggcccgcaggcctggacccaccccggtccccccgtcccagctccattcttcaccccacaatctgtagcccccagccctgccctgtgaggcccggccaggcccacgatgctcctccttgctccccagatgctgagcctgctgctgctggcgctgcccgtcctggcgagcccggcctacgtggcccctgccccaggccaggccctgcagcaaacgggcattgttggggggcaggaggcccccaggagcaagtggccctggcaggtgagcctgagagtccgcggcccatactggatgcacttctgcgggggctccctcatccacccccagtgggtgctaaccgcggcgcactgcgtggaaccggacatcaaggatctggccgccctcagggtgcaactgcgggagcagcacctctactaccaggaccagctgctgccggtcagcaggatcatcgtgcacccacagttctacatcatccagaccggggcggacatcgccctgctggagctggaggagcccgtgaacatctccagccacatccacacggtcacgctgccccctgcctcggagaccttccccccggggatgccgtgctgggtcactggctggggcgacgtggacaataatgtgcacctgccgccgccatacccgctgaaggaggtggaagtccccgtagtggaaaaccacctttgcaacgcggaatatcacaccggcctccatacgggccacagctttcaaatcgtccgcgatgacatgctgtgtgcggggagcgaaaatcacgactcctgccagggtgactctggagggcccctggtctgcaaggtgaatggcacctaactgcaggcgggcgtggtcagctgggaggagagctgtgcccagcccaaccggcctggcatctacacccgtgtcacctactacttgga

SEQ ID NO: 32950 - DNA, 827 bp, Homo sapiens
  source 1..827: mol_type = unassigned DNA
cccgctgggtagaaggaacagggagtggccaggatgctgagcctgctgctgctggcgctgcccgtcctggcgagcccggcctacgtggcccctgccccaggccaggccctgcagcaaacgggcattgttggggggcaggaggcccccaggagcaagtggccctggcaggtgagcctgagagtccgcggcccatactggatgcacttctgcgggggctccctcatccacccccagtgggtgctaaccgcggcgcactgcgtggaaccggacatcaaggatctggccgccctcagggtgcaactgcgggagcagcacctctactaccaggaccagctgctgccggtcagcaggatcatcgtgcacccacagttctacatcatccagaccggggcggacatcgccctgctggagctggaggagcccgtgaacatctccagccacatccacacggtcacgctgccccctgcctcggagaccttccccccggggatgccgtgctgggtcactggctggggcgacgtggacaataatgtgcacctgccgccgccatacccgctgaaggaggtggaagtccccgtagtggaaaaccacctttgcaacgcggaatatcacaccggcctccatacgggccacagctttcaaatcgtccgcgatgacatgctgtgtgcggggagcgaaaatcacgactcctgccagggtgactctggagggcccctggtctgcaaggtgaatggcacctaactgcaggcgggcgtggtcagctgggaggagagctgtgcccagcccaaccggcctggcatctacacccgtgtcacctactacttgga

SEQ ID NO: 32951 - DNA, 1105 bp, Homo sapiens
  source 1..1105: mol_type = unassigned DNA
ccatggcccttggggcctgtggcctcctgctgctcctggctgtgcccggtgtgtccctcaggactttgcagccagggtgtggccggccgcaggtttcggatgcaggcggccggatcgtggggggtcacgctgccccggccggcgcatggccatggcaggccagcctccgcctgcggagggtgcacgtgtgcggcgggtcactgctcagcccccagtgggtgctcacagctgcccactgcttctccgggtccctgaactcatccgactaccaggtgcacctgggggaactggagatcactctgtctccccacttctccaccgtgaggcagatcatcctgcactccagcccctcaggacagccggggaccagcggggacatcgccctggtggagctcagtgtccccgtgaccctctccagccggatcctgcccgtctgcctcccggaggcctcagatgacttctgccctgggatccggtgctgggtgaccggctggggctatacgcgggagggagagcctctgccacccccgtacagcctgcgggaggtgaaagtctccgtggtggacacagagacctgccgccgggactatcccggccccgggggcagcatccttcagcccgacatgctgtgtgcccggggccccggggatgcctgccaggacgactccggggggcctctggtctgccaggtgaacggtgcctgggtgcaggctggcactgtgagctggggtgagggctgcggccgccccaacaggccgggagtctacactcgtgtccctgcctacgtgaactggatccgccgccacatcacagcatcagggggctcagagtctgggtaccccaggctccccctcctggctggcttcttcctccccggcctcttccttctgctagtctcctgtgtcctgctggccaagtgcctgctgcacccatctgcggatggtactcccttccccgcccctgactgatggcaggaatccaagtgcatttcttaaataagttactatttattccgctccgccccctccctctcccttgagaagctgagtcttctgcatcagattattgcaacatttaacctgaatttaaaagcacacgaaacaaa

SEQ ID NO: 32952 - DNA, 1701 bp, Homo sapiens
  source 1..1701: mol_type = unassigned DNA
aaggtcaatgatagcatctgcctagagtcaaacctccgtgcttctcagacagtgccttttcaccatgagtgggtgcccatttttaggaaacaactttggatatacttttaaaaaactccccgtagaaggcagcgaagaagacaaatcacaaactggtgtgaatagagccagcaaaggaggtcttatctatgggaactacctgcatttggaaaaagttttgaatgcacaagaactgcaaagtgaaacaaaaggaaataaaatccatgatgaacatctttttatcataactcatcaagcttatgaactctggtttaagcaaatcctctgggagttggattctgttcgagagatctttcagaatggccatgtcagagatgaaaggaacatgcttaaggttgtttctcggatgcaccgagtgtcagtgatcctgaaactgctggtgcagcagttttccattctggagacgatgacagccttggacttcaatgacttcagagagtacttatctccagcatcaggcttccagagtttgcaattccgactattagaaaacaagataggtgttcttcagaacatgagagtcccttataacagaagacattatcgtgataacttcaaaggagaagaaaatgaactgctacttaaatctgagcaggaaaagacacttctggaattagtggaggcatggctggaaagaactccaggtttagagccacatggatttaacttctggggaaagcttgaaaaaaatatcaccagaggcctggaagaggaattcataaggattcaggctaaagaagagtctgaagaaaaagaggaacaggtggctgaatttcagaagcaaaaagaggtgctactgtccttatttgatgagaaacgtcatgaacatctccttagtaaaggtgaaagacggctgtcatacagagcacttcagggagcattgatgatatatttttacagggaagagcctaggttccaggtgccttttcagttgctgacttctcttatggacatagattcactgatgaccaaatggagatataaccatgtgtgcatggtgcacagaatgctgggcagcaaagctggcaccggtggttcctcaggctatcactacctgcgatcaactgtgagtgataggtacaaggtatttgtagatttatttaatctttcaacatacctgattccccgacactggataccgaagatgaacccaaccattcacaaatttctatatacagcagaatactgtgatagctcctacttcagcagtgatgaatcagattaaaatcgtctgcaaaatctatgaagaatactggtttcacagcctattttttattttctatggattttcataaatacagtttgaatatatgtatgcatatattgttcagcaccacgatgctctgatttaattctagaaacaatttgattacctcttgtttgtgacaagactaagcattaagatgagaaagaatacatttaaatagtaacattgtacatagggtgttttcctattaaaaattcagtttcccctgagacttaatgtaaccacttaatgtaatcactatctcattgtttcatctttataaacttgtaaacttcatctatttcaaatattttatgcagtacattatattattctgtacaaaggctttcaaacaaaatttttaaaataataaagtattaatctttctccctgta

SEQ ID NO: 32953 - DNA, 5325 bp, Homo sapiens
  source 1..5325: mol_type = unassigned DNA
aattctcctggctagcagttatccatctagtgcatatgtatctagagctggccaggcctttagtttacaaaataaatagaaagccttgtccccactctggaggagcttgctgccttgttagaaggtgagatatgttcgaatagaacatttggggaaaccatttgagacctggtataatgaagtgctaagattgtgggcaaggtggggaggaggtaggccttcctgactagtttaggctacaatagttgggaagactgcaagaagccagcaggcttcagtcatgccctaaaagagcgattggtttagaaaaaaaacaaaagggaactactaacatgtattctattctaggcaggtgtcaggcaaagttgtatcttattttggtctcactagattcttgcaaagcttatctgcatatccaggttttataaaaggttaagaaactgaagctcctagaagtaaatgagcccttagttatcaaatattgtctgcattgtgcaacttcttttttagcccgtagtctttgttttcatactttagttttagagaattactccaaattcatcatgattgaagacaataaggagaacaaagaccattccttagaaaggggaagagcaagtctcattttttccttaaagaatgaagttggaggacttataaaagccctgaaaatctttcaggagaagcatgtgaatctgttacatatcgagtcccgaaaatcaaaaagaagaaactcagaatttgagatttttgttgactgtgacatcaacagagaacaattgaatgatatttttcatctgctgaagtctcataccaatgttctctctgtgaatctaccagataattttactttgaaggaagatggtatggaaactgttccttggtttccaaagaagatttctgacctggaccattgtgccaacagagttctgatgtatggatctgaactagatgcagaccatcctggcttcaaagacaatgtctaccgtaaacgtcgaaagtattttgcggacttggctatgaactataaacatggagaccccattccaaaggttgaattcactgaagaggagattaagacctggggaaccgtattccaagagctcaacaaactctacccaacccatgcttgcagagagtatctcaaaaacttacctttgctttctaaatattgtggatatcgggaggataatatcccacaattggaagatgtctccaactttttaaaagagcgtacaggtttttccatccgtcctgtggctggttacttatcaccaagagatttcttatcaggtttagcctttcgagtttttcactgcactcaatatgtgagacacagttcagatcccttctataccccagagccagatacctgccatgaactcttaggtcatgtcccgcttttggctgaacctagttttgcccaattctcccaagaaattggcttggcttctcttggcgcttcagaggaggctgttcaaaaactggcaacgtgctactttttcactgtggagtttggtctatgtaaacaagatggacagctaagagtctttggtgctggcttactttcttctatcagtgaactcaaacatgcactttctggacatgccaaagtaaagccctttgatcccaagattacctgcaaacaggaatgtcttatcacaacttttcaagatgtctactttgtatctgaaagttttgaagatgcaaaggagaagatgagagaatttaccaaaacaattaagcgtccatttggagtgaagtataatccatatacacggagtattcagatcctgaaagacaccaagagcataaccagtgccatgaatgagctgcagcatgatctcgatgttgtcagtgatgcccttgctaaggtcagcaggaagccgagtatctaacagtagccagtcatccaggaacatttgagcatcaattcggaggtctgggccatctcttgctttccttgaacacctgatcctggagggacagcatcttctggccaaacaatattatcgaattccactacttaaggaatcactagtctttgaaaatttgtacctggatattctatttaccacttatttttttgtttagttttatttctttttttttttggtagcagctttaatgagacaatttatataccatacaagccactgaccacccatttttaatagagaagttgtttgacccaatagatagatctaatctcagcctaactctattttccccaatcctccttgagtaaaatgaccctttaggatcgcttagaataacttgaggagtattatggcgctgactcatattgttacctaagatccccttatttctaaagtatctgttacttattgctgaatttgtgccaagctcaatcacattcacactaaaatttaacaggagaccctgctgtctttgttgctagcatgagcaaaagtatagaggcctttgcacatggaggatacctagtaaagagcaagtagtctagtttcaagtgtagtatcttgtagggaaatgggagtagctaagcctggaaaggttgaatggggcataatcattaagactaggctaaaaattcgagactttattttttaggcattagggagccccttcccaagtgactatcttccttgaaactttgttttctttcaatgacatcacacgatactggttttattctggactatctatcctactcatgggtccaagggaaacttagtagagatgcgacttgcatggggctgtactcagacatgtggtcctaggtattataatgggattgtccccagattaacaggaagcattgttatcaaaggaagagttcaaactgagatagataagagaagcacaaagtaaaagatagaaaaaacagtgctgagtactttatttctaaggtataaggtgaggccataaacagaaaggtatgcaatgagagtagaggctgcagaaaaggggaggaaatagaatgtcagaaaggtcaagaagagtggtttaggactgagactgtaagtaatgtaaggattgccaaggaatggtttttatgcagagtcagctgtgtagcacagggagtaagcagtcctgttataaatgggtgaagctgaactccaaaatacaaacttatgtctctttaatttgcccctttcctccctctagtcactaaatgaagatgttcttcaagtttctgtctttgcacttctactctttttgccatctcttcatggggaatgtcacccagatacatgacttcagttcttattttgaatgactcctctatttgcagttataaccctgacatctttcttgaatttttttgccccttaattccaacgaactcctggatgtctatgtagatgtctcataatttaggccaatgctgtacaacttcatgtggcatcatccacatagaatgaataggggttgttcaatatgacagccctgccaagcatctcaaattgaacaggtctataaaggaactcagaatcacttgaatatcacagtccatcagcttcctttcccagtaatttaatttccattaatggtatattaaacatcgtattttcaatcatttttaggtttagtcagctacttaaaaataggctttttcttcacataaataaattgtataccatttaatgtgttttatttcaacagactaatagatcttttaacacttcttagtcctcaaaataaattattaaaaactttgtatttcatgtcatattatataaggaaatagaattttgaagaataattcatgctgttttaaatttttacattgtacattttaatagctaatcaactcttaagtatacatttgatggtaaatagatgctagctaatctagaatcatttgaaatattgattatctgatttatagtttggttgcaaggaaatctactgtaagcaaatcataatagatagcaaatcttagaacatgtagaaaaaaagaaattaaaaaaagcaaatcttagaacatgtagaaaaaggaaattaaaaaatagatagcaaataacacaaattatgcatactatatgtggttattttcatacaactttgataacggtgaagaatcatacttattgaattttaaaatgatgatgtttaaaatcactctatgactaaagcacatgagaataaatgttaaaggcacagccttataatccacaacttcagaacaatggaatttttttttttttttttttttttttttttttttttttttttttgagacggagtcttgctctgtcgcccaggctggagtgcagtggtgcgatcttggctcactgcaagctccacctcccaggttcacggcattctcctgcctctgtctcctgagtagctgggactacaggcgcccgccaccacgtccggctcattttttgtatttttagtagagacaaggtttcaccgtgttagccaggatggtttcaatctcctgacattgtgatctgcccacctcggcctcccaaagtgctgggattacaggcgtgagccactgcacccggccaaacattggaaatttttaatgatggatttcagttcttctcacctctgggtatttgtaatatttggtaaatcaggagtcctgagagtcttagaattttcatgcattttaaatatatgtcttcaaagcacctaggaatatgtaaatagttacccaaatgtgagaacagaattgaactaaaagcttcgtttataatttttttttttttttgagacagagtctcactctgttgcccaggctggagcgcagttgcgtgatttcagctcgctgcaacctgggactgcaggcgtgcttcaccatgccccgctaatttttgtttttttagtagagatggggtttcgccatgttggccaggctggtctcgaacttctgaccgcaggtgatccatccgcctcggcctcccaaagtgctgggattacaagcatgagccaccatgcccagccggttaataattcttaatcagtaaatcattattcaaagacatagttaatatcttcatgacttcttaaggatgctcaaaagctggtcttcagaatacctacatttctttatctacatattctgtcatttggagttatacaagtagtaatgacacaccaaaatgtaaataattattgttagcttttaagttggcttccaaattcaaaaaagaaaaaaatcctgaattctctaaaggaacatatgatagagtccatatgttaattcataggaagtgtttaaggtactatggtctattttggtctaatctttgttttactatgtaatatatatttatgatttacaagtttgttattcagtgggataataaatgaacacaaaattta

SEQ ID NO: 32954 - DNA, 1427 bp, Homo sapiens
  source 1..1427: mol_type = unassigned DNA
ttttagagaattactccaaattcatcatgattgaagacaataaggagaacaaagaccattccttagaaaggggaagagcaagtctcattttttccttaaagaatgaagttggaggacttataaaagccctgaaaatctttcaggagaagcatgtgaatctgttacatatcgagtcccgaaaatcaaaaagaagaaactcagaatttgagatttttgttgactgtgacatcaacagagaacaattgaatgatatttttcatctgctgaagtctcataccaatgttctctctgtgaatctaccagataattttactttgaaggaagatggtatggaaactgttccttggtttccaaagaagatttctgacctggaccattgtgccaacagagttctgatgtatggatctgaactagatgcagaccatcctggcttcaaagacaatgtctaccgtaaacgtcgaaagtattttgcggacttggctatgaactataaacatggagaccccattccaaaggttgaattcactgaagaggagattaagacctggggaaccgtattccaagagctcaacaaactctacccaacccatgcttgcagagagtatctcaaaaacttacctttgctttctaaatattgtggatatcgggaggataatatcccacaattggaagatgtctccaactttttaaaagagcgtacaggtttttccatccgtcctgtggctggttacttatcaccaagagatttcttatcaggtttagcctttcgagtttttcactgcactcaatatgtgagacacagttcagatcccttctataccccagagccagatacctgccatgaactcttaggtcatgtcccgcttttggctgaacctagttttgcccaattctcccaagaaattggcttggcttctcttggcgcttcagaggaggctgttcaaaaactggcaacgtgctactttttcactgtggagtttggtctatgtaaacaagatggacagctaagagtctttggtgctggcttactttcttctatcagtgaactcaaacatgcactttctggacatgccaaagtaaagccctttgatcccaagattacctgcaaacaggaatgtcttatcacaacttttcaagatgtctactttgtatctgaaagttttgaagatgcaaaggagaagatgagagaatttaccaaaacaattaagcgtccatttggagtgaagtataatccatatacacggagtattcagatcctgaaagacaccaagagcataaccagtgccatgaatgagctgcagcatgatctcgatgttgtcagtgatgcccttgctaagtcactaaatgaagatgttcttcaagtttctgtctttgcacttctactctttttgccatctcttcatggggaatgtcacccagatacatga

SEQ ID NO: 32955 - DNA, 2992 bp, Homo sapiens
  source 1..2992: mol_type = unassigned DNA
accgggatccatgcagccagcaatgatgatgttttccagtaaatactgggcacggagagggttttccctggattcagcagtgcccgaagagcatcagctacttggcagctcaacactaaataaacctaactctggcaaaaatgacgacaaaggcaacaagggaagcagcaaacgtgaagctgctaccgaaagtggcaagacagcagttgttttctccttgaagaatgaagttggtggattggtaaaagcactgaggctctttcaggaaaaacgtgtcaacatggttcatattgaatccaggaaatctcggcgaagaagttctgaggttgaaatctttgtggactgtgagtgtgggaaaacagaattcaatgagctcattcagttgctgaaatttcaaaccactattgtgacgctgaatcctccagagaacatttggacagaggaagaagagctagaggatgtgccctggttccctcggaagatctctgagttagacaaatgctctcacagagttctcatgtatggttctgagcttgatgctgaccacccaggatttaaggacaatgtctatcgacagagaagaaagtattttgtggatgtggccatgggttataaatatggcccaagactgttagctgctattggcgactgggaatttcagctcttttctgtatcaagttctttgagctcaagctccttgtgtatgttgagcgtgcacatattgatggatgttagatccattgttgttgctgttgatatttaatttcatgatagtttttgcagatgaaaatcacttctctagaatatgaagaggactttctgcaaggtgagaaaatagtgggaagccctatcctgtggtgcacaggacaaataaaaacaaataatttctaggagttaaatctttgttctccctgaggctccttaggtgcagtagtttattttcattacgtctcttgtaaaggcagcaccaatattaacaacgcgaacaaaacaaactaatgtttttgtttgctcccatctgaaagttccttaaggcccgtagactcatttacgaaaattcatgtgtgcaaaactcatttgcaaaagcaaataaaatatgtgatcgcaaatgctctttacctgactggcctaggggactagctgaaaatgcgtttatgcctttatgtttactctatggcgtggcttagcagtcgtggggctcctaacctcctctacagatgagtccccgtcaagccacgtatgtcagatgacttgaatgttttgaaattcaggcatcatttagatggttgttaagttgctgtactgatttgtgagtttttgtttgtaaaaaaatattattaaatcattgtgctctgtagccttggaaatgtttttgaagttcattcattacaatgttcagccaaggaaacatctctgtatttagttaagttcggacttttctgtccctttgggtttacatatgctgctttctttcctggtgaaaattttggttacaagtgtgactgagtgatgatgtctagataagggtcaggaaaactgaattgagaaaattagaaaaaagaaacccttatatgtaaattgtacataggaataattggaggctaccagaaagtttgttacaatcctgaatctttgctttttgcatagtaattgaaatatatgaggcaagacaaatacatacctgccagactctctgaggcataactattttttccctaacatttaaatctgtgttttgctttaggctgattgattgatttactcacttaacaaatattatttttttgttttgttttgttttgttttgagatagagtatctgtcatccaagctgaggtgcagtggcacgatctcagctcactgcaacctccgcctcctgggttcaagcgattctcctgcctcagtctctctagtagctggaattataggcacacgccaccatgcccggttaattttagtatttttagtatttttgtatttttagttgatgcagaatatatatatatattctggcaatatttttccagtctcagaggcataagccatcttcttgaatactcattgagtatttggctgtatattgtagacacctggatgcaggtgatactatttcatgaaggtggtaccaactaatatagtactaggtaacactatggttactggctaaaaatgagagtcatcaattactgattgaaatttctacacacctggtgtgacacctcagttgtgagacatgcaacaaatgcttgataagagttaattataaattttgtgatgatgaattttttttttaacttttactttaggtttaggggtacatgtgaaggtttgttacataggtaaacacatgtcatggggttttgttgtacatattatttcatcacccaggtgttaagcctagtacccaatagtttactttcctgctcctcaccctcctctcaccctccaccctccaggagaccccagtgtctgtggtttccttctttgtgttcataagttcttatcatttagctcccacttacaagtgagaacatgcagtatttagttttctgttccttcattagtttgctaaggataatagcctccagctccatccatgttgctgcaaaagacattatctcatttttttatggctgcatagtattccatcgtgtatatgtaccacatttttctcatgcaatctgtcactgatggacatgtaggttgattctgtgtctttgctattgtaaatagtgctgcagtgaacttccgcatgcatgtgtcttgatgatagaatgatttatattcctctgggtatatactcagtaacgggattgctaggttgaatggtaattctgcttttagctctttgatgaatggccatactgctttccacaatggttgaactaatttacactcccaccaacagtgtataagtgtttccttttctctgcaaccttgccagcatctgttatttttttgacttttaaataataaacattctgactggtgtg

SEQ ID NO: 32956 - DNA, 2360 bp, Homo sapiens
  source 1..2360: mol_type = unassigned DNA
cattgctcttcagcaccagggttctggacagcgccccaagcaggcagctgatcgcacgccccttcctctcaatctccgccagcgctgctactgcccctctagtaccccctgctgcagagaaagaatattacaccgggatccatgcagccagcaatgatgatgttttccagtaaatactgggcacggagagggttttccctggattcagcagtgcccgaagagcatcagctacttggcagctcaacactaaataaacctaactctggcaaaaatgacgacaaaggcaacaagggaagcagcaaacgtgaagctgctaccgaaagtggcaagacagcagttgttttctccttgaagaatgaagttggtggattggtaaaagcactgaggctctttcaggaaaaacgtgtcaacatggttcatattgaatccaggaaatctcggcgaagaagttctgaggttgaaatctttgtggactgtgagtgtgggaaaacagaattcaatgagctcattcagttgctgaaatttcaaaccactattgtgacgctgaatcctccagagaacatttggacagaggaagaagagctagaggatgtgccctggttccctcggaagatctctgagttagacaaatgctctcacagagttctcatgtatggttctgagcttgatgctgaccacccaggatttaaggacaatgtctatcgacagagaagaaagtattttgtggatgtggccatgggttataaatatggtcagcccattcccagggtggagtatactgaagaagaaactaaaacttggggtgttgtattccgggagctctccaaactctatcccactcatgcttgccgagagtatttgaaaaacttccctctgctgactaaatactgtggctacagagaggacaatgtgcctcaactcgaagatgtctccatgtttctgaaagaaaggtctggcttcacggtgaggccggtggctggatacctgagcccacgagactttctggcaggactggcctacagagtgttccactgtacccagtacatccggcatggctcagatcccctctacaccccagaaccagacacatgccatgaactcttgggacatgttccactacttgcggatcctaagtttgctcagttttcacaagaaataggtctggcgtctctgggagcatcagatgaagatgttcagaaactagccacgtgctatttcttcacaatcgagtttggcctttgcaagcaagaagggcaactgcgggcatatggagcaggactcctttcctccattggagaattaaagcacgccctttctgacaaggcatgtgtgaaagcctttgacccaaagacaacttgcttacaggaatgccttatcaccaccttccaggaagcctactttgtttcagaaagttttgaagaagccaaagaaaagatgagggactttgcaaagtcaattacccgtcccttctcagtatacttcaatccctacacacagagtattgaaattctgaaagacaccagaagtattgaaaatgtggtgcaggaccttcgcagcgacttgaatacagtgtgtgatgctttaaacaaaatgaaccaatatctggggatttgatgcctggaactatgttgttgccagcatgatctttttggggcttagcagcagttcagtcaatgtcatataacgcaaataaccttctgtgtcatggcttggctaataagcatgcaattccatatatctataccatcttgtaactcactgtgttagtatataaagcaccataagaaatccaatggcagataaccactcattgtatgaaataacgtattatgtttaaacatcttaaaaagatttgacattcctgcttagtgtccttaaccaaactgcatctagttaaaatttgtaacaaatagccctcttatgagtctcatttatgcccttttctttttcagatctaagcctttcctctgtgttcattagataaaatgaaaaaaagcagtgaagctgtttccattttcaatagtatcagtgttttcacgcattatttgagataaacccagaattgtaggaaacttcccatcacaataacaaaggttcaatattctatttcaaaaattgttgaggtaacacagcagttggaatgatttttaggttgagtatttacacaatgcaagaaaacacctttttacaaatggaattatgtaggttgcgttgaccttgtagaacctgagttatgacaagcttcctgaagtattttggaagatagtacttccggaaaggacattaggaaagactaaacagtggacaatcaatcttgggactatgaattttatgctggaataaagtaaattatcatgttc

SEQ ID NO: 32957 - DNA, 1616 bp, Homo sapiens
  source 1..1616: mol_type = unassigned DNA
cgcgagggcgacgcagttcgcaggcgcgtcggcgcgcctgttctggggcgcttggcttcaccgcgcaggcgcggtcgccgctgttgttgtggtccccatggagctgccgtagcggacccagcacagccaggagcgtccgggatgagctcagccgcggccgaccactgggcgtggttgctggtgctcagcttcgtgtttggatgcaatgttcttaggatcctcctcccgtccttctcatccttcatgtccagggtgctgcagaaggacgcggagcaggagtcacagatgagagcggagatccaggacatgaagcaggagctctccacagtcaacatgatggacgagtttgccagatatgccaggctggaaagaaagatcaacaagatgacggataagctcaaaacccatgtgaaagctcggacagctcaattagccaagataaaatgggtgataagtgtcgctttctacgtattgcaggctgccctgatgatctcactcatttggaagtattattctgtccctgtggctgtcgtgccgagtaaatggataacccctctagaccgcctggtagcctttcctactagagtagcaggtggtgttggaattacctgttggattttagtctgtaacaaagttgtcgctattgtgcttcatccgttcagctgaacaggaggatggatacagccgcgaggctaaaaaacggatttcctcttcctagcttaaaatctgatttacactgttttgttttttaagaaacaaaagtgcatagtttagattttttttttgttgaatatgtttgttcttggactttatgagagagtcttataagaatcacgattttctacacctgtcattgagccaagaaagtccagtttatgacacgtatgtactagtgaacaccgtcctcgatctgtacgaaatgtgaaatgtttagggacatctccatgctgtcacttgtgatttgccctcttatgtattttggtcatattgccaactggaaagtcaaaattttctaacaactttaagtaagttctttgaagacttagtgctgtttttaatccagtttagaaagtaacttaattttaataccactactaaaaattcgaaaatttcttctttaatcacattcaatatggttaaaagaacaacactaattgacattgcgtgggctttttctccctttgtttaaaatgtcatttgttgagcaagagttgtatagtattatctacttacttgaggctgttaatttttcattacagtgttttgtaaatgtatccacgagaccatgatgcattgttttgtgctcaacttgtgttttgtatttaaagcattttgaatgaagtgtattttataagcatttaatatttatgctctttagaatggaacacagaaaacaaaccttataagtcctgattaatctgaaccaataacctgtgtggcctacaaagtataattctattaaatgttccttaaaacacttttttctaattaaaatctttgcaaatgcttgtgtaacttcctgccttacagctacttgtttgctgtgagccacccgcaactgacaagtggctgttaactgagtcaccatatcccagtaaagctgaattttctcacta

SEQ ID NO: 32958 - DNA, 1464 bp, Homo sapiens
  source 1..1464: mol_type = unassigned DNA
atgcgcagacaccctcaggcgactggcgggtcgcggcttccaagctctaaatggagagttgtccctactgtgcggcaggcggaggagacctatgtccagggtgctgcagaaggacgcggagcaggagtcacagatgagagcggagatccaggacatgaagcaggagctctccacagtcaacatgatggacgagtttgccagatatgccaggctggaaagaaagatcaacaagatgacggataagctcaaaacccatgtgaaagctcggacagctcaattagccaagataaaatgggtgataagtgtcgctttctacgtattgcaggctgccctgatgatctcactcatttggaagtattattctgtccctgtggctgtcgtgccgagtaaatggataacccctctagaccgcctggtagcctttcctactagagtagcaggtggtgttggaattacctgttggattttagtctgtaacaaagttgtcgctattgtgcttcatccgttcagctgaacaggaggatggatacagccgcgaggctaaaaaacggatttcctcttcctagcttaaaatctgatttacactgttttgttttttaagaaacaaaagtgcatagtttagattttttttttgttgaatatgtttgttcttggactttatgagagagtcttataagaatcacgattttctacacctgtcattgagccaagaaagtccagtttatgacacgtatgtactagtgaacaccgtcctcgatctgtacgaaatgtgaaatgtttagggacatctccatgctgtcacttgtgatttgccctcttatgtattttggtcatattgccaactggaaagtcaaaattttctaacaactttaagtaagttctttgaagacttagtgctgtttttaatccagtttagaaagtaacttaattttaataccactactaaaaattcgaaaatttcttctttaatcacattcaatatggttaaaagaacaacactaattgacattgcgtgggctttttctccctttgtttaaaatgtcatttgttgagcaagagttgtatagtattatctacttacttgaggctgttaatttttcattacagtgttttgtaaatgtatccacgagaccatgatgcattgttttgtgctcaacttgtgttttgtatttaaagcattttgaatgaagtgtattttataagcatttaatatttatgctctttagaatggaacacagaaaacaaaccttataagtcctgattaatctgaaccaataacctgtgtggcctacaaagtataattctattaaatgttccttaaaacacttttttctaattaaaatctttgcaaatgcttgtgtaacttcctgccttacagctacttgtttgctgtgagccacccgcaactgacaagtggctgttaactgagtcaccatatcccagtaaagctgaattttctcacta

SEQ ID NO: 32959 - DNA, 699 bp, Homo sapiens
  source 1..699: mol_type = unassigned DNA
ggatcctcctcccgtccttctcatccttcgtaagtggctgcctggcctcccaagggccggtggggatgccgccccagtcccccggcgggtctggcgtagatgtccagggtgctgcagaaggacgcggagcaggagtcacagatgagagcggagatccaggacatgaagcaggagctctccacagtcaacatgatggacgagtttgccagatatgccaggctggaaagaaagatcaacaagatgacggataagctcaaaacccatgtgaaagctcggacagctcaattagccaagataaaatgggtgataagtgtcgctttctacgtattgcaggctgccctgatgatctcactcatttggaagtattattctgtccctgtggctgtcgtgccgagtaaatggataacccctctagaccgcctggtagcctttcctactagagtagcaggtggtgttggaattacctgttggattttagtctgtaacaaagttgtcgctattgtgcttcatccgttcagctgaacaggaggatggatacagccgcgaggctaaaaaacggatttcctcttcctagcttaaaatctgatttacactgttttgttttttaagaaacaaaagtgcatagtttagattttttttttgttgaatatgtttgttcttggactttatgagagagtcttataagaatcacgattttct

SEQ ID NO: 32960 - DNA, 1392 bp, Homo sapiens
  source 1..1392: mol_type = unassigned DNA
agcggacccagcacagccaggagcgtccgggatgagctcagccgcggccgaccactgggcgtggttgctggtgctcagcttcgtgtttggatgcaatgttcttaggatcctcctcccgtccttctcatccttcatgtccagggtgctgcagaaggacgcggagcaggagtcacagatgagagcggagatccaggacatgaagcaggagctctccacagtcaacatgatggacgagtttgccagatatgccaggctggaaagaaagatcaacaagatgacggataagctcaaaacccatgtgaaagctcggacagctcaattagccaagataaaatgggtgataagtgtcgctttctacgtattgcaggctgccctgatgatctcactcatttggaagtattattctgtccctgtggctgtcgtgccgagtaaatggataacccctctagaccgcctggtagcctttcctactagagtagcagtattctccagcagtatttggacttccaaatgtttctcttcccctgataaatctatattagaaaaataggcaatttagtgctgtttaaaatgaatggatctctatttcaagatggcatgtctagtacacttacgtgcaccgcctcacaagcacactgaaatgacagaaaaggacactatgaattaggacaatggactgaaaaataagcagaaaatttaaacacaccagtgaccacagtgcaactgcaactgacgatcagtttccaccaaactgcaacagagagagtggctttgccgtctgggccagctgaggactctccttggaacccaaagaagcagtttgtttccacctactcccaagagctgaagattataagccagaagcaaacaaaggcaggcaaggaaatttgaggttgttgcatctggaagtaaacatgtagctacttcttctaataaaacagagttctatcttttgatttggtctggacacctggaggtcagcaaccgagagcaggaaggaggcacagcaacaacagaacaacaacaagaggctgcgacaggggcggcgtgggtcaaaaggaagcaacctggaggacggtcctccttgcggcttggagcagagcttcaggttgggcaccacgacagagctgggccagaagtctaacacagcctgtttggaacacaacccgggatacttgtgtggttgggttcagtcagtcaagggaaacaagaagctaacccgtggctgggagtgttcatgcaatgctcgtggaatactcagcgcaaagcctgcccgcaagcacaaagggtatcaaggaagagttaaatgggaagttgggtcatggtgtggaatcatattaaggtcagcattgatggcttccggaacttagatagaaagcagtgtcttaatgc

SEQ ID NO: 32961 - DNA, 2800 bp, Homo sapiens
  source 1..2800: mol_type = unassigned DNA
aaacaagacggctccgcccttctcaagatggcgctgcactcaatgcggaaagcgcgtgagcgctggagcttcatccgggcacttcataagggatccgcagctgctcccgctctccagaaagacagcaagaagcgagtattttccggcattcaacctacaggaatcctccacctgggcaattacctgggagccattgagagctgggtgaggttacaggatgaatatgactctgtattatacagcattgttgacctccactccattactgtcccccaagacccagctgtccttcggcagagcatcctggacatgactgctgttcttcttgcctgtggcataaacccggaaaaaagcatccttttccaacaatctcaggtgtctgaacacacacaattaagttggatcctttcctgcatggtcagactacctcgattacaacatttacatcagtggaaggcaaagactaccaagcagaagcacgatggcacggtgggcctgctcacatacccagtactccaggcagccgacattctgttgtacaagtccacacacgttcctgttggggaggatcaagtccagcacatggaactagttcaggatctagcacaaggtttcaacaagaagtatggggagttctttccagtgcccgagtccattctcacatccatgaagaaggtaaaatccctacgtgatccttctgccaaaatgtcgaaatcagaccctgacaaactggccaccgtccgaataacagacagcccagaggagatagtgcagaaattccgcaaggctgtgacagacttcacctcggaggtcacctatgacccggctggccgcgctggcgtgtccaacatagtggcggtgcatgccgcggtgacggggctctccgtggaggaagtggtgcgccgcagcgcgggcatgaacactgctcgctacaagctggccgtggcagatgctgtgattgagaagtttgccccaattaagcgtgaaattgaaaaactgaagctggacaaggaccatttagagaaggttttacaaattggatcagcaaaagccaaagaattagcatacactgtgtgccaggaggtgaagaaattggtgggttttctataggaagtttcaacgaatcacagcaaggcttttgtgccttgcactccatgcattctgataacggcagctttcctaaaaagaaaaagttatagttttgggacatttaatttggtatagctgattattggctttatttgatgaatattgctttgtagctttgaaatacgacagtgttccaaatcccatcaacaaaatgctgtgaacaacaacaacaaaaaataaatcaagaaggcatagctgtctgaatccccaattattgaggcacactccttggcctgcagaaatgtgattgaagtaaggagtaatttgggaaatggagtatcatttgtgcttctctctggagtacttactgtaacagatgcacacgttatctacttcaacccttttataaagcaatatatagaggtcttagatgtataatccttgagatgccatttgatcagatgccaatttgtattcagagctcataaaaacaagtccattcttatagtttgtttgtcactgagacggtgcctgatttaatatatttaagctgcttaacttgttttccaagagataacaccaactgttccagcaataatttgttttttaattcagagatatgggatatgatcttctaaggaggttgcattattttgacctgatttatttattgtacaagagcccaagtccctgaattatattcttaataagtgctttcttgcattcatttcagtttagtctcaccaaccccctatgaattaggagaattattgtcattttacacatgaggaaagtgaggctgagagaatccaattagcttgtacgatatcactccataagagaagcaaatctgagagtaaaacccttaccccttattcttaagaatagtgcttgtttattcagtacaaaaaaaatgctgaaaggcagcgttttttagactctaaacattctgattttgaaggtgggtgttggaacgactgatgatgttttttatatcatcaattcagccaatggatgcgaacttaaaatctggattcacagaaccgtggtcacatttccccatcaaaatccccaaggcgggtcccaagttctctcctctacgctcattgcagaaatactttgaaataggttctgccagtctacaatagcagtgaagactgacaaatcagatattcccaatgactgacagcttctcatcttgcctctacctcagttaagtaatgtcaccctgaaacctagcttttctgcacttccatttctgacacctgaaaatgaaaatgataatcctaacttatacaccaagacctgttagcaagatcgattttgtaacagaaattgcttataagttttttatcagtaaggaccatgatcaccatttgtacatacataactaggttgttgagcaaagcatttttgctcatgtttcttaaggaagtagagtagtccttgtgtcagaacacatgttaatccacaaaacgccccatcccagattccaaattaaaacatcgtttttaggattcttggagctagcctggatcatgggtaaaggaaacattttgccttttgtatcttatactggaatgggatgtctgtaagtcctagaacctctttgagcatatttcttacaagcctctgttttttcccctttaaaggaaactttgaaaggattgtgaatactggaaaatgacaaaactaaaggtagatctatcaa

SEQ ID NO: 32962 - DNA, 2811 bp, Homo sapiens
  source 1..2811: mol_type = unassigned DNA
caagatggcgctgcactcaatgcggaaagcgcgtgagcgctggagcttcatccgggcacttcataagggatccgcagctgctcccgctctccagaaagacagcaagaagcgagtattttccggcattcaacctacaggaatcctccacctgggcaattacctgggagccattgagagctgggtgaggttacaggatgaatatgactctgtattatacagcattgttgacctccactccattactgtcccccaagacccagctgtccttcggcagagcatcctggacatgactgctgttcttcttgcctgtggcataaacccggaaaaaagcatccttttccaacaatctcaggtgtctgaacacacacaattaagttggatcctttcctgcatggtcagactacctcgattacaacatttacatcagtggaaggcaaagactaccaagcagaagcacgatggcacggtgggcctgctcacatacccagtactccaggcagccgacattctgttgtacaagtccacacacgttcctgttggggaggatcaagtccagcacatggaactagttcaggatctagcacaaggtttcaacaagaagtatggggagttctttccagtgcccgagtccattctcagtatgtgtgtgttggtgtttttaacctagcatccatgaagaaggtaaaatccctacgtgatccttctgccaaaatgtcgaaatcagaccctgacaaactggccaccgtccgaataacagacagcccagaggagatagtgcagaaattccgcaaggctgtgacagacttcacctcggaggtcacctatgacccggctggccgcgctggcgtgtccaacatagtggcggtgcatgccgcggtgacggggctctccgtggaggaagtggtgcgccgcagcgcgggcatgaacactgctcgctacaagctggccgtggcagatgctgtgattgagaagtttgccccaattaagcgtgaaattgaaaaactgaagctggacaaggaccatttagagaaggttttacaaattggatcagcaaaagccaaagaattagcatacactgtgtgccaggaggtgaagaaattggtgggttttctataggaagtttcaacgaatcacagcaaggcttttgtgccttgcactccatgcattctgataacggcagctttcctaaaaagaaaaagttatagttttgggacatttaatttggtatagctgattattggctttatttgatgaatattgctttgtagctttgaaatacgacagtgttccaaatcccatcaacaaaatgctgtgaacaacaacaacaaaaaataaatcaagaaggcatagctgtctgaatccccaattattgaggcacactccttggcctgcagaaatgtgattgaagtaaggagtaatttgggaaatggagtatcatttgtgcttctctctggagtacttactgtaacagatgcacacgttatctacttcaacccttttataaagcaatatatagaggtcttagatgtataatccttgagatgccatttgatcagatgccaatttgtattcagagctcataaaaacaagtccattcttatagtttgtttgtcactgagacggtgcctgatttaatatatttaagctgcttaacttgttttccaagagataacaccaactgttccagcaataatttgttttttaattcagagatatgggatatgatcttctaaggaggttgcattattttgacctgatttatttattgtacaagagcccaagtccctgaattatattcttaataagtgctttcttgcattcatttcagtttagtctcaccaaccccctatgaattaggagaattattgtcattttacacatgaggaaagtgaggctgagagaatccaattagcttgtacgatatcactccataagagaagcaaatctgagagtaaaacccttaccccttattcttaagaatagtgcttgtttattcagtacaaaaaaaatgctgaaaggcagcgttttttagactctaaacattctgattttgaaggtgggtgttggaacgactgatgatgttttttatatcatcaattcagccaatggatgcgaacttaaaatctggattcacagaaccgtggtcacatttccccatcaaaatccccaaggcgggtcccaagttctctcctctacgctcattgcagaaatactttgaaataggttctgccagtctacaatagcagtgaagactgacaaatcagatattcccaatgactgacagcttctcatcttgcctctacctcagttaagtaatgtcaccctgaaacctagcttttctgcacttccatttctgacacctgaaaatgaaaatgataatcctaacttatacaccaagacctgttagcaagatcgattttgtaacagaaattgcttataagttttttatcagtaaggaccatgatcaccatttgtacatacataactaggttgttgagcaaagcatttttgctcatgtttcttaaggaagtagagtagtccttgtgtcagaacacatgttaatccacaaaacgccccatcccagattccaaattaaaacatcgtttttaggattcttggagctagcctggatcatgggtaaaggaaacattttgccttttgtatcttatactggaatgggatgtctgtaagtcctagaacctctttgagcatatttcttacaagcctctgttttttcccctttaaaggaaactttgaaaggattgtgaatactggaaaatgacaaaactaaaggtagatctatcaagccaa

SEQ ID NO: 32963 - DNA, 1508 bp, Homo sapiens
  source 1..1508: mol_type = unassigned DNA
cttgccgccacctccagttctgggagcggagcgccgccgctgttgccgggcaacgcgaaagacagcaagaagcgagtattttccggcattcaacctacaggaatcctccacctgggcaattacctgggagccattgagagctgggtgaggttacaggatgaatatgactctgtattatacagcattgttgacctccactccattactgtcccccaagacccagctgtccttcggcagagcatcctggacatgactgctgttcttcttgcctgtggcataaacccggaaaaaagcatccttttccaacaatctcaggtgtctgaacacacacaattaagttggatcctttcctgcatggtcagactacctcgattacaacatttacatcagtggaaggcaaagactaccaagcagaagcacgatggcacggtgggcctgctcacatacccagtactccaggcagccgacattctgttgtacaagtccacacacgttcctgttggggaggatcaagtccagcacatggaactagttcaggatctagcacaaggtttcaacaagaagtatggggagttctttccagtgcccgagtccattctcacatccatgaagaaggtaaaatccctacgtgatccttctgccaaaatgtcgaaatcagaccctgacaaactggccaccgtccgaataacagacagcccagaggagatagtgcagaaattccgcaaggctgtgacagacttcacctcggaggtcacctatgacccggctggccgcgctggcgtgtccaacatagtggcggtgcatgccgcggtgacggggctctccgtggaggaagtggtgcgccgcagcgcgggcatgaacactgctcgctacaagctggccgtggcagatgctgtgattgagaagtttgccccaattaagcgtgaaattgaaaaactgaagctggacaaggaccatttagagaaggttttacaaattggatcagcaaaagccaaagaattagcatacactgtgtgccaggaggtgaagaaattggtgggttttctataggaagtttcaacgaatcacagcaaggcttttgtgccttgcactccatgcattctgataacggcagctttcctaaaaagaaaaagttatagttttgggacatttaatttggtatagctgattattggctttatttgatgaatattgctttgtagctttgaaatacgacagtgttccaaatcccatcaacaaaatgctgtgaacaacaacaacaaaaaataaatcaagaaggcatagctgtctgaatccccaattattgaggcacactccttggcctgcagaaatgtgattgaagtaaggagtaatttgggaaatggagtatcatttgtgcttctctctggagtacttactgtaacagatgcacacgttatctacttcaacccttttataaagcaatatatagaggtcttagatgtataatccttgagatgccatttgatcagatgccaatttgtattcag

SEQ ID NO: 32964 - DNA, 2690 bp, Homo sapiens
  source 1..2690: mol_type = unassigned DNA
caatgaccagctaatggctcgattctcaagagggtttcattggtctcaacctggccccccaggcaacccacccctgattggacagtctcatcaagaaggttggtcaagagctcaagtgtttctgagaatctgggtgatttataagaaacccttagctgaatgcagggtggggagaacgaaagacaaaagcatcttttttcagaagggaaactgaaagaaagaggggaagagtattaaagaccatttctggctgggcagggcactctcagcagctcaactgcccagcgtgaccagtggccacctctgcagtgtcttccacaacctgggatgaaattgattctgcagtaaagatgttggtgtcattaaaaatgagctacaaagctgccgcgggggaggattacaaggctgactgtcctccagggaacccagcacctaccagtaatcatggcccagatgccacagaagctgaagaggattttgtggacccatggacagtacagacaagcagtgcaaaaggcatagactacgataagctcattgttcggtttggaagtagtaaaattgacaaagagctaataaaccgaatagagagagccaccggccaaagaccacaccacttcctgcgcagaggcatcttcttctcacacagagatatgaatcaggttcttgatgcctatgaaaataagaagccattttatctgtacacgggccggggcccctcttctgaagcaatgcatgtaggtcacctcattccatttattttcacaaagtggctccaggatgtatttaacgtgcccttggtcatccagatgacggatgacgagaagtatctgtggaaggacctgaccctggaccaggcctatagctatgctgtggagaatgccaaggacatcatcgcctgtggctttgacatcaacaagactttcatattctctgacctggactacatggggatgagctcaggtttctacaaaaatgtggtgaagattcaaaagcatgttaccttcaaccaagtgaaaggcattttcggcttcactgacagcgactgcattgggaagatcagttttcctgccatccaggctgctccctccttcagcaactcattcccacagatcttccgagacaggacggatatccagtgccttatcccatgtgccattgaccaggatccttactttagaatgacaagggacgtcgcccccaggatcggctatcctaaaccagccctgctgcactccaccttcttcccagccctgcagggcgcccagaccaaaatgagtgccagcgaccccaactcctccatcttcctcaccgacacggccaagcagatcaaaaccaaggtcaataagcatgcgttttctggagggagagacaccatcgaggagcacaggcagtttgggggcaactgtgatgtggacgtgtctttcatgtacctgaccttcttcctcgaggacgacgacaagctcgagcagatcaggaaggattacaccagcggagccatgctcaccggtgagctcaagaaggcactcatagaggttctgcagcccttgatcgcagagcaccaggcccggcgcaaggaggtcacggatgagatagtgaaagagttcatgactccccggaagctgtccttcgactttcagtagcactcgttttacatatgcttataaaagaagtgatgtatcagtaatgtatcaataatcccagcccagtcaaagcaccgccacctgtaggcttctgtctcatggtaattactgggcctggcctctgtaagcctgtgtatgttatcaatactgtttcttcctgtgagttccattatttctatctcttatgggcaaagcattgtgggtaattggtgctggctaacattgcatggtcggatagagaagtccagctgtgagtctctccccaaagcagccccacagtggagcctttggctggaagtccatgggccaccctgttcttgtccatggaggactccgagggttccaagtatactcttaagacccactctgtttaaaaatatatattctatgtatgcgtatatggaattgaaatgtcattattgtaacctagaaagtgctttgaaatattgatgtggggaggtttattgagcacaagatgtatttcagcccatgccccctcccaaaaagaaattgataagtaaaagcttcgttatacatttgactaagaaatcacccagctttaaagctgcttttaacaatgaagattgaacagagttcagcaattttgattaaattaagacttgggggtgaaactttccagtttactgaactccagaccatgcatgtagtccactccagaaatcatgctcgcttcccttggcacaccagtgttctcctgccaaatgaccctagaccctctgtcctgcagagtcagggtggcttttcccctgactgtgtccgatgccaaggagtcctggcctccgcagatgcttcattttgacccttggctgcagtggaagtcagcacagagcagtgccctggctgtgtccctggacgggtggacttagctagggagaaagtcgaggcagcagccctcgaggccctcacagatgtctaggcaggcctcatttcatcacgcagcatgtgcaggcctggaagagcaaagccaaatctcagggaagtccttggttgatgtatctgggtctcctctggagcactctgccctcc

SEQ ID NO: 32965 - DNA, 3092 bp, Homo sapiens
  source 1..3092: mol_type = unassigned DNA
tgtcaagccctatgctgggtctggtgtgggtggaaatcaaacacaaaacacagatccccccggaggccccagagcgatgaaagcaacaaacaagatacgaccagagatgggttttgaaggatgaataggagttagctgagctgtcaatagtaagaagtaaggttggtccaaggcacagcgctttctgaaggaacaggaagtgaaaggaaggcgagcggctatgagagaccgcgttaagcggcacggggcgctttaggcgctgcccagtcccggcccctccagcccggggcccgccgctcaccacacgcaccggaagcgctcggttctcccggaggcagaccggccagcacactaccatccagtcacgttccgacgcgacgccgcggccgccagccaatcagtggcggcctctgccccgcccccgcgcgaacagccaatgacggcgccgtcgggccggaagttgttccgtccggacggcgtttccacggacgcccaggagacagccggttgctgagccgggagcgctgactggcccggctgggcaggtcttgactcgtctgctgaacaaatcctctgacctcaggccggctgtgaacgtagttcctgagagatagcaaacatgcccaacagtgagcccgcatctctgctggagctgttcaacagcatcgccacacaaggggagctcgtaaggtccctcaaagcgggaaatgcgtcaaaggatgaaattgattctgcagtaaagatgttggtgtcattaaaaatgagctacaaagctgccgcgggggaggattacaaggctgactgtcctccagggaacccagcacctaccagtaatcatggcccagatgccacagaagctgaagaggattttgtggacccatggacagtacagacaagcagtgcaaaaggcatagactacgataagctcattgttcggtttggaagtagtaaaattgacaaagagctaataaaccgaatagagagagccaccggccaaagaccacaccacttcctgcgcagaggcatcttcttctcacacagagatatgaatcaggttcttgatgcctatgaaaataagaagccattttatctgtacacgggccggggcccctcttctgaagcaatgcatgtaggtcacctcattccatttattttcacaaagtggctccaggatgtatttaacgtgcccttggtcatccagatgacggatgacgagaagtatctgtggaaggacctgaccctggaccaggcctatagctatgctgtggagaatgccaaggacatcatcgcctgtggctttgacatcaacaagactttcatattctctgacctggactacatggggatgagctcaggtttctacaaaaatgtggtgaagattcaaaagcatgttaccttcaaccaagtgaaaggcattttcggcttcactgacagcgactgcattgggaagatcagttttcctgccatccaggctgctccctccttcagcaactcattcccacagatcttccgagacaggacggatatccagtgccttatcccatgtgccattgaccaggatccttactttagaatgacaagggacgtcgcccccaggatcggctatcctaaaccagccctgctgcactccaccttcttcccagccctgcagggcgcccagaccaaaatgagtgccagcgaccccaactcctccatcttcctcaccgacacggccaagcagatcaaaaccaaggtcaataagcatgcgttttctggagggagagacaccatcgaggagcacaggcagtttgggggcaactgtgatgtggacgtgtctttcatgtacctgaccttcttcctcgaggacgacgacaagctcgagcagatcaggaaggattacaccagcggagccatgctcaccggtgagctcaagaaggcactcatagaggttctgcagcccttgatcgcagagcaccaggcccggcgcaaggaggtcacggatgagatagtgaaagagttcatgactccccggaagctgtccttcgactttcagtagcactcgttttacatatgcttataaaagaagtgatgtatcagtaatgtatcaataatcccagcccagtcaaagcaccgccacctgtaggcttctgtctcatggtaattactgggcctggcctctgtaagcctgtgtatgttatcaatactgtttcttcctgtgagttccattatttctatctcttatgggcaaagcattgtgggtaattggtgctggctaacattgcatggtcggatagagaagtccagctgtgagtctctccccaaagcagccccacagtggagcctttggctggaagtccatgggccaccctgttcttgtccatggaggactccgagggttccaagtatactcttaagacccactctgtttaaaaatatatattctatgtatgcgtatatggaattgaaatgtcattattgtaacctagaaagtgctttgaaatattgatgtggggaggtttattgagcacaagatgtatttcagcccatgccccctcccaaaaagaaattgataagtaaaagcttcgttatacatttgactaagaaatcacccagctttaaagctgcttttaacaatgaagattgaacagagttcagcaattttgattaaattaagacttgggggtgaaactttccagtttactgaactccagaccatgcatgtagtccactccagaaatcatgctcgcttcccttggcacaccagtgttctcctgccaaatgaccctagaccctctgtcctgcagagtcagggtggcttttcccctgactgtgtccgatgccaaggagtcctggcctccgcagatgcttcattttgacccttggctgcagtggaagtcagcacagagcagtgccctggctgtgtccctggacgggtggacttagctagggagaaagtcgaggcagcagccctcgaggccctcacagatgtctaggcaggcctcatttcatcacgcagcatgtgcaggcctggaagagcaaagccaaatctcagggaagtccttggttgatgtatctgggtctcctctggagcactctgccctcctgtcacccag

SEQ ID NO: 32966 - DNA, 2466 bp, Homo sapiens
  source 1..2466: mol_type = unassigned DNA
cggacggcgtttccacggacgcccaggagacagccggttgctgagccgggagcgctgactggcccggctgggcagggatgaaattgattctgcagtaaagatgttggtgtcattaaaaatgagctacaaagctgccgcgggggaggattacaaggctgactgtcctccagggaacccagcacctaccagtaatcatggcccagatgccacagaagctgaagaggattttgtggacccatggacagtacagacaagcagtgcaaaaggcatagactacgataagctcattgttcggtttggaagtagtaaaattgacaaagagctaataaaccgaatagagagagccaccggccaaagaccacaccacttcctgcgcagaggcatcttcttctcacacagagatatgaatcaggttcttgatgcctatgaaaataagaagccattttatctgtacacgggccggggcccctcttctgaagcaatgcatgtaggtcacctcattccatttattttcacaaagtggctccaggatgtatttaacgtgcccttggtcatccagatgacggatgacgagaagtatctgtggaaggacctgaccctggaccaggcctatagctatgctgtggagaatgccaaggacatcatcgcctgtggctttgacatcaacaagactttcatattctctgacctggactacatggggatgagctcaggtttctacaaaaatgtggtgaagattcaaaagcatgttaccttcaaccaagtgaaaggcattttcggcttcactgacagcgactgcattgggaagatcagttttcctgccatccaggctgctccctccttcagcaactcattcccacagatcttccgagacaggacggatatccagtgccttatcccatgtgccattgaccaggatccttactttagaatgacaagggacgtcgcccccaggatcggctatcctaaaccagccctgctgcactccaccttcttcccagccctgcagggcgcccagaccaaaatgagtgccagcgaccccaactcctccatcttcctcaccgacacggccaagcagatcaaaaccaaggtcaataagcatgcgttttctggagggagagacaccatcgaggagcacaggcagtttgggggcaactgtgatgtggacgtgtctttcatgtacctgaccttcttcctcgaggacgacgacaagctcgagcagatcaggaaggattacaccagcggagccatgctcaccggtgagctcaagaaggcactcatagaggttctgcagcccttgatcgcagagcaccaggcccggcgcaaggaggtcacggatgagatagtgaaagagttcatgactccccggaagctgtccttcgactttcagtagcactcgttttacatatgcttataaaagaagtgatgtatcagtaatgtatcaataatcccagcccagtcaaagcaccgccacctgtaggcttctgtctcatggtaattactgggcctggcctctgtaagcctgtgtatgttatcaatactgtttcttcctgtgagttccattatttctatctcttatgggcaaagcattgtgggtaattggtgctggctaacattgcatggtcggatagagaagtccagctgtgagtctctccccaaagcagccccacagtggagcctttggctggaagtccatgggccaccctgttcttgtccatggaggactccgagggttccaagtatactcttaagacccactctgtttaaaaatatatattctatgtatgcgtatatggaattgaaatgtcattattgtaacctagaaagtgctttgaaatattgatgtggggaggtttattgagcacaagatgtatttcagcccatgccccctcccaaaaagaaattgataagtaaaagcttcgttatacatttgactaagaaatcacccagctttaaagctgcttttaacaatgaagattgaacagagttcagcaattttgattaaattaagacttgggggtgaaactttccagtttactgaactccagaccatgcatgtagtccactccagaaatcatgctcgcttcccttggcacaccagtgttctcctgccaaatgaccctagaccctctgtcctgcagagtcagggtggcttttcccctgactgtgtccgatgccaaggagtcctggcctccgcagatgcttcattttgacccttggctgcagtggaagtcagcacagagcagtgccctggctgtgtccctggacgggtggacttagctagggagaaagtcgaggcagcagccctcgaggccctcacagatgtctaggcaggcctcatttcatcacgcagcatgtgcaggcctggaagagcaaagccaaatctcagggaagtccttggttgatgtatctgggtctcctctggagcactctgccctcctgtcacccagtagagtaaataaactt

SEQ ID NO: 32967 - DNA, 2938 bp, Homo sapiens
  source 1..2938: mol_type = unassigned DNA
atttggaggccagcggggggtgaggggtggctgatgcaatgaccagctaatggctcgattctcaagagggtttcattggtctcaacctggccccccaggcaacccacccctgattggacagtctcatcaagaaggttggtcaagagctcaagtgtttctgagaatctgggtgatttataagaaacccttagctgaatgcagggtggggagaacgaaagacaaaagcatcttttttcagaagggaaactgaaagaaagaggggaagagtattaaagaccatttctggctgggcagggcactctcagcagctcaactgcccagcgtgaccagtggccacctctgcagtgtcttccacaacctggtcttgactcgtctgctgaacaaatcctctgacctcaggccggctgtgaacgtagttcctgagagatagcaaacatgcccaacagtgagcccgcatctctgctggagctgttcaacagcatcgccacacaaggggagctcgtaaggtccctcaaagcgggaaatgcgtcaaaggatgaaattgattctgcagtaaagatgttggtgtcattaaaaatgagctacaaagctgccgcgggggaggattacaaggctgactgtcctccagggaacccagcacctaccagtaatcatggcccagatgccacagaagctgaagaggattttgtggacccatggacagtacagacaagcagtgcaaaaggcatagactacgataagctcattgttcggtttggaagtagtaaaattgacaaagagctaataaaccgaatagagagagccaccggccaaagaccacaccacttcctgcgcagaggcatcttcttctcacacagagatatgaatcaggttcttgatgcctatgaaaataagaagccattttatctgtacacgggccggggcccctcttctgaagcaatgcatgtaggtcacctcattccatttattttcacaaagtggctccaggatgtatttaacgtgcccttggtcatccagatgacggatgacgagaagtatctgtggaaggacctgaccctggaccaggcctatagctatgctgtggagaatgccaaggacatcatcgcctgtggctttgacatcaacaagactttcatattctctgacctggactacatggggatgagctcaggtttctacaaaaatgtggtgaagattcaaaagcatgttaccttcaaccaagtgaaaggcattttcggcttcactgacagcgactgcattgggaagatcagttttcctgccatccaggctgctccctccttcagcaactcattcccacagatcttccgagacaggacggatatccagtgccttatcccatgtgccattgaccaggatccttactttagaatgacaagggacgtcgcccccaggatcggctatcctaaaccagccctgctgcactccaccttcttcccagccctgcagggcgcccagaccaaaatgagtgccagcgaccccaactcctccatcttcctcaccgacacggccaagcagatcaaaaccaaggtcaataagcatgcgttttctggagggagagacaccatcgaggagcacaggcagtttgggggcaactgtgatgtggacgtgtctttcatgtacctgaccttcttcctcgaggacgacgacaagctcgagcagatcaggaaggattacaccagcggagccatgctcaccggtgagctcaagaaggcactcatagaggttctgcagcccttgatcgcagagcaccaggcccggcgcaaggaggtcacggatgagatagtgaaagagttcatgactccccggaagctgtccttcgactttcagtagcactcgttttacatatgcttataaaagaagtgatgtatcagtaatgtatcaataatcccagcccagtcaaagcaccgccacctgtaggcttctgtctcatggtaattactgggcctggcctctgtaagcctgtgtatgttatcaatactgtttcttcctgtgagttccattatttctatctcttatgggcaaagcattgtgggtaattggtgctggctaacattgcatggtcggatagagaagtccagctgtgagtctctccccaaagcagccccacagtggagcctttggctggaagtccatgggccaccctgttcttgtccatggaggactccgagggttccaagtatactcttaagacccactctgtttaaaaatatatattctatgtatgcgtatatggaattgaaatgtcattattgtaacctagaaagtgctttgaaatattgatgtggggaggtttattgagcacaagatgtatttcagcccatgccccctcccaaaaagaaattgataagtaaaagcttcgttatacatttgactaagaaatcacccagctttaaagctgcttttaacaatgaagattgaacagagttcagcaattttgattaaattaagacttgggggtgaaactttccagtttactgaactccagaccatgcatgtagtccactccagaaatcatgctcgcttcccttggcacaccagtgttctcctgccaaatgaccctagaccctctgtcctgcagagtcagggtggcttttcccctgactgtgtccgatgccaaggagtcctggcctccgcagatgcttcattttgacccttggctgcagtggaagtcagcacagagcagtgccctggctgtgtccctggacgggtggacttagctagggagaaagtcgaggcagcagccctcgaggccctcacagatgtctaggcaggcctcatttcatcacgcagcatgtgcaggcctggaagagcaaagccaaatctcagggaagtccttggttgatgtatctgggtctcctctggagcactctgccctcctgtcacccagtagagtaaataaacttccttggctcctgct

SEQ ID NO: 32968 - DNA, 801 bp, Homo sapiens
  source 1..801: mol_type = unassigned DNA
aatgaccagctaatggctcgattctcaagagggtttcattggtctcaacctggccccccaggcaacccacccctgattggacagtctcatcaagaaggatgaaattgattctgcagtaaagatgttggtgtcattaaaaatgagctacaaagctgccgcgggggaggattacaaggctgactgtcctccagggaacccagcacctaccagtaatcatggcccagatgccacagaagctgaagaggattttgtggacccatggacagtacagacaagcagtgcaaaaggcatagactacgataagctcattgttcggtttggaagtagtaaaattgacaaagagctaataaaccgaatagagagagccaccggccaaagaccacaccacttcctgcgcagaggcatcttcttctcacacagagatatgaatcaggttcttgatgcctatgaaaataagaagccattttatctgtacacgggccggggcccctcttctgaagcaatgcatgtaggtcacctcattccatttattttcacaaagtggctccaggatgtatttaacgtgcccttggtcatccagatgacggatgacgagaagtatctgtggaaggacctgaccctggaccaggcctatagctatgctgtggagaatgccaaggacatcatcgcctgtggctttgacatcaacaagactttcatattctctgacctggactacatggggatgagctcaggtttctacaaaaatgtggtgaagattcaaaagcatgttaccttcaaccaagtgaaaggcattttcgg

SEQ ID NO: 32969 - DNA, 568 bp, Homo sapiens
  source 1..568: mol_type = unassigned DNA
aggagacagccggttgctgagccgggagcgctgactggcccggctgggcaggggaaactgaaagaaagaggggaagagtattaaagaccatttctggctgggcagggcactctcagcagctcaactgcccagcgtgaccagtggccacctctgcagtgtcttccacaacctggtcttgactcgtctgctgaacaaatcctctgacctcaggccggctgtgaacgtagttcctgagagatagcaaacatgcccaacagtgagcccgcatctctgctggagctgttcaacagcatcgccacacaaggggagctcgtaaggtccctcaaagcgggaaatgcgtcaaaggatgaaattgattctgcagtaaagatgttggtgtcattaaaaatgagctacaaagctgccgcgggggaggattacaaggctgactgtcctccagggaacccagcacctaccagtaatcatggcccagatgccacagaagctgaagaggattttgtggacccatggacagtacagacaagcagtgcaaaaggcatagactacgataagctcattgttcggtttg

SEQ ID NO: 32970 - DNA, 707 bp, Homo sapiens
  source 1..707: mol_type = unassigned DNA
ggacggcgtttccacggacgcccaggagacagccggttgctgagccgggagcgctgactggcccggctgggcagggtgaatctacttctcttaacaaagtctcaatgtcctatttgcaatttatgtggtaaacactgaagacaatggtccttaaccttttggcatctcagcctcctttcgaaagtcttgactcgtctgctgaacaaatcctctgacctcaggccggctgtgaacgtagttcctgagagatagcaaacatgcccaacagtgagcccgcatctctgctggagctgttcaacagcatcgccacacaaggggagctcgtaaggtccctcaaagcgggaaatgcgtcaaaggatgaaattgattctgcagtaaagatgttggtgtcattaaaaatgagctacaaagctgccgcgggggaggattacaaggctgactgtcctccagggaacccagcacctaccagtaatcatggcccagatgccacagaagctgaagaggattttgtggacccatggacagtacagacaagcagtgcaaaaggcatagactacgataagctcattgttcggtttggaagtagtaaaattgacaaagagctaataaaccgaatagagagagccaccggccaaagaccacaccacttcctgcgcagaggcatcttcttctcacacagagatatgaatcaggttcttgatgcctat

SEQ ID NO: 32971 - DNA, 591 bp, Homo sapiens
  source 1..591: mol_type = unassigned DNA
aatgaccagctaatggctcgattctcaagagggtttcattggtctcaacctggccccccaggcaacccacccctgattggacagtctcatcaagaagagtgtactatttgttaaacaggtgaatctacttctcttaacaaagtctcaatgtcctatttgcaatttatgtggtaaacactgaagacaatggtccttaaccttttggcatctcagcctcctttcgaaagtcttgactcgtctgctgaacaaatcctctgacctcaggccggctgtgaacgtagttcctgagagatagcaaacatgcccaacagtgagcccgcatctctgctggagctgttcaacagcatcgccacacaaggggagctcgtaaggtccctcaaagcgggaaatgcgtcaaaggatgaaattgattctgcagtaaagatgttggtgtcattaaaaatgagctacaaagctgccgcgggggaggattacaaggctgactgtcctccagggaacccagcacctaccagtaatcatggcccagatgccacagaagctgaagaggattttgtggacccatggacagtacagacaagcagtgcaaaaggc

SEQ ID NO: 32972 - DNA, 572 bp, Homo sapiens
  source 1..572: mol_type = unassigned DNA
agacagccggttgctgagccgggagcgctgactggcccggctgggcagggcaacccacccctgattggacagtctcatcaagaaggttggtcaagagctcaagtgtttctgagaatctgggtgatttataagaaacccttagctgaatgcagggtggggagaacgaaagacaaaagcatcttttttcagaagggaaactgaaagaaagaggggaagagtattaaagaccatttctggctgggcagggcactctcagcagctcaactgcccagcgtgaccagtggccacctctgcagtgtcttccacaacctgggtgaatctacttctcttaacaaagtctcaatgtcctatttgcaatttatgtggtaaacactgaagacaatggtccttaaccttttggcatctcagcctcctttcgaaagtcttgactcgtctgctgaacaaatcctctgacctcaggccggctgtgaacgtagttcctgagagatagcaaacatgcccaacagtgagcccgcatctctgctggagctgttcaacagcatcgccacacaaggggagctcgtaaggtccct

SEQ ID NO: 32973 - DNA, 562 bp, Homo sapiens
  source 1..562: mol_type = unassigned DNA
gagacagccggttgctgagccgggagcgctgactggcccggctgggcaggaagggaaactgaaagaaagaggggaagagtattaaagaccatttctggctgggcagggcactctcagcagctcaactgcccagcgtgaccagtggccacctctgcagtgtcttccacaacctggtcttgactcgtctgctgaacaaatcctctgacctcaggccggctgtgaacgtagttcctgagagatagcaaacatgcccaacagtgagcccgcatctctgctggagctgttcaacagcatcgccacacaaggggagctcgtaaggtccctcaaagcgggaaatgcgtcaaaggatgaaattgattctgcagtaaagatgttggtgtcattaaaaatgagctacaaagctgccgcgggggaggattacaaggctgactgtcctccagggaacccagcacctaccagtaatcatggcccagatgccacagaagctgaagaggattttgtggacccatggacagtacagacaagcagtgcaaaaggcatagactacgataagctcattgtt

SEQ ID NO: 32974 - DNA, 530 bp, Homo sapiens
  source 1..530: mol_type = unassigned DNA
gatgcggggaatttacagtttctctttccaccgcccacgactacacaaaatcagtcacactgacgctgagggtggggaacgggaagagggtggggaggttatttggaggccagcggggggtgaggggtggctgatgcaatgaccagctaatggctcgattctcaagagggtttcattggtctcaacctggccccccaggcaacccacccctgattggacagtctcatcaagaagaagggaaactgaaagaaagaggggaagagtattaaagaccatttctggctgggcagggcactctcagcagctcaactgcccagcgtgaccagtggccacctctgcagtgtcttccacaacctggtcttgactcgtctgctgaacaaatcctctgacctcaggccggctgtgaacgtagttcctgagagatagcaaacatgcccaacagtgagcccgcatctctgctggagctgttcaacagcatcgccacacaaggggagctcgtaaggtccctcaaagcgggaaatgcgtcaaag

SEQ ID NO: 32975 - DNA, 560 bp, Homo sapiens
  source 1..560: mol_type = unassigned DNA
gagacagccggttgctgagccgggagcgctgactggcccggctgggcaggaagggaaactgaaagaaagaggggaagagtattaaagaccatttctggctgggcagggcactctcagcagctcaactgcccagcgtgaccagtggccacctctgcagtgtcttccacaacctgggtgaatctacttctcttaacaaagtctcaatgtcctatttgcaatttatgtggtaaacactgaagacaatggtccttaaccttttggcatctcagcctcctttcgaaagtcttgactcgtctgctgaacaaatcctctgacctcaggccggctgtgaacgtagttcctgagagatagcaaacatgcccaacagtgagcccgcatctctgctggagctgttcaacagcatcgccacacaaggggagctcgtaaggtccctcaaagcgggaaatgcgtcaaaggatgaaattgattctgcagtaaagatgttggtgtcattaaaaatgagctacaaagctgccgcgggggaggattacaaggctgactgtcctccagggaacccagca

SEQ ID NO: 32976 - DNA, 562 bp, Homo sapiens
  source 1..562: mol_type = unassigned DNA
gacagccggttgctgagccgggagcgctgactggcccggctgggcaggggcactctcagcagctcaactgcccagcgtgaccagtggccacctctgcagtgtcttccacaacctggtcttgactcgtctgctgaacaaatcctctgacctcaggccggctgtgaacgtagttcctgagagatagcaaacatgcccaacagtgagcccgcatctctgctggagctgttcaacagcatcgccacacaaggggagctcgtaaggtccctcaaagcgggaaatgcgtcaaaggatgaaattgattctgcagtaaagatgttggtgtcattaaaaatgagctacaaagctgccgcgggggaggattacaaggctgactgtcctccagggaacccagcacctaccagtaatcatggcccagatgccacagaagctgaagaggattttgtggacccatggacagtacagacaagcagtgcaaaaggcatagactacgataagctcattgttcggtttggaagtagtaaaattgacaaagagctaataaaccgaatagagagagccaccg

SEQ ID NO: 32977 - DNA, 538 bp, Homo sapiens
  source 1..538: mol_type = unassigned DNA
gtgatttataagaaacccttagctgaatgcagggtggggagaacgaaagacaaaagcatcttttttcagaagggaaactgaaagaaagaggggaagagtattaaagaccatttctggctgggcagggcactctcagcagctcaactgcccagcgtgaccagtggccacctctgcagtgtcttccacaacctggcctcctttcgaaagtcttgactcgtctgctgaacaaatcctctgacctcaggccggctgtgaacgtagttcctgagagatagcaaacatgcccaacagtgagcccgcatctctgctggagctgttcaacagcatcgccacacaaggggagctcgtaaggtccctcaaagcgggaaatgcgtcaaaggatgaaattgattctgcagtaaagatgttggtgtcattaaaaatgagctacaaagctgccgcgggggaggattacaaggctgactgtcctccagggaacccagcacctaccagtaatcatggcccagatgccacagaagctgaagaggattttgtggac

SEQ ID NO: 32978 - DNA, 658 bp, Homo sapiens
  source 1..658: mol_type = unassigned DNA
ggctcgattctcaagagggtttcattggtctcaacctggccccccaggcaacccacccctgattggacagtctcatcaagaaggttggtcaagagctcaagtgtttctgagaatctgggtgatttataagaaacccttagctgaatgcagggtggggagaacgaaagacaaaagcatcttttttcagaagggaaactgaaagaaagaggggaagagtattaaagaccatttctggctgggcagggcactctcagcagctcaactgcccagcgtgaccagtggccacctctgcagtgtcttccacaacctgggtgaatctacttctcttaacaaagtctcaatgtcctatttgcaatttatgtggtaaacactgaagacaatggtccttaaccttttggcatctcagcctcctttcgaaagtcttgactcgtctgctgaacaaatcctctgacctcaggccggctgtgaacgtagttcctgagagatagcaaacatgcccaacagtgagcccgcatctctgctggagctgttcaacagcatcgccacacaaggggagctcgtaaggtccctcaaagcgggaaatgcgtcaaaggatgaaattgattctgcagtaaagatgttggtgtcattaaaaatgagctacaaagctgccgcgggg

SEQ ID NO: 32979 - DNA, 410 bp, Homo sapiens
  source 1..410: mol_type = unassigned DNA
ctcagcagctcaactgcccagcgtgaccagtggccacctctgcagtgtcttccacaacctggtctcaatgtcctatttgcaatttatgtggtaaacactgaagacaatggtccttaaccttttggcatctcagcctcctttcgaaagtcttgactcgtctgctgaacaaatcctctgacctcaggccggctgtgaacgtagttcctgagagatagcaaacatgcccaacagtgagcccgcatctctgctggagctgttcaacagcatcgccacacaaggggagctcgtaaggtccctcaaagcgggaaatgcgtcaaaggatgaaattgattctgcagtaaagatgttggtgtcattaaaaatgagctacaaagctgccgcgggggaggattacaaggctgactgtcctc

SEQ ID NO: 32980 - DNA, 564 bp, Homo sapiens
  source 1..564: mol_type = unassigned DNA
agcgctgactggcccggctgggcaggaagggaaactgaaagaaagaggggaagagtattaaagaccatttctggctgggcagggcactctcagcagctcaactgcccagcgtgaccagtggccacctctgcagtgtcttccacaacctggagtgtactatttgttaaacaggtgaatctacttctcttaacaaagtctcaatgtcctatttgcaatttatgtggtaaacactgaagacaatggtccttaaccttttggcatctcagcctcctttcgaaagtcttgactcgtctgctgaacaaatcctctgacctcaggccggctgtgaacgtagttcctgagagatagcaaacatgcccaacagtgagcccgcatctctgctggagctgttcaacagcatcgccacacaaggggagctcgtaaggtccctcaaagcgggaaatgcgtcaaaggatgaaattgattctgcagtaaagatgttggtgtcattaaaaatgagctacaaagctgccgcgggggaggattacaaggctgactgtcctccagggaacccagcacctacca

SEQ ID NO: 32981 - DNA, 517 bp, Homo sapiens
  source 1..517: mol_type = unassigned DNA
taagaaacccttagctgaatgcagggtggggagaacgaaagacaaaagcatcttttttcagaagggaaactgaaagaaagaggggaagagtattaaagaccatttctggctgggcagggcactctcagcagctcaactgcccagcgtgaccagtggccacctctgcagtgtcttccacaacctggatgttcctgaactccaagttgaaaaacctctgaagttcaactcaattctgaaagtcaacaaagaaataaaggaggatgtcaatagtcttgactcgtctgctgaacaaatcctctgacctcaggccggctgtgaacgtagttcctgagagatagcaaacatgcccaacagtgagcccgcatctctgctggagctgttcaacagcatcgccacacaaggggagctcgtaaggtccctcaaagcgggaaatgcgtcaaaggatgaaattgattctgcagtaaagatgttggtgtcattaaaaatgagctacaaagctgccgcgggggaggattac

SEQ ID NO: 32982 - DNA, 547 bp, Homo sapiens
  source 1..547: mol_type = unassigned DNA
gatgcaatgaccagctaatggctcgattctcaagagggtttcattggtctcaacctggccccccaggcaacccacccctgattggacagtctcatcaagaaggatgaaattgattctgcagtaaagatgttggtgtcattaaaaatgagctacaaagctgccgcgggggaggattacaaggctgactgtcctccagggaacccagcacctaccagtaatcatggcccagatgccacagaagctgaagaggattttgtggacccatggacagtacagacaagcagtgcaaaaggcatagactacgataagctcattgttcggtttggaagtagtaaaattgacaaagagctaataaaccgaatagagagagccaccggccaaagaccacaccacttcctgcgcagaggcatcttcttctcacacagagatatgaatcaggttcttgatgcctatgaaaataagaagccattttatctgtacacgggccggggcccctcttctgaagcaatgcatgtaggtcacctcattccatttattttcacaaagt

SEQ ID NO: 32983 - DNA, 528 bp, Homo sapiens
  source 1..528: mol_type = unassigned DNA
ccggttgctgagccgggagcgctgactggcccggctgggcagggatgaaattgattctgcagtaaagatgttggtgtcattaaaaatgagctacaaagctgccgcgggggaggattacaaggctgactgtcctccagggaacccagcacctaccagtaatcatggcccagatgccacagaagctgaagaggattttgtggacccatggacagtacagacaagcagtgcaaaaggcatagactacgataagctcattgttcggtttggaagtagtaaaattgacaaagagctaataaaccgaatagagagagccaccggccaaagaccacaccacttcctgcgcagaggcatcttcttctcacacagagatatgaatcaggttcttgatgcctatgaaaataagaagccattttatctgtacacgggccggggcccctcttctgaagcaatgcatgtaggtcacctcattccatttattttcacaaagtggctccaggatgtatttaacgtgcccttggtcatccagat

SEQ ID NO: 32984 - DNA, 847 bp, Homo sapiens
  source 1..847: mol_type = unassigned DNA
ggagcgctgactggcccggctgggcaggaagggaaactgaaagaaagaggggaagagtattaaagaccatttctggctgggcagggcactctcagcagctcaactgcccagcgtgaccagtggccacctctgcagtgtcttccacaacctgggatgaaattgattctgcagtaaagatgttggtgtcattaaaaatgagctacaaagctgccgcgggggaggattacaaggctgactgtcctccagggaacccagcacctaccagtaatcatggcccagatgccacagaagctgaagaggattttgtggacccatggacagtacagacaagcagtgcaaaaggcatagactacgataagctcattgttcggtttggaagtagtaaaattgacaaagagctaataaaccgaatagagagagccaccggccaaagaccacaccacttcctgcgcagaggcatcttcttctcacacagagatatgaatcaggttcttgatgcctatgaaaataagaagccattttatctgtacacgggccggggcccctcttctgaagcaatgcatgtaggtcacctcattccatttattttcacaaagtggctccaggatgtatttaacgtgcccttggtcatccagatgacggatgacgagaagtatctgtggaaggacctgaccctggaccaggcctatagctatgctgtggagaatgccaaggacatcatcgcctgtggctttgacatcaacaagactttcatattctctgacctggactacatggggatgagctcaggtttctacaaaaatgtggtgaagattcaaaagcatgttaccttcaaccaagtgaaagg

SEQ ID NO: 32985 - DNA, 2508 bp, Homo sapiens
  source 1..2508: mol_type = unassigned DNA
ggggagtaaggccggggcggagtgaggaaacaagggagggagtgatggagggacgctggcgcggcgcccagtggcctggccctcccgggagtatccttagagcccggcttgctgcccgccgcgttctggcactgtgaggcgcggagcctgccaccgacccctcgcccctttcctctgagcgccgccgacccaccccgtctccctttcccactggcacccttcatcgtctccgcctgttcgcttttcccgaggagagaggcccccatttttatttagcgcctgccatgtgccagaggctttgcgtagtgttgcacttagtcccctcaacggtaatgttagcaggcttctccatgcccattccacagatgaggaaaccgaaggggaagcagaaaagtaatgcgacccttgcccaaggtttcgaataagtccaagctgggattgaaacccaggcgtctgtgaccccagaactcctgatctttccactgcactgtgccgcctcggtgaacagatgcggggaatttacagtttctctttccaccgcccacgactacacaaaatcagtcacactgacgctgagggtggggaacgggaagagggtggggaggttatttggaggccagcggggggtgaggggtggctgatgcaatgaccagctaatggctcgattctcaagagggtttcattggtctcaacctggccccccaggcaacccacccctgattggacagtctcatcaagaagggcactctcagcagctcaactgcccagcgtgaccagtggccacctctgcagtgtcttccacaacctgggatgaaattgattctgcagtaaagatgttggtgtcattaaaaatgagctacaaagctgccgcgggggaggattacaaggctgactgtcctccagggaacccagcacctaccagtaatcatggcccagatgccacagaagctgaagaggattttgtggacccatggacagtacagacaagcagtgcaaaaggcatagactacgataagctcattgttcggtttggaagtagtaaaattgacaaagagctaataaaccgaatagagagagccaccggccaaagaccacaccacttcctgcgcagaggcatcttcttctcacacagagatatgaatcaggttcttgatgcctatgaaaataagaagccattttatctgtacacgggccggggcccctcttctgaagcaatgcatgtaggtcacctcattccatttattttcacaaagtggctccaggatgtatttaacgtgcccttggtcatccagatgacggatgacgagaagtatctgtggaaggacctgaccctggaccaggcctatagctatgctgtggagaatgccaaggacatcatcgcctgtggctttgacatcaacaagactttcatattctctgacctggactacatggggatgagctcaggtttctacaaaaatgtggtgaagattcaaaagcatgttaccttcaaccaagtgaaaggcattttcggcttcactgacagcgactgcattgggaagatcagttttcctgccatccaggctgctccctccttcagcaactcattcccacagatcttccgagacaggacggatatccagtgccttatcccatgtgccattgaccaggatccttactttagaatgacaagggacgtcgcccccaggatcggctatcctaaaccagccctgctgcactccaccttcttcccagccctgcagggcgcccagaccaaaatgagtgccagcgaccccaactcctccatcttcctcaccgacacggccaagcagatcaaaaccaaggtcaataagcatgcgttttctggagggagagacaccatcgaggagcacaggcagtttgggggcaactgtgatgtggacgtgtctttcatgtacctgaccttcttcctcgaggacgacgacaagctcgagcagatcaggaaggattacaccagcggagccatgctcaccggtgagctcaagaaggcactcatagaggttctgcagcccttgatcgcagagcaccaggcccggcgcaaggaggtcacggatgagatagtgaaagagttcatgactccccggaagctgtccttcgactttcagtagcactcgttttacatatgcttataaaagaagtgatgtatcagtaatgtatcaataatcccagcccagtcaaagcaccgccacctgtaggcttctgtctcatggtaattactgggcctggcctctgtaagcctgtgtatgttatcaatactgtttcttcctgtgagttccattatttctatctcttatgggcaaagcattgtgggtaattggtgctggctaacattgcatggtcggatagagaagtccagctgtgagtctctccccaaagcagccccacagtggagcctttggctggaagtccatgggccaccctgttcttgtccatggaggactccgagggttccaagtatactcttaagacccactctgtttaaaaatatat

SEQ ID NO: 32986 - DNA, 584 bp, Homo sapiens
  source 1..584: mol_type = unassigned DNA
aatgtctttgccttttaagataatgttcatgctgttatttggcggggaaagcaatctttcttttagtgtttaaaaaaaatggaacatgatgggtcccaaaaggtgtcaagaaatccttgctctaaagaagtcattttcttgtcctctgggaacttgccagtccaaagtcttgactcgtctgctgaacaaatcctctgacctcaggccggctgtgaacgtagttcctgagagatagcaaacatgcccaacagtgagcccgcatctctgctggagctgttcaacagcatcgccacacaaggggagctcgtaaggtccctcaaagcgggaaatgcgtcaaaggatgaaattgattctgcagtaaagatgttggtgtcattaaaaatgagctacaaagctgccgcgggggaggattacaaggctgactgtcctccagggaacccagcacctaccagtaatcatggcccagatgccacagaagctgaagaggattttgtggacccatggacagtacagacaagcagtgcaaaaggcatagactacgataagctcattgttcggtttggaagtagtaaaattgacaaaga

SEQ ID NO: 32987 - DNA, 553 bp, Homo sapiens
  source 1..553: mol_type = unassigned DNA
agaaattaatgtctttgccttttaagataatgttcatgctgttatttggcggggaaagcaatctttcttttagtgtttaaaaaaaatggaacatgatgggtcccaaaaggtgtcaagaaatccttgctctaaagaagtcattttcttgtcctctgggaacttgccagtccaaagagtgtactatttgttaaacaggtgaatctacttctcttaacaaagtctcaatgtcctatttgcaatttatgtggtaaacactgaagacaatggtccttaaccttttggcatctcagcctcctttcgaaagtcttgactcgtctgctgaacaaatcctctgacctcaggccggctgtgaacgtagttcctgagagatagcaaacatgcccaacagtgagcccgcatctctgctggagctgttcaacagcatcgccacacaaggggagctcgtaaggtccctcaaagcgggaaatgcgtcaaaggatgaaattgattctgcagtaaagatgttggtgtcattaaaaatgagctacaaagctgccgcgggggaggattacaa

SEQ ID NO: 32988 - DNA, 640 bp, Homo sapiens
  source 1..640: mol_type = unassigned DNA
actctcagcagctcaactgcccagcgtgaccagtggccacctctgcagtgtcttccacaacctggacaatggtccttaaccttttggcatctcagcctcctttcgaaagtcttgactcgtctgctgaacaaatcctctgacctcaggccggctgtgaacgtagttcctgagagatagcaaacatgcccaacagtgagcccgcatctctgctggagctgttcaacagcatcgccacacaaggggagctcgtaaggtccctcaaagcgggaaatgcgtcaaaggatgaaattgattctgcagtaaagatgttggtgtcattaaaaatgagctacaaagctgccgcgggggaggattacaaggctgactgtcctccagggaacccagcacctaccagtaatcatggcccagatgccacagaagctgaagaggattttgtggacccatggacagtacagacaagcagtgcaaaaggcatagactacgataagctcattgttcggtttggaagtagtaaaattgacaaagagctaataaaccgaatagagagagccaccggccaaagaccacaccacttcctgcgcagaggcatcttcttctcacacagagatatgaatcaggttcttgatgcctatgaaaataa

SEQ ID NO: 32989 - DNA, 2080 bp, Homo sapiens
  source 1..2080: mol_type = unassigned DNA
actctcagcagctcaactgcccagcgtgaccagtggccacctctgcagtgtcttccacaacctggagtgtactatttgttaaacaggtgaatctacttctcttaacaaagtctcaatgtcctatttgcaatttatgtggtaaacactgaagacaatggtccttaaccttttggcatctcagcctcctttcgaaagtcttgactcgtctgctgaacaaatcctctgacctcaggccggctgtgaacgtagttcctgagagatagcaaacatgcccaacagtgagcccgcatctctgctggagctgttcaacagcatcgccacacaaggggagctcgtaaggtccctcaaagcgggaaatgcgtcaaaggatgaaattgattctgcagtaaagatgttggtgtcattaaaaatgagctacaaagctgccgcgggggaggattacaaggctgactgtcctccagggaacccagcacctaccagtaatcatggcccagatgccacagaagctgaagaggattttgtggacccatggacagtacagacaagcagtgcaaaaggcatagactacgataagctcattgttcggtttggaagtagtaaaattgacaaagagctaataaaccgaatagagagagccaccggccaaagaccacaccacttcctgcgcagaggcatcttcttctcacacagagatatgaatcaggttcttgatgcctatgaaaataagaagccattttatctgtacacgggccggggcccctcttctgaagcaatgcatgtaggtcacctcattccatttattttcacaaagtggctccaggatgtatttaacgtgcccttggtcatccagatgacggatgacgagaagtatctgtggaaggacctgaccctggaccaggcctatagctatgctgtggagaatgccaaggacatcatcgcctgtggctttgacatcaacaagactttcatattctctgacctggactacatggggatgagctcaggtttctacaaaaatgtggtgaagattcaaaagcatgttaccttcaaccaagtgaaaggcattttcggcttcactgacagcgactgcattgggaagatcagttttcctgccatccaggctgctccctccttcagcaactcattcccacagatcttccgagacaggacggatatccagtgccttatcccatgtgccattgaccaggatccttactttagaatgacaagggacgtcgcccccaggatcggctatcctaaaccagccctgctgcactccaccttcttcccagccctgcagggcgcccagaccaaaatgagtgccagcgaccccaactcctccatcttcctcaccgacacggccaagcagatcaaaaccaaggtcaataagcatgcgttttctggagggagagacaccatcgaggagcacaggcagtttgggggcaactgtgatgtggacgtgtctttcatgtacctgaccttcttcctcgaggacgacgacaagctcgagcagatcaggaaggattacaccagcggagccatgctcaccggtgagctcaagaaggcactcatagaggttctgcagcccttgatcgcagagcaccaggcccggcgcaaggaggtcacggatgagatagtgaaagagttcatgactccccggaagctgtccttcgactttcagtagcactcgttttacatatgcttataaaagaagtgatgtatcagtaatgtatcaataatcccagcccagtcaaagcaccgccacctgtaggcttctgtctcatggtaattactgggcctggcctctgtaagcctgtgtatgttatcaatactgtttcttcctgtgagttccattatttctatctcttatgggcaaagcattgtgggtaattggtgctggctaacattgcatggtcggatagagaagtccagctgtgagtctctccccaaagcagccccacagtggagcctttggctggaagtccatgggccaccctgttcttgtccatggaggactccgagggttccaagtatactcttaagacccactctgtttaaaaatatatattctatgtatgcg

SEQ ID NO: 32990 - DNA, 821 bp, Homo sapiens
  source 1..821: mol_type = unassigned DNA
aactgcccagcgtgaccagtggccacctctgcagtgtcttccacaacctggagtgtactatttgttaaacaggtgaatctacttctcttaacaaagtctcaatgtcctatttgcaatttatgtggtaaacactgaagacaatggtccttaaccttttggcatctcagcctcctttcgaaagtcttgactcgtctgctgaacaaatcctctgacctcaggccggctgtgaacgtagttcctgagagatagcaaacatgcccaacagtgagcccgcatctctgctggagctgttcaacagcatcgccacacaaggggagctcgtaaggtccctcaaagcgggaaatgcgtcaaagtaaagatgttggtgtcattaaaaatgagctacaaagctgccgcgggggaggattacaaggctgactgtcctccagggaacccagcacctaccagtaatcatggcccagatgccacagaagctgaagaggattttgtggacccatggacagtacagacaagcagtgcaaaaggcatagactacgataagctcattgttcggtttggaagtagtaaaattgacaaagagctaataaaccgaatagagagagccaccggccaaagaccacaccacttcctgcgcagaggcatcttcttctcacacagagatatgaatcaggttcttgatgcctatgaaaataagaagccattttatctgtacacgggccggggcccctcttctgaagcaatgcatgtaggtcacctcattccatttattttcacaaagtggctccaggatgtatttaacgtgcccttggtcatccagatga

SEQ ID NO: 32991 - DNA, 848 bp, Homo sapiens
  source 1..848: mol_type = unassigned DNA
aggagacagccggttgctgagccgggagcgctgactggcccggctgggcaggatgttcctgaactccaagttgaaaaacctctgaagttcaactcaattctgaaagtcaacaaagaaataaaggaggatgtcaatagtcttgactcgtctgctgaacaaatcctctgacctcaggccggctgtgaacgtagttcctgagagatagcaaacatgcccaacagtgagcccgcatctctgctggagctgttcaacagcatcgccacacaaggggagctcgtaaggtccctcaaagcgggaaatgcgtcaaaggatgaaattgattctgcagtaaagatgttggtgtcattaaaaatgagctacaaagctgccgcgggggaggattacaaggctgactgtcctccagggaacccagcacctaccagtaatcatggcccagatgccacagaagctgaagaggattttgtggacccatggacagtacagacaagcagtgcaaaaggcatagactacgataagctcattgttcggtttggaagtagtaaaattgacaaagagctaataaaccgaatagagagagccaccggccaaagaccacaccacttcctgcgcagaggcatcttcttctcacacagagatatgaatcaggttcttgatgcctatgaaaataagaagccattttatctgtacacgggccggggcccctcttctgaagcaatgcatgtaggtcacctcattccatttattttcacaaagtggctccaggatgtatttaacgtgcccttggtcatccagatgacggatgacgagaagtatctgtggaaggacctgaccctggaccaggcctatag

SEQ ID NO: 32992 - DNA, 1218 bp, Homo sapiens
  source 1..1218: mol_type = unassigned DNA
ggagggtgtttatcgcggctagagagatgtcgctgctgcggtcgctgcgcgtgtttctggtcgcgcggaccgggagctacccggctgggtctcttctgcgtcagtcgccccagccaaggcacacattttatgctgggccccgtctgtctgcctcggcctccagcaaggagctcctcatgaagctgcggcggaaaacaggctactcctttgtaaattgcaagaaagctctggagacttgtggcggggacctcaaacaggcagagatctggctccacaaggaggcccagaaggagggctggagcaaagctgccaagctccaagggaggaagaccaaagaaggcctgattgggctgttgcaggaaggaaacacaactgtattagtagaggtaaactgtgagacagattttgtttctagaaatttaaaatttcaactgttggtccagcaagtagcccttggaaccatgatgcattgtcagaccctaaaggatcaaccctctgcatacagtaaagtgcagtggctcacgcctgtaaacctagcactttgggaggctgaagcaggtggatcacttgagggtttcttgaattcctctgagctttctggacttccagctgggcctgacagagaaggctcactcaaggatcagttggctttagcaattggaaaactgggagaaaacatgattcttaaacgagctgcatgggtgaaggtgccatctgggttctacgttggctcttatgtccacggagcaatgcagagtccctcacttcacaagctggtgctggggaagtatggggccctggtcatctgtgagacgtctgaacagaaaacaaaccttgaagacgttggccgccgccttgggcagcatgtggtgggcatggcccccctctctgttggctccctggacgatgagcctgggggagaggcagagactaagatgctgtcccagccgtatttgctggatccctccattaccttggggcagtatgtgcagcctcagggggtgtcggtagtagactttgtgcggtttgaatgtggagaaggtgaagaggcagcagaaactgaataggttccagagacttttggcccaggaggaatatttacttttagctctggacatcattacaaaaaggaatatttcccaaacctcttcagaccgagaatgcatgggtaaaattattaaatagttgtataataaaaataattttttccttgtttgc

SEQ ID NO: 32993 - DNA, 1450 bp, Homo sapiens
  source 1..1450: mol_type = unassigned DNA
gtgtttatcgcggctagagagatgtcgctgctgcggtcgctgcgcgtgtttctggtcgcgcggaccgggagctacccggctgggtctcttctgcgtcagtcgccccagccaaggcacacattttatgctgggccccgtctgtctgcctcggcctccagcaaggagctcctcatgaagctgcggcggaaaacaggctactcctttgtaaattgcaagaaagctctggagacttgtggcggggacctcaaacagacggagtcttgctctgtggcccaggccggcgtgcaatgagttgtgtagtttttgcctgtacggtcatgcgtctcttaataggaagatacattctgagaaatggcgtcgttaggagattttggcttatgcacatcatagagtacctacacaaacctagatggtatattgtactacaacctgggctatatggaattgccagctgctcctaggctacaaaccgttacaaaatgttactggactgaatactgtaggcagttgtaacacagtggcagagatctggctccacaaggaggcccagaaggagggctggagcaaagctgccaagctccaagggaggaagaccaaagaaggcctgattgggctgttgcaggaaggaaacacaactgtattagtagaggtaaactgtgagacagattttgtttctagaaatttaaaatttcaactgttggtccagcaagtagcccttggaaccatgatgcattgtcagaccctaaaggatcaaccctctgcatacagtaaaggtttcttgaattcctctgagctttctggacttccagctgggcctgacagagaaggctcactcaaggatcagttggctttagcaattggaaaactgggagaaaacatgattcttaaacgagctgcatgggtgaaggtgccatctgggttctacgttggctcttatgtccacggagcaatgcagagtccctcacttcacaagctggtgctggggaagtatggggccctggtcatctgtgagacgtctgaacagaaaacaaaccttgaagacgttggccgccgccttgggcagcatgtggtgggcatggcccccctctctgttggctccctggacgatgagcctgggggagaggcagagactaagatgctgtcccagccgtatttgctggatccctccattaccttggggcagtatgtgcagcctcagggggtgtcggtagtagactttgtgcggtttgaatgtggagaaggtgaagaggcagcagaaactgaataggttccagagacttttggcccaggaggaatatttacttttagctctggacatcattacaaaaaggaatatttcccaaacctcttcagaccgagaatgcatgggtaaaattattaaatagttgtataataaaaataattttttccttgtttgcgtaatactggatttagcttttctgtgcctttc

SEQ ID NO: 32994 - DNA, 2159 bp, Homo sapiens
  source 1..2159: mol_type = unassigned DNA
attttacctggggtgggaggtggggggtaattcccgtatgaaatgtgtcgtctcaagaaatcaagtagaggcgaggactgtgttcctccggccagcaggtggcaccatactcgtttggtgcgttccgctggagaattctggcccttccgccgcgccgtaggtttgttgcctcaccagtgcgcccgccggagggtgtttatcgcggctagagagatgtcgctgctgcggtcgctgcgcgtgtttctggtcgcgcggaccgggagctacccggctgggtctcttctgcgtcagtcgccccagccaaggcacacattttatgctgggccccgtctgtctgcctcggcctccagcaaggagctcctcatgaagctgcggcggaaaacaggctactcctttgtaaattgcaagaaagctctggagacttgtggcggggacctcaaacaggcagagatctggctccacaaggaggcccagaaggagggctggagcaaagctgccaagctccaagggaggaagaccaaagaaggcctgattgggctgttgcaggaaggaaacacaactgtattagtagaggtaaactgtgagacagattttgtttctagaaatttaaaatttcaactgttggtccagcaagtagcccttggaaccatgatgcattgtcagaccctaaaggatcaaccctctgcatacagtaaaggtttcttgaattcctctgagctttctggacttccagctgggcctgacagagaaggctcactcaaggatcagttggctttagcaattggaaaactgggagaaaacatgattcttaaacgagctgcatgggtgaaggtgccatctgggttctacgttggctcttatgtccacggagcaatgcagagtccctcacttcacaagctggtgctggggaagtatggggccctggtcatctgtgagacgtctgaacagaaaacaaaccttgaagacgttggccgccgccttgggcagcatgtggtgggcatggcccccctctctgttggctccctggacgatgagcctgggggagaggcagagactaagatgctgtcccagccgtatttgctggatccctccattaccttggggcagtatgtgcagcctcagggggtgtcggtagtagactttgtgcggtttgaatgtggagaaggtgaagaggcagcagaaactgaataggttccagagacttttggcccaggaggaatatttacttttagctctggacatcattacaaaaaggaatatttcccaaacctcttcagaccgagaatgcatgggtaaaattattaaatagttgtataataaaaataattttttccttgtttgcgtaatactggatttagcttttctgtgcctttcaaaaacaacaggtgggccttattgacgtgatagtgtcgtggagaacaggcatcaacaatactgctgctcccttcaacatagatttattatggtatttctgaaatttctaacttatatgttctgtcttacaccttttatgacatagaactcttttgttctgtttttgctttgcgacactgtgaaccgtgcttctgcctcggaacctccctagttatattacttgtgccacatggatttctttaggattattgattcaaacctagagttgtctggaaaatgtgggttctcttctttgtgattgtctgtagtatgctttgaaggtgctctgcagtggtagacacactggttctggcctcatttaatgaaattaataacacatgcccctatttctcttttggatgatgtgtgggtgggtgggtactgaggtttcctggccagctgtaaggcagattttgacattcttgtgccagaaacagaaattagagtagtccagttacccagagagctcacttaacattgcctctttacttccccagtactgaaacatttcttcaagtataacataaaattaccgtaacaagcagacccagaatactgaaaataactccatttgttcattataggtatctttatttgaaaagtgaaaaatgctttgacacattacagatctgggtatttggattttgcctatggagtgcatatatgatttcaatgatttacaggctaaatagattttagaaataatcatcttaaaattgaaaacaaaggtaggtcctggtataata

SEQ ID NO: 32995 - DNA, 1951 bp, Homo sapiens
  source 1..1951: mol_type = unassigned DNA
gtaggtttgttgcctcaccagtgcgcccgccggagggtgtttatcgcggctagagagatgtcgctgctgcggtcgctgcgcgtgtttctggtcgcgcggaccgggagctacccggctgggtctcttctgcgtcagtcgccccagccaaggcacacattttatgctgggccccgtctgtctgcctcggcctccagcaaggagctcctcatgaagctgcggcggaaaacaggctactcctttgtaaattgcaagaaagctctggagacttgtggcggggacctcaaacaggcagagatctggctccacaaggaggcccagaaggagggctggagcaaagctgccaagctccaagggaggaagaccaaagaaggcctgattgggctgttgcaggaaggaaacacaactgtattagtagaggtaaactgtgagacagattttgtttctagaaatttaaaatttcaactgttggtccagcaagtagcccttggaaccatgatgcattgtcagaccctaaaggatcaaccctctgcatacagtaaagaaaactgggagaaaacatgattcttaaacgagctgcatgggtgaaggtgccatctgggttctacgttggctcttatgtccacggagcaatgcagagtccctcacttcacaagctggtgctggggaagtatggggccctggtcatctgtgagacgtctgaacagaaaacaaaccttgaagacgttggccgccgccttgggcagcatgtggtgggcatggcccccctctctgttggctccctggacgatgagcctgggggagaggcagagactaagatgctgtcccagccgtatttgctggatccctccattaccttggggcagtatgtgcagcctcagggggtgtcggtagtagactttgtgcggtttgaatgtggagaaggtgaagaggcagcagaaactgaataggttccagagacttttggcccaggaggaatatttacttttagctctggacatcattacaaaaaggaatatttcccaaacctcttcagaccgagaatgcatgggtaaaattattaaatagttgtataataaaaataattttttccttgtttgcgtaatactggatttagcttttctgtgcctttcaaaaacaacaggtgggccttattgacgtgatagtgtcgtggagaacaggcatcaacaatactgctgctcccttcaacatagatttattatggtatttctgaaatttctaacttatatgttctgtcttacaccttttatgacatagaactcttttgttctgtttttgctttgcgacactgtgaaccgtgcttctgcctcggaacctccctagttatattacttgtgccacatggatttctttaggattattgattcaaacctagagttgtctggaaaatgtgggttctcttctttgtgattgtctgtagtatgctttgaaggtgctctgcagtggtagacacactggttctggcctcatttaatgaaattaataacacatgcccctatttctcttttggatgatgtgtgggtgggtgggtactgaggtttcctggccagctgtaaggcagattttgacattcttgtgccagaaacagaaattagagtagtccagttacccagagagctcacttaacattgcctctttacttccccagtactgaaacatttcttcaagtataacataaaattaccgtaacaagcagacccagaatactgaaaataactccatttgttcattataggtatctttatttgaaaagtgaaaaatgctttgacacattacagatctgggtatttggattttgcctatggagtgcatatatgatttcaatgatttacaggctaaatagattttagaaataatcatcttaaaattgaaaacaaaggtaggtcctggtataatattaaacataaagttattaaacattttaagcattgtt

SEQ ID NO: 32996 - DNA, 930 bp, Homo sapiens
  source 1..930: mol_type = unassigned DNA
gtaggtttgttgcctcaccagtgcgcccgccggagggtgtttatcgcggctagagagatgtcgctgctgcggtcgctgcgcgtgtttctggtcgcgcggaccgggagctacccggctgggtctcttctgcgtcagtcgccccagccaaggcacacattttatgctgggccccgtctgtctgcctcggcctccagcaaggagctcctcatgaagctgcggcggaaaacaggctactcctttgtaaattgcaagaaagctctggagacttgtggcggggacctcaaacaggcagagatctggctccacaaggaggcccagaaggagggctggagcaaagctgccaagctccaagggaggaagaccaaagaaggcctgattgggctgttgcaggaaggaaacacaactgtattagtagaggtaaactgtgagacagattttgtttctagaaatttaaaatttcaactgttggtccagcaagtagcccttggaaccatgatgcattgtcagaccctaaaggatcaaccctctgcatacagtaaaggtttcttgaattcctctgagctttctggacttccagctgggcctgacagagaaggctcactcaaggatcagttggctttagcaattggtctgcctttccaaattggagctgtctctgaacttcagcttcctgaatccaacttcttgcagaacacctcctcttgactgctctaagcaccttaaaaataacaccttcaggatgtagctcttctttactaaacttgtatctgagtctccacttttgataggtggtatctatctagtcacctaaggcagaagcctgagagtttcctagaaaccccccatatccaatgagtcaccagggctgaccaactttacctcctaagcatttgtcaaatctgtcaccatccctccatccctactccactg

SEQ ID NO: 32997 - DNA, 1749 bp, Homo sapiens
  source 1..1749: mol_type = unassigned DNA
tggagcccggctgcggatctgggaagcgcctcttcacggcactgggatccgcatctgcctgggatcatcaagccctagaagctgggtttctttaaattagggctgccgttttctgtttctccctgggctgcggaaagccagaagattttatctagcttatacaaggctgctggtgttccctctttttttccacgagggtgtttttggctgcaattgcatgaaatcccaatggtgtagaccagtggcgatggatctaggagtttaccaactgagacatttttcaatttctttcttgtcatccttgctggggactgaaaacgcttctgtgagacttgataatagctcctctggtgcaagtgtggtagctattgacaacaaaatcgagcaagctatggatctagtgaaaagccatttgatgtatgcggtcagagaagaagtggaggtcctcaaagagcaaatcaaagaactaatagagaaaaattcccagctggagcaggagaacaatctgctgaagacactggccagtcctgagcagcttgcccagtttcaggcccagctgcagactggctccccccctgccaccacccagccacagggcaccacacagccccccgcccagccagcatcgcagggctcaggaccaaccgcatagctgcctatgcccccgcagaactggctgctgcgtgtgaactgaacagacggagaagatgtgctagggagaatctgcctccacagtcacccatttcattgctcgctgcgaaagagacgtgagactgacatatgccattatctcttttccagtattaaacactcatatgcttatggcttggagaaatttcttagttgggtgaattaaaggttaatccgagaattagcatggatataccgggacctcatgcagcttggcagatatctgagaaatggtttaattcatgctcaggagctgtgtgcctttccatcccttccggctccctacccctcacttccaagggttctctctcctgcttgcgcttagtgtcctacatggggttgtgaagcgatggagctcctcactggactcgcctctctcctctcctccccccaggaggaacttgaaaggagggtaaaaagactaaaatgagggggaacagagttcactgtacaaatttgacaactgtcaccaaaattcataaaaaacaatagtactgtgcctctttcttctcaaacaatggatgacacaaaactatgagagtgacaaaatggtgacaggtagctgggacctaggctatcttaccatgaaggttgttttgcttattgtatatttgtgtatgtagtgtaactattttgtacaatagaggactgtaactactatttaggttgtacagattgaaatttagttgtttcattggctgtctgaggaggtgtggacttttatatatagatctacataaaaactgctacatgacaaaaaccacacctaaagaaattttaagaatttggcacagttactcactttgtgtaatctgaaatctagctgctgaatacgctgaagtaaatccttgttcactgaagtctttcaattgagctggttgaatactttgaaaaatgctcagttctaactaatgaaatggatttcccagtaggggtttctgcatatcacctgtatagtagttatatgcatatgtttctgtgcatgttctctacacaattgtaaggtgtcactgtatttaactgttgcacttgtcaactttcaataaagcatataaatgt

SEQ ID NO: 32998 - DNA, 4820 bp, Homo sapiens
  source 1..4820: mol_type = unassigned DNA
ccgggggtggcgaggggaaggcgacatttgcttggcgctgcctccgtgcagagcggccgggagggctttgcagcggccgccgacgcggcgggaggagggggctgaggcggcttcggagttggccggagaaggtgggcatttctcgcttttcctccccttcctgcgctctccccctccctcctgccccgcaccccacgtgaagcagaatataaaggggggtgtgaggctagaggggaaagtgaatggcgaaggactgaagggatccccccttcgggtccccggccgccctgttcaccctcgttcatcctcctttccgaagctcgctctcgaaggcaggagcgaccggcgcctttggctgaggaggaggagaaggaggaatcgcgccaggcggagcgtcaggtcccgttttcctctccggcgtctccaatacaaagattacggtgcagaaggaaattgcactcgtctcctccgcgcccccggtacccaacacaatgcaccagccgcctgagtccaccgccgcggccgccgccgctgcagacattagcgctaggaagatggcgcacccggcaatgttccctcgaaggggcagcggtagtggcagcgcctctgctctcaatgcagcaggtaccggcgtcggtagtaatgccacatcttccgaggattttccgcctccgtcgctgcttcagccgccgccccctgcagcatcttctacgtcgggaccacagcctccgcctccacaaagcctgaacctcctttcgcaggctcagctgcaggcacagcctcttgcgccaggcggaactcaaatgaaaaagaaaagtggcttccagataactagcgttactcctgctcagatctccgctagtatcagctctaacaacagtatagcagaggacactgagagctatgatgatctggatgaatctcacacggaagatctctcttcttcggagatccttgatgtgtcactttccagggctactgacttaggggagcccgaacgcagctcctcagaagagaccctaaataacttccaggaagccgagacacctggggcagtctctcccaaccagccccaccttcctcagcctcatttgcctcaccttccacaacagaatgttgtgatcaatgggaatgctcatccacaccacctccatcaccaccatcagattcatcatgggcaccacctccaacatggtcaccaccatccatctcatgttgctgtggccagtgcatccattactggtgggccaccctcaagcccagtatctagaaaactctctacaactggaagctctgacagtatcacaccagttgcaccaacttctgctgtatcatccagtggttcacctgcatctgtaatgactaatatgcgtgctccaagtactacaggtggaataggtataaattctgttactggcactagtacagtaaataatgttaacattactgctgtgggtagttttaatcctaatgtgacaagcagcatgcttggtaatgttaatataagtacaagcaatattcctagtgctgctggtgtgagtgttgggcctggagttaccagtggtgttaatgtgaatatcttgagtggcatgggcaatggtactatttcttcctctgctgctgttagcagtgttcctaatgcagctgcagggatgactgggggatcggtttcaagtcagcagcaacaaccaacagttaacacttcgaggttcagagttgtgaagttagattctagttctgagccctttaaaaaaggtagatggacttgcactgagttctatgaaaaagaaaatgctgtacctgctacagaaggtgtgctgataaataaagtggtggagactgtaaagcaaaatccgatagaagtgacttctgaaagggagagcactagtgggagttcagtgagcagtagtgtcagcacactgagtcactatacagagagtgtgggaagtggagagatgggagcccctactgtggtggtgcagcagcagcagcagcaacaacaacaacaacagcaacaaccagctctccaaggtgtgaccctccaacagatggattttggtagcactggtccacagagtattccagcagttagtataccacagagtatttctcagtcacagatctcacaagtacaattacagtctcaagaactgagctatcagcaaaagcaaggtcttcagccagtacctctgcaagccactatgagtgctgcaactggtatccagccatcgcctgtaaatgtggttggtgtaacttcagctttaggtcagcagccttccatttccagtttggctcaaccccagctaccatattctcaggcggctcctccagtgcaaactccccttccaggggcaccaccaccccaacagttacagtatggacaacagcaaccaatggtttctacacagatggccccaggccatgtcaaatcagtgactcaaaatcctgcttcagagtatgtacaacagcagccaattcttcaaacagcaatgtcctccggacagcccagttctgcaggagtaggagcaggaacaacagtgattcctgtggctcagccacagggtatccagctgccagtgcagcccacagcagtcccagcacaacctgcaggggcatctgtccagcctgttggccaggctccggcagcagtgtctgctgtacctactggcagtcagattgcaaatattggtcagcaagcaaacatacctactgcagtgcagcagccctctacccaggttccaccttcagttattcagcagggtgctcctccatcttcgcaagtggttccacctgctcaaactgggattattcatcagggagttcaaactagtgctccaagccttcctcaacaattggttattgcatcccaaagttccttgttaactgtgcctccccagccacaaggagtagaaccagtagctcaaggaattgtttcacagcagttgcctgcagttagttctttgccctctgctagtagtatttctgttacaagtcaggttagttcaactggtccttctggaatgccttctgccccaacaaacttggttccaccacaaaatatagcacaaacccctgctacccaaaatggtaatttggttcaaagtgttagtcaacctcccttgatagcaactaatacaaatttgcctttggcacaacagataccactaagttctacccagttctccgcacaatcattagctcaggcaattggaagccaaattgaagatgccaggcgtgcagcggagccctccttagttggcttacctcagactatcagtggtgacagtgggggaatgtcagcagtttcagatgggagtagcagcagcctagcagcctctgcttctcttttcccgttgaaggtgctaccgctgacgacacccctggtggatggcgaggatgagagctcctctggtgcaagtgtggtagctattgacaacaaaatcgagcaagctatggatctagtgaaaagccatttgatgtatgcggtcagagaagaagtggaggtcctcaaagagcaaatcaaagaactaatagagaaaaattcccagctggagcaggagaacaatctgctgaagacactggccagtcctgagcagcttgcccagtttcaggcccagctgcagactggctccccccctgccaccacccagccacagggcaccacacagccccccgcccagccagcatcgcagggctcaggaccaaccgcatagctgcctatgcccccgcagaactggctgctgcgtgtgaactgaacagacggagaagatgtgctagggagaatctgcctccacagtcacccatttcattgctcgctgcgaaagagacgtgagactgacatatgccattatctcttttccagtattaaacactcatatgcttatggcttggagaaatttcttagttgggtgaattaaaggttaatccgagaattagcatggatataccgggacctcatgcagcttggcagatatctgagaaatggtttaattcatgctcaggagctgtgtgcctttccatcccttccggctccctacccctcacttccaagggttctctctcctgcttgcgcttagtgtcctacatggggttgtgaagcgatggagctcctcactggactcgcctctctcctctcctccccccaggaggaacttgaaaggagggtaaaaagactaaaatgagggggaacagagttcactgtacaaatttgacaactgtcaccaaaattcataaaaaacaatagtactgtgcctctttcttctcaaacaatggatgacacaaaactatgagagtgacaaaatggtgacaggtagctgggacctaggctatcttaccatgaaggttgttttgcttattgtatatttgtgtatgtagtgtaactattttgtacaatagaggactgtaactactatttaggttgtacagattgaaatttagttgtttcattggctgtctgaggaggtgtggacttttatatatagatctacataaaaactgctacatgacaaaaaccacacctaaagaaattttaagaatttggcacagttactcactttgtgtaatctgaaatctagctgctgaatacgctgaagtaaatccttgttcactgaagtctttcaattgagctggttgaatactttgaaaaatgctcagttctaactaatgaaatggatttcccagtaggggtttctgcatatcacctgtatagtagttatatgcatatgtttctgtgcatgttctctacacaattgtaaggtgtcactgtatttaactgttgcacttgtcaactttcaataaagcatataaatgttgataaacaa

SEQ ID NO: 32999 - DNA, 349 bp, Homo sapiens
  source 1..349: mol_type = unassigned DNA
aagcttttcctatagtctagtgataatcctgcttaccgctgccggtaagaactagataattgaaatcaagacactcgaagtcttacagtggtgggactgggcatgcccagtagctcagacggttcgggttacaaataggaagctttcgccgttaagcagccgcgggacacagctccggggaccggggtctgactcccttaaacggtgtttttggctgcaattgcatgaaatcccaatggtgtagaccagtggcgatggatctaggagtttaccaactgagacatttttcaatttctttcttgtcatccttgctggggactgaaaacgcttctgtgagacttgataatag

SEQ ID NO: 33000 - DNA, 690 bp, Homo sapiens
  source 1..690: mol_type = unassigned DNA
cgctgcaccagcccgtctggccaccaacgccgcggagaaaggagccgccgccgcctgcggccctctcccgcccggtcgcgggagcagcgggctcgctctcgaaggcaggagcgaccggcgcctttggctgaggaggaggagaaggaggaatcgcgccaggcggagcgtcaggtcccgttttcctctccggcgtctccaatacaaagattacggtgcagaaggaaattgcactcgtctcctccgcgcccccggtacccaacacaatgcaccagccgcctgagtccaccgccgcggccgccgccgctgcagacattagcgctaggaagatggcgcacccggcaatgttccctcgaaggggcagcggtagtggcagcgcctctgctctcaatgcagcaggtaccggcgtcggtagtaatgccacatcttccgaggattttccgcctccgtcgctgcttcagccgccgccccctgcagcatcttctacgtcgggaccacagcctccgcctccacaaagcctgaacctcctttcgcaggctcagctgcaggcacagcctcttgcgccaggcggaactcaaatgaaaaagaaaagtggcttccagataactagcgttactcctgctcagatctccgctagtatcagctctaacaacagtatagcagaggacactgagagctatgatgatctggatg

SEQ ID NO: 33001 - DNA, 2335 bp, Homo sapiens
  source 1..2335: mol_type = unassigned DNA
ctttccgaagctcgctctcgaaggcaggagcgaccggcgcctttggctgaggaggaggagaaggaggaatcgcgccaggcggagcgtcaggtcccgttttcctctccggcgtctccaatacaaagattacggtgcagaaggaaattgcactcgtctcctccgcgcccccggtacccaacacaatgcaccagccgcctgagtccaccgccgcggccgccgccgctgcagacattagcgctaggaagatggcgcacccggcaatgttccctcgaaggggcagcggtagtggcagcgcctctgctctcaatgcagcaggtaccggcgtcggtagtaatgccacatcttccgaggattttccgcctccgtcgctgcttcagccgccgccccctgcagcatcttctacgtcgggaccacagcctccgcctccacaaagcctgaacctcctttcgcaggctcagctgcaggcacagcctcttgcgccaggcggaactcaaatgaaaaagaaaagtggcttccagataactagcgttactcctgctcagatctccgctagtatcagctctaacaacagtatagcagaggacactgagagctatgatgatctggatgaatctcacacggaagatctctcttcttcggagatccttgatgtgtcactttccagggctactgacttaggggagcccgaacgcagctcctcagaagagaccctaaataacttccaggaagccgagacacctggggcagtctctcccaaccagccccaccttcctcagcctcatttgcctcaccttccacaacagaatgttgtgatcaatgggaatgctcatccacaccacctccatcaccaccatcagattcatcatgggcaccacctccaacatggtcaccaccatccatctcatgttgctgtggccagtgcatccattactggtgggccaccctcaagcccagtatctagaaaactctctacaactggaagctctgacagtatcacaccagttgcaccaacttctgctgtatcatccagtggttcacctgcatctgtaatgactaatatgcgtgctccaagtactacaggtggaataggtataaattctgttactggcactagtacagtaaataatgttaacattactgctgtgggtagttttaatcctaatgtgacaagcagcatgcttggtaatgttaatataagtacaagcaatattcctagtgctgctggtgtgagtgttgggcctggagttaccagtggtgttaatgtgaatatcttgagtggcatgggcaatggtactatttcttcctctgctgctgttagcagtgttcctaatgcagctgcagggatgactgggggatcggtttcaagtcagcagcaacaaccaacagttaacacttcgaggttcagagttgtgaagttagattctagttctgagccctttaaaaaaggtagatggacttgcactgagttctatgaaaaagaaaatgctgtacctgctacagaaggtgtgctgataaataaagtggtggagactgtaaagcaaaatccgatagaagtgacttctgaaagggagagcactagtgggagttcagtgagcagtagtgtcagcacactgagtcactatacagagagtgtgggaagtggagagatgggagcccctactgtggtggtgcagcagcagcagcagcaacaacaacaacaacagcaacaaccagctctccaaggtgtgaccctccaacagatggattttggtagcactggtccacagagtattccagcagttagtataccacagagtatttctcagtcacagatctcacaagtacaattacagtctcaagaactgagctatcttaccatgaaggttgttttgcttattgtatatttgtgtatgtagtgtaactattttgtacaatagaggactgtaactactatttaggttgtacagattgaaatttagttgtttcattggctgtctgaggaggtgtggacttttatatatagatctacataaaaactgctacatgacaaaaaccacacctaaagaaattttaagaatttggcacagttactcactttgtgtaatctgaaatctagctgctgaatacgctgaagtaaatccttgttcactgaagtctttcaattgagctggttgaatactttgaaaaatgctcagttctaactaatgaaatggatttcccagtaggggtttctgcatatcacctgtatagtagttatatgcatatgtttctgtgcatgttctctacacaattgtaaggtgtcactgtatttaactgttgcacttgtcaactttcaataaagcatataaatgttgat

SEQ ID NO: 33002 - DNA, 2213 bp, Homo sapiens
  source 1..2213: mol_type = unassigned DNA
atatcccagtgctgactcccgggcgtgcagaccgctaactagctcactcgctctcagctcctgccaccgctcagccgtcacagcccaggggagcccgagagcctgagagcctgcaaaccggggagggagggagcaaaggagggagggagcaagggcgcgccctggctctccctctgccctgctgcccgcccttcctgcctccacagcttgtcttttccaggcaccctggagtcccctcaggccagctcggtgggcgcgcacctgccagccgcccctgacctcgcaggccaggcgacctccgagcctgagaagatggcccagtccaagctcgattgccgctcacctgtcggcctcgactgctgcaactgctgcctggacctggcccatcggagtgggctccagcgaggcagcagcggggagaacaacaacccgggcagccctacagtgagcaactttcggcagctgcaggaaaagctggtctttgagaacctcaataccgacaagctcaacagcataatgcggcaggattcgctagagccggtgctgcgggacccctgctacctgatcaacgagggcatctgcaaccgcaacatcgaccagaccatgctctccatcctgctcttcttccacagtgcctccggagccagcgtggtggccatagacaacaagatcgaacaggccatggatctggtgaagaatcatctgatgtatgctgtgagagaggaggtggagatcctgaaggagcagatccgagagctggtggagaagaactcccagctagagcgtgagaacaccctgttgaagaccctggcaagcccagagcagctggagaagttccagtcctgtctgagccctgaagagccagctcccgaatccccacaagtgcccgaggcccctggtggttctgcggtgtaagtggctctgtcctcagggtgggcagagccactaaacttgttttacctagttctttccagtttgtttttggctccccaagcatcatctcacgaggagaactttacacctagcacagctggtgccaagagatgtcctaaggacatggccacctgggtccactccagcgacagacccctgacaagagcaggtctctggaggctgagttgcatggggcctagtaacaccaagccagtgagcctctaatgctactgcgccctgggggctcccagggcctgggcaacttagctgcaactggcaaaggagaagggtagtttgaggtgtgacaccagtttgctccagaaagtttaaggggtctgtttctcatctccatggacatcttcaacagcttcacctgacaacgactgttcctatgaagaagccacttgtgttttaagcagaggcaacctctctcttctcctctgtttcgtgaaggcaggggacacagatgggagagattgagccaagtcagccttctgttggttaatatggtataatgcatggctttgtgcacagcccagtgtgggattacagctttgggatgaccgcttacaaagttctgtttggttagtattggcatagtttttctatatagccataaatgcgtatatatacccatagggctagatctgtatcttagtgtagcgatgtatacatatacacatccacctacatgttgaagggcctaaccagccttgggagtattgactggtcccttacctcttatggctaagtctttgactgtgttcatttaccaagttgacccagtttgtcttttaggttaagtaagactcgagagtaaaggcaaggaggggggccagcctctgaatgcggccacggatgccttgctgctgcaaccctttccccagctgtccactgaaacgtgaagtcctgttttgaatgccaaacccaccattcactggtgctgactacatagaatggggttgagagaagatcagtttgggcttcacagtgtcatttgaaaacgttttttgttttgttttgtaattattgtggaaaactttcaagtgaacagaaggatggtgtcctactgtggatgagggatgaacaaggggatggctttgatccaatggagcctgggaggtgtgcccagaaagcttgtctgtagcgggttttgtgagagtgaacactttccactttttgacaccttatcctgatgtatggttccaggatttggattttgattttccaaatgtagcttgaaatttcaataaactttgctctgtttttctaaaaataaa

SEQ ID NO: 33003 - DNA, 1216 bp, Homo sapiens
  source 1..1216: mol_type = unassigned DNA
aattgctagagctgcttttccaagacagtgtccatctctccaccaagattctccttgggctccctcccactcatcatcgccttctgcatctgcatctgcattctcctccccattttcctgcccctgaaattcggagctctgggccctggccatgcagggcagttcacatgatccacagagaacaaggcactttctctttctctgtctttccttcttgcttccctccttctggactttggggattttccatgaaaccaaagtaactatgtaagtggcagtggccttcctgtctatagtctcccacactggagtggaaccagaagggaagagagaagataagcgagaagcaaggacaaattaaaccatggcatttcagcctccttattcctccagcctcttcagaaaaagggacaatgcctccggagccagcgtggtggccatagacaacaagatcgaacaggccatggatctggtgaagaatcatctgatgtatgctgtgagagaggaggtggagatcctgaaggagcagatccgagagctggtggagaagaactcccagctagagcgtgagaacaccctgttgaagaccctggcaagcccagagcagctggagaagttccagtcctgtctgagccctgaagagccagctcccgaatccccacaagtgcccgaggcccctggtggttctgcggtgtaagtggctctgtcctcagggtgggcagagccactaaacttgttttacctagttctttccagtttgtttttggctccccaagcatcatctcacgaggagaactttacacctagcacagctggtgccaagagatgtcctaaggacatggccacctgggtccactccagcgacagacccctgacaagagcaggtctctggaggctgagttgcatggggcctagtaacaccaagccagtgagcctctaatgctactgcgccctgggggctcccagggcctgggcaacttagctgcaactggcaaaggagaagggtagtttgaggtgtgacaccagtttgctccagaaagtttaaggggtctgtttctcatctccatggacatcttcaacagcttcacctgacaacgactgttcctatgaagaagccacttgtgttttaagcagaggcaacctctctcttctcctctgtttcgtgaaggcaggggacacagatgggagagattgagccaagtcagccttctgttgg

SEQ ID NO: 33004 - DNA, 2266 bp, Homo sapiens
  source 1..2266: mol_type = unassigned DNA
ctccacaggtccgccccaatccccgctcacacttgggaaacttgggactgcgctggggccgcgtgtggcacctcaggggggcggcccccggcctcaagaggagggggaggagaaggaggaagaggaggaagtgagcccgaaggatccgctcggagctgtttgtccagctgtttctattcgcacccggagcagtacagccagaagggggccgagccgaaggtggctggctttaggcgctaatttccaactcttttcctcacagcttgtcttttccaggcaccctggagtcccctcaggccagctcggtgggcgcgcacctgccagccgcccctgacctcgcaggccaggcgacctccgagcctgagaagatggcccagtccaagctcgattgccgctcacctgtcggcctcgactgctgcaactgctgcctggacctggcccatcggagtgggctccagcgaggcagcagcggggagaacaacaacccgggcagccctacagtgagcaactttcggcagctgcaggaaaagctggtctttgagaacctcaataccgacaagctcaacagcataatgcggcaggattcgctagagccggtgctgcgggacccctgctacctgatcaacgagggcatctgcaaccgcaacatcgaccagaccatgctctccatcctgctcttcttccacagtgcctccggagccagcgtggtggccatagacaacaagatcgaacaggccatggatctggtgaagaatcatctgatgtatgctgtgagagaggaggtggagatcctgaaggagcagatccgagagctggtggagaagaactcccagctagagcgtgagaacaccctgttgaagaccctggcaagcccagagcagctggagaagttccagtcctgtctgagccctgaagagccagctcccgaatccccacaagtgcccgaggcccctggtggttctgcggtgtaagtggctctgtcctcagggtgggcagagccactaaacttgttttacctagttctttccagtttgtttttggctccccaagcatcatctcacgaggagaactttacacctagcacagctggtgccaagagatgtcctaaggacatggccacctgggtccactccagcgacagacccctgacaagagcaggtctctggaggctgagttgcatggggcctagtaacaccaagccagtgagcctctaatgctactgcgccctgggggctcccagggcctgggcaacttagctgcaactggcaaaggagaagggtagtttgaggtgtgacaccagtttgctccagaaagtttaaggggtctgtttctcatctccatggacatcttcaacagcttcacctgacaacgactgttcctatgaagaagccacttgtgttttaagcagaggcaacctctctcttctcctctgtttcgtgaaggcaggggacacagatgggagagattgagccaagtcagccttctgttggttaatatggtataatgcatggctttgtgcacagcccagtgtgggattacagctttgggatgaccgcttacaaagttctgtttggttagtattggcatagtttttctatatagccataaatgcgtatatatacccatagggctagatctgtatcttagtgtagcgatgtatacatatacacatccacctacatgttgaagggcctaaccagccttgggagtattgactggtcccttacctcttatggctaagtctttgactgtgttcatttaccaagttgacccagtttgtcttttaggttaagtaagactcgagagtaaaggcaaggaggggggccagcctctgaatgcggccacggatgccttgctgctgcaaccctttccccagctgtccactgaaacgtgaagtcctgttttgaatgccaaacccaccattcactggtgctgactacatagaatggggttgagagaagatcagtttgggcttcacagtgtcatttgaaaacgttttttgttttgttttgtaattattgtggaaaactttcaagtgaacagaaggatggtgtcctactgtggatgagggatgaacaaggggatggctttgatccaatggagcctgggaggtgtgcccagaaagcttgtctgtagcgggttttgtgagagtgaacactttccactttttgacaccttatcctgatgtatggttccaggatttggattttgattttccaaatgtagcttgaaatttcaataaactttgctctgtttttctaaaaat

SEQ ID NO: 33005 - DNA, 2199 bp, Homo sapiens
  source 1..2199: mol_type = unassigned DNA
gtcatatcccagtgctgactcccgggcgtgcagaccgctaactagctcactcgctctcagctcctgccaccgctcagccgtcacagcccaggggagcccgagagcctgagagcctgcaaaccggggagggagggagcaaaggagggagggagcaagggcgcgccctggctctccctctgccctgctgcccgcccttcctgcctccacaggcaccctggagtcccctcaggccagctcggtgggcgcgcacctgccagccgcccctgacctcgcaggccaggcgacctccgagcctgagaagatggcccagtccaagctcgattgccgctcacctgtcggcctcgactgctgcaactgctgcctggacctggcccatcggagtgggctccagcgaggcagcagcggggagaacaacaacccgggcagccctacagtgagcaactttcggcagctgcaggaaaagctggtctttgagaacctcaataccgacaagctcaacagcataatgcggcaggattcgctagagccggtgctgcgggacccctgctacctgatcaacgagggcatctgcaaccgcaacatcgaccagaccatgctctccatcctgctcttcttccacagtgcctccggagccagcgtggtggccatagacaacaagatcgaacaggccatggatctggtgaagaatcatctgatgtatgctgtgagagaggaggtggagatcctgaaggagcagatccgagagctggtggagaagaactcccagctagagcgtgagaacaccctgttgaagaccctggcaagcccagagcagctggagaagttccagtcctgtctgagccctgaagagccagctcccgaatccccacaagtgcccgaggcccctggtggttctgcggtgtaagtggctctgtcctcagggtgggcagagccactaaacttgttttacctagttctttccagtttgtttttggctccccaagcatcatctcacgaggagaactttacacctagcacagctggtgccaagagatgtcctaaggacatggccacctgggtccactccagcgacagacccctgacaagagcaggtctctggaggctgagttgcatggggcctagtaacaccaagccagtgagcctctaatgctactgcgccctgggggctcccagggcctgggcaacttagctgcaactggcaaaggagaagggtagtttgaggtgtgacaccagtttgctccagaaagtttaaggggtctgtttctcatctccatggacatcttcaacagcttcacctgacaacgactgttcctatgaagaagccacttgtgttttaagcagaggcaacctctctcttctcctctgtttcgtgaaggcaggggacacagatgggagagattgagccaagtcagccttctgttggttaatatggtataatgcatggctttgtgcacagcccagtgtgggattacagctttgggatgaccgcttacaaagttctgtttggttagtattggcatagtttttctatatagccataaatgcgtatatatacccatagggctagatctgtatcttagtgtagcgatgtatacatatacacatccacctacatgttgaagggcctaaccagccttgggagtattgactggtcccttacctcttatggctaagtctttgactgtgttcatttaccaagttgacccagtttgtcttttaggttaagtaagactcgagagtaaaggcaaggaggggggccagcctctgaatgcggccacggatgccttgctgctgcaaccctttccccagctgtccactgaaacgtgaagtcctgttttgaatgccaaacccaccattcactggtgctgactacatagaatggggttgagagaagatcagtttgggcttcacagtgtcatttgaaaacgttttttgttttgttttgtaattattgtggaaaactttcaagtgaacagaaggatggtgtcctactgtggatgagggatgaacaaggggatggctttgatccaatggagcctgggaggtgtgcccagaaagcttgtctgtagcgggttttgtgagagtgaacactttccactttttgacaccttatcctgatgtatggttccaggatttggattttgattttccaaatgtagcttgaaatttcaataaactttgctctgtttttctaaaaat

SEQ ID NO: 33006 - DNA, 1812 bp, Homo sapiens
  source 1..1812: mol_type = unassigned DNA
acgcaggaaggggggggtcaccgccgctctgggatccgtcatcgaagcgtccctgcggccgctgcgccgtgaaaaccagctgctgcagccgcagaggcagccggaggcagaggggcggcgggcaggaccagacagggctgggcagggggctggccgagcgccgtgcgccgcttgggagaaggccggaagcttaccagccgagaaggaattcctagctagcttcagagccggtgcctccggagccagcgtggtggccatagacaacaagatcgaacaggccatggatctggtgaagaatcatctgatgtatgctgtgagagaggaggtggagatcctgaaggagcagatccgagagctggtggagaagaactcccagctagagcgtgagaacaccctgttgaagaccctggcaagcccagagcagctggagaagttccagtcctgtctgagccctgaagagccagctcccgaatccccacaagtgcccgaggcccctggtggttctgcggtgtaagtggctctgtcctcagggtgggcagagccactaaacttgttttacctagttctttccagtttgtttttggctccccaagcatcatctcacgaggagaactttacacctagcacagctggtgccaagagatgtcctaaggacatggccacctgggtccactccagcgacagacccctgacaagagcaggtctctggaggctgagttgcatggggcctagtaacaccaagccagtgagcctctaatgctactgcgccctgggggctcccagggcctgggcaacttagctgcaactggcaaaggagaagggtagtttgaggtgtgacaccagtttgctccagaaagtttaaggggtctgtttctcatctccatggacatcttcaacagcttcacctgacaacgactgttcctatgaagaagccacttgtgttttaagcagaggcaacctctctcttctcctctgtttcgtgaaggcaggggacacagatgggagagattgagccaagtcagccttctgttggttaatatggtataatgcatggctttgtgcacagcccagtgtgggattacagctttgggatgaccgcttacaaagttctgtttggttagtattggcatagtttttctatatagccataaatgcgtatatatacccatagggctagatctgtatcttagtgtagcgatgtatacatatacacatccacctacatgttgaagggcctaaccagccttgggagtattgactggtcccttacctcttatggctaagtctttgactgtgttcatttaccaagttgacccagtttgtcttttaggttaagtaagactcgagagtaaaggcaaggaggggggccagcctctgaatgcggccacggatgccttgctgctgcaaccctttccccagctgtccactgaaacgtgaagtcctgttttgaatgccaaacccaccattcactggtgctgactacatagaatggggttgagagaagatcagtttgggcttcacagtgtcatttgaaaacgttttttgttttgttttgtaattattgtggaaaactttcaagtgaacagaaggatggtgtcctactgtggatgagggatgaacaaggggatggctttgatccaatggagcctgggaggtgtgcccagaaagcttgtctgtagcgggttttgtgagagtgaacactttccactttttgacaccttatcctgatgtatggttccaggatttggattttgattttccaaatgtagcttgaaatttcaataaactttgctctgtttttctaaaaataaa

SEQ ID NO: 33007 - DNA, 2027 bp, Homo sapiens
  source 1..2027: mol_type = unassigned DNA
tttgcatggcccctgacgccatgtgacgcagccggctcctcctatataaagaagcaggagccaaaatatctccgagtctgggttggactggcggccgtggagtttgtgacatacgaggtgacacccctcgagtcacttcccttcaactccagctggagcgcctgcttggctttgggttcgttctgcagccttcgccccgctcctagcctcagggccggactccagcgcagagcccagcccagcgcagcctgccagcagccacccagccgcccagccgcccagccccgcacgaaacccggccagagcttcctagcagcccgagccatgaacaccgaaatgtatcagacccccatggaggtggcggtctaccagctgcacaatttctccatctccttcttctcttctctgcttggaggggatgtggtttccgttaagctggacaacagtgcctccggagccagcgtggtggccatagacaacaagatcgaacaggccatggatctggtgaagaatcatctgatgtatgctgtgagagaggaggtggagatcctgaaggagcagatccgagagctggtggagaagaactcccagctagagcgtgagaacaccctgttgaagaccctggcaagcccagagcagctggagaagttccagtcctgtctgagccctgaagagccagctcccgaatccccacaagtgcccgaggcccctggtggttctgcggtgtaagtggctctgtcctcagggtgggcagagccactaaacttgttttacctagttctttccagtttgtttttggctccccaagcatcatctcacgaggagaactttacacctagcacagctggtgccaagagatgtcctaaggacatggccacctgggtccactccagcgacagacccctgacaagagcaggtctctggaggctgagttgcatggggcctagtaacaccaagccagtgagcctctaatgctactgcgccctgggggctcccagggcctgggcaacttagctgcaactggcaaaggagaagggtagtttgaggtgtgacaccagtttgctccagaaagtttaaggggtctgtttctcatctccatggacatcttcaacagcttcacctgacaacgactgttcctatgaagaagccacttgtgttttaagcagaggcaacctctctcttctcctctgtttcgtgaaggcaggggacacagatgggagagattgagccaagtcagccttctgttggttaatatggtataatgcatggctttgtgcacagcccagtgtgggattacagctttgggatgaccgcttacaaagttctgtttggttagtattggcatagtttttctatatagccataaatgcgtatatatacccatagggctagatctgtatcttagtgtagcgatgtatacatatacacatccacctacatgttgaagggcctaaccagccttgggagtattgactggtcccttacctcttatggctaagtctttgactgtgttcatttaccaagttgacccagtttgtcttttaggttaagtaagactcgagagtaaaggcaaggaggggggccagcctctgaatgcggccacggatgccttgctgctgcaaccctttccccagctgtccactgaaacgtgaagtcctgttttgaatgccaaacccaccattcactggtgctgactacatagaatggggttgagagaagatcagtttgggcttcacagtgtcatttgaaaacgttttttgttttgttttgtaattattgtggaaaactttcaagtgaacagaaggatggtgtcctactgtggatgagggatgaacaaggggatggctttgatccaatggagcctgggaggtgtgcccagaaagcttgtctgtagcgggttttgtgagagtgaacactttccactttttgacaccttatcctgatgtatggttccaggatttggattttgattttccaaatgtagcttgaaatttcaataaactttgctctgtttttctaaaaataaa

SEQ ID NO: 33008 - DNA, 1316 bp, Homo sapiens
  source 1..1316: mol_type = unassigned DNA
gaagtgagcccgaaggatccgctcggagctgtttgtccagctgtttctattcgcacccggagcagtacagccagaagggggccgagccgaaggtggctggctttaggcgctaatttccaactcttttcctcacagcttgtcttttccaggcaccctggagtcccctcaggccagctcggtgggcgcgcacctgccagccgcccctgacctcgcaggccaggcgacctccgagcctgagaagatggcccagtccaagctcgattgccgctcacctgtcggcctcgactgctgcaactgctgcctggacctggcccatcggagtgggctccagcgaggcagcagcggggagaacaacaacccgggcagccctacagtgagcaactttcggcaggattcgctagagccggtgctgcgggacccctgctacctgatcaacgagggcatctgcaaccgcaacatcgaccagaccatgctctccatcctgctcttcttccacagtgcctccggagccagcgtggtggccatagacaacaagatcgaacaggccatggatctggtgaagaatcatctgatgtatgctgtgagagaggaggtggagatcctgaaggagcagatccgagagctggtggagaagaactcccagctagagcgtgagaacaccctgttgaagaccctggcaagcccagagcagctggagaagttccagtcctgtctgagccctgaagagccagctcccgaatccccacaagtgcccgaggcccctggtggttctgcggtgtaagtggctctgtcctcagggtgggcagagccactaaacttgttttacctagttctttccagtttgtttttggctccccaagcatcatctcacgaggagaactttacacctagcacagctggtgccaagagatgtcctaaggacatggccacctgggtccactccagcgacagacccctgacaagagcaggtctctggaggctgagttgcatggggcctagtaacaccaagccagtgagcctctaatgctactgcgccctgggggctcccagggcctgggcaacttagctgcaactggcaaaggagaagggtagtttgaggtgtgacaccagtttgctccagaaagtttaaggggtctgtttctcatctccatggacatcttcaacagcttcacctgacaacgactgttcctatgaagaagccacttgtgttttaagcagaggcaacctctctcttctcctctgtttcgtgaaggcaggggacacagatgggagagattgagccaagtcagccttctgttggttaatatggtataatg

SEQ ID NO: 33009 - DNA, 546 bp, Homo sapiens
  source 1..546: mol_type = unassigned DNA
agggtaacgacagacggagatcaactaaggtggcaggtaaggttcagaaaaggagaaggacaacaaatttggagaaataggagaaggcaccctggagtcccctcaggccagctcggtgggcgcgcacctgccagccgcccctgacctcgcaggccaggcgacctccgagcctgagaagatggcccagtccaagctcgattgccgctcacctgtcggcctcgactgctgcaactgctgcctggacctggcccatcggagtgggctccagcgaggcagcagcggggagaacaacaacccgggcagccctacagtgagcaactttcggcagctgcaggaaaagctggtctttgagaacctcaataccgacaagctcaacagcataatgcggcaggattcgctagagccggtgctgcgggacccctgctacctgatcaacgagggcatctgcaaccgcaacatcgaccagaccatgctctccatcctgctcttcttccacagtgcctccggagccagcgtggtggccatagacaacaagatcgaacaggc

SEQ ID NO: 33010 - DNA, 576 bp, Homo sapiens
  source 1..576: mol_type = unassigned DNA
gggggctggccgagcgccgtgcgccgcttgggagaaggccggaagcttaccagccgagaaggaattcctagctagcttcagagccgggtaggtttgcctgggaccttgtaggccggctgtgggggactccccgggtcgcacagccccattgtttgcatattgcccgagcaggccacggtggcctgcgcgccccaggactcgcaagcagctccgatcggttggaactcggggcggcggcagcagcgctgagccggcctggatgaggagatgcagcttcctgcaggggccaaggaaggatctggggacaaactgtccggaactctgggccagggaggcgagaaggagagagagaggaagagccgaggcagatggaggactttggccacaactgccatgtactcaagagtagaaccgagtgggtaatgggtcgctttgctttttgtcttggcagtgcctccggagccagcgtggtggccatagacaacaagatcgaacaggccatggatctggtgaagaatcatctgatgtatgctgtgagagaggaggtggagatcctgaaggagcagatccgagagc

SEQ ID NO: 33011 - DNA, 567 bp, Homo sapiens
  source 1..567: mol_type = unassigned DNA
aagggtgcgggcggggtggggcgaggggtggagggacaggatccagccgctcggggcccccgcccgccagccggagaagtggcggaggaccgttctccgccgtcccctctaggcttgtcttttccaggcaccctggagtcccctcaggccagctcggtgggcgcgcacctgccagccgcccctgacctcgcaggccaggcgacctccgagcctgagaagatggcccagtccaagctcgattgccgctcacctgtcggcctcgactgctgcaactgctgcctggacctggcccatcggagtgggctccagcgaggcagcagcggggagaacaacaacccgggcagccctacagtgagcaactttcggcagctgcaggaaaagctggtctttgagaacctcaataccgacaagctcaacagcataatgcggcaggattcgctagagccggtgctgcgggacccctgctacctgatcaacgagggcatctgcaaccgcaacatcgaccagaccatgctctccatcctgctcttcttccacagtgcctccggagccagcgtggtggccata

SEQ ID NO: 33012 - DNA, 503 bp, Homo sapiens
  source 1..503: mol_type = unassigned DNA
aaaggccagacttgtgaatgaaggagccgatgcgggggtggggagtactgactgaaattattccaagtctctgagtcctgagaaaccctggaaacccaccacttgcccacccagaacatccctccatcttacagagctggggcacgcccctcaggcctgtgaacatgcaatcgctacatctattgaaagggtaacgacagacggagatcaactaaggtggcagcttgtcttttccaggcaccctggagtcccctcaggccagctcggtgggcgcgcacctgccagccgcccctgacctcgcaggccaggcgacctccgagcctgagaagatggcccagtccaagctcgattgccgctcacctgtcggcctcgactgctgcaactgctgcctggacctggcccatcggagtgggctccagcgaggcagcagcggggagaacaacaacccgggcagccctacagtgagcaactttcggcagctgcaggaaaagctggtctttgag

SEQ ID NO: 33013 - DNA, 425 bp, Homo sapiens
  source 1..425: mol_type = unassigned DNA
tctatttcaaaggccagacttgtgaatgaaggagccgatgcgggggtggggagtactgactgaaatcttgtcttttccaggcaccctggagtcccctcaggccagctcggtgggcgcgcacctgccagccgcccctgacctcgcaggccaggcgacctccgagcctgagaagatggcccagtccaagctcgattgccgctcacctgtcggcctcgactgctgcaactgctgcctggacctggcccatcggagtgggctccagcgaggcagcagcggggagaacaacaacccgggcagccctacagtgagcaactttcggcagctgcaggaaaagctggtctttgagaacctcaataccgacaagctcaacagcataatgcggcaggattcgctagagccggtgctgcgggacccctgctacctga

SEQ ID NO: 33014 - DNA, 956 bp, Homo sapiens
  source 1..956: mol_type = unassigned DNA
acatctattgaaagggtaacgacagacggagatcaactaaggtggcaggtaaggttcagaaaaggagaaggacaacaaatttggagaaataggagaagcttgtcttttccaggcaccctggagtcccctcaggccagctcggtgggcgcgcacctgccagccgcccctgacctcgcaggccaggcgacctccgagcctgagaagatggcccagtccaagctcgattgccgctcacctgtcggcctcgactgctgcaactgctgcctggacctggcccatcggagtgggctccagcgaggcagcagcggggagaacaacaacccgggcagccctacagtgagcaactttcggcagctgcaggaaaagctggtctttgagaacctcaataccgacaagctcaacagcataatgcggcaggattcgctagagccggtgctgcgggacccctgctacctgatcaacgagggcatctgcaaccgcaacatcgaccagaccatgctctccatcctgctcttcttccacagtgcctccggagccagcgtggtggccatagacaacaagatcgaacaggccatggatctggtgaagaatcatctgatgtatgctgtgagagaggaggtggagatcctgaaggagcagatccgagagctggtggagaagaactcccagctagagcgtgagaacaccctgttgaagaccctggcaagcccagagcagctggagaagttccagtcctgtctgagccctgaagagccagctcccgaatccccacaagtgcccgaggcccctggtggttctgcggtgtaagtggctctgtcctcagggtgggcagagccactaaacttgttttacctagttctttccagtttgtttttggctccccaagcatcatctcacgaggagaactttacacctagcacagctggtgccaagagatgtcctaaggacatggccac

SEQ ID NO: 33015 - DNA, 521 bp, Homo sapiens
  source 1..521: mol_type = unassigned DNA
gcgtgcgtatttctggcggaggatgcgccatgagcgctgaaagagcctgaaccgaagcgtccggctcgccgagagagtgagagccgggccggctcccaggagcgcgggcgaggcttgtcttttccaggcaccctggagtcccctcaggccagctcggtgggcgcgcacctgccagccgcccctgacctcgcaggccaggcgacctccgagcctgagaagatggcccagtccaagctcgattgccgctcacctgtcggcctcgactgctgcaactgctgcctggacctggcccatcggagtgggctccagcgaggcagcagcggggagaacaacaacccgggcagccctacagtgagcaactttcggcagctgcaggaaaagctggtctttgagaacctcaataccgacaagctcaacagcataatgcggcaggattcgctagagccggtgctgcgggacccctgctacctgatcaacgagggcatctgcaaccgcaacatcgaccagaccatgctctccat

SEQ ID NO: 33016 - DNA, 581 bp, Homo sapiens
  source 1..581: mol_type = unassigned DNA
agagagaaggaaggggaggactgaggagagacggcgaaggggcagagggaaaccgggacagagactgcctctgaggggttcagggaagagaggacacagcgagctggggaaaggagcttgtcttttccaggcaccctggagtcccctcaggccagctcggtgggcgcgcacctgccagccgcccctgacctcgcaggccaggcgacctccgagcctgagaagatggcccagtccaagctcgattgccgctcacctgtcggcctcgactgctgcaactgctgcctggacctggcccatcggagtgggctccagcgaggcagcagcggggagaacaacaacccgggcagccctacagtgagcaactttcggcagctgcaggaaaagctggtctttgagaacctcaataccgacaagctcaacagcataatgcggcaggattcgctagagccggtgctgcgggacccctgctacctgatcaacgagggcatctgcaaccgcaacatcgaccagaccatgctctccatcctgctcttcttccacagtgcctccggagccagcgtggtggccatagacaacaagat

SEQ ID NO: 33017 - DNA, 569 bp, Homo sapiens
  source 1..569: mol_type = unassigned DNA
atgcaatcgctacatctattgaaagggtaacgacagacggagatcaactaaggtggcagccctacagtgagcaactttcggcagctgcaggaaaagctggtctttgagaacctcaataccgacaagctcaacagcataatgcggcaggattcgctagagccggtgctgcgggacccctgctacctgatcaacgagggcatctgcaaccgcaacatcgaccagaccatgctctccatcctgctcttcttccacagtgcctccggagccagcgtggtggccatagacaacaagatcgaacaggccatggatctggtgaagaatcatctgatgtatgctgtgagagaggaggtggagatcctgaaggagcagatccgagagctggtggagaagaactcccagctagagcgtgagaacaccctgttgaagaccctggcaagcccagagcagctggagaagttccagtcctgtctgagccctgaagagccagctcccgaatccccacaagtgcccgaggcccctggtggttctgcggtgtaagtggctctgtcctcagggtgggcagagccact

SEQ ID NO: 33018 - DNA, 802 bp, Homo sapiens
  source 1..802: mol_type = unassigned DNA
gctgctctatttcaaaggccagacttgtgaatgaaggagccgatgcgggggtggggagtactgactgaaatgtaagtcagttttacgtgaaaactgaacgtcatgaaaagtttagttttttcagacactaatcgttatttaatcctacacatttaaagtattccaagtctctgagtcctgagaaaccctggaaacccaccacttgcccacccagaacatccctccatcttacagagctggggcacgcccctcaggcctgtgaacatgcaatcgctacatctattgaaagggtaacgacagacggagatcaactaaggtggcagcttgtcttttccaggcaccctggagtcccctcaggccagctcggtgggcgcgcacctgccagccgcccctgacctcgcaggccaggcgacctccgagcctgagaagatggcccagtccaagctcgattgccgctcacctgtcggcctcgactgctgcaactgctgcctggacctggcccatcggagtgggctccagcgaggcagcagcggggagaacaacaacccgggcagccctacagtgagcaactttcggcagctgcaggaaaagctggtctttgagaacctcaataccgacaagctcaacagcataatgcggcaggattcgctagagccggtgctgcgggacccctgctacctgatcaacgagggcatctgcaaccgcaacatcgaccagaccatgctctccatcctgctcttcttccacagtgcctccggagccagcgtggtggccatagacaacaagatcgaacaggccatgg

SEQ ID NO: 33019 - DNA, 2383 bp, Homo sapiens
  source 1..2383: mol_type = unassigned DNA
ggaggaggaggaggaggagaggagcagtcagcaggcccgaggaggcaggacttcctggtgtgggggttgtcaacagcccagaaagagaaagacggagaggcagagacccaggggagccgaggagcggagacacggacccagcagggtcacgcgggaggagactcgggacacccactcgctggctgccaccgggagcagaggggggctcggccgccccctcccacatcagtctccagacccttggggcttcagaggccgctcctaggctcctcggaggaggcgcgggtttcttcttttccggagagcaaactttcctcggagatgcctggcaggatgagccgcggcccccggagaggacgggacagcctctgatcgccgcctgcgtgccccgccactgcccatggccaggaggccccagggaacggacagcccgacctcttaggcgccgggaccctcaggctcagatcagtggccgaggccccagagtttgcaaactcagctctggagttcagcagcaacagcagcaggaaaaacctgcccctgctcccccctcccgccacctcccctctcctcttctcccctcacccagcaggcacccccggttcccgccaggccctcctgccatgtcggacccagacgtccccaggggctcggatgtccccgccatgtggcccccttgttccaggggtgcctgagccccttcaaggagccccaacccacccccaaccttggcccagccctgagccccagggaccatgagcgggggcaagaagaagagtagtttccaaatcaccagcgtcaccacggactatgagggccctgggagcccaggggcttcggatccccctaccccacagcccccaaccgggcccccgccccgcctgcccaatggggagcccagccccgatccggggggcaagggcaccccccggaatggctccccaccacctggggccccttcctcccgtttccgggtggtgaagctgccccacggcctgggagagccttatcgccgcggtcgctggacgtgtgtggatgtttatgagcgagacctggagccccacagcttcggcggactcctggagggaattcgaggggcctcagggggcgccgggggcagatctttggattccaggttggagctggccagcctcggcctgggcgcccccaccccaccgtcaggcctgtctcagggccccacctcctggctccgtccaccccccacctctcctggacctcaggcccgctccttcactgggggactgggccagctggtggtgcccagcaaagccaaggcagagaaacccccactgtcggcctcctcaccccagcagcgccccccagagcctgagaccggtgagagtgcgggcacatcccgggctgccacgcccctgccctctctgagggtggaagcggaggctgggggctcaggggccaggacccctccactgtcccggaggaaagctgtagacatgcggctgcggatggagttgggtgctccagaagagatggggcaggtgcccccacttgactctcgccccagctccccagccctctacttcacccacgatgccagcctggttcacaaatctccagaccccttcggagcagtagcagctcagaagttcagcctggcccactccatgttggccatcagtggtcacctagacagcgacgatgatagtggctccggaagcctggttggcattgacaacaaaatcgagcaagccatggacttggtgaagtcccacctcatgtttgcggtccgggaggaggtggaggtgctgaaggagcagatccgggaattggcggagcggaacgctgcgctggagcaggagaatgggctgctgcgcgccctggccagcccggagcagctggctcagctgccctcctcgggggtcccacggcttgggccccctgcgcccaatgggccctccgtctgagcctcccttcccttacaatgtgcctttggggctgcccggccttgcgtcagccgcctgccccctcttcctatgcagctttaatgtccccgtgtccccggggtgggagttcaaggctcagtaatggcctggtcccccggcccctgccccatctcctcatcatccccagccttgatggaggagggagggcttcaggacggggcgtcagagggagccccctctgggagggaaccaacccccaccctccctcctgggaccccccagcagtagacggcttgggggagtcggaggctccccggcagacaccccacccccatcttgttcccttgaggtgcctcctctcctctgcccaggggagggagtgtggacagtatctggaagttctgggattcaggttgttattaaaataataataataattaaaaactctgaagaaacttgaa

SEQ ID NO: 33020 - DNA, 3326 bp, Homo sapiens
  source 1..3326: mol_type = unassigned DNA
gcggcggttagctcccagttcggcctctgaggaaaacgggcgttcgcctgcggttggtccgactgttagcaacatgagcggcctggatggggtcaagaggaccactcccctccaaacccacagcatcattatttctgaccaagtcccgagcgaccaggacgcacaccagtacctgaggctccgcgaccaaagcgaggcgacacaggtgatggcggagccgggtgagggaggctcggagaccgtcgcgctcccgcctccaccgccttcagaggaggggggcgtaccccaggatgccgcgggccgtggcggtactccccagatccgagttgttgggggtcgcggtcatgtggcgatcaaagccgggcaggaagagggccagcctcccgccgaaggcctggcagccgcttctgtggtgatggcagccgaccgcagcctgaaaaagggcgttcagggtggagagaaggccctagaaatctgtggcgcccagagatccgcgtctgagctgacggcgggggcggaggctgaggcggaggaggtgaagacaggaaagtgcgccaccgtctcagcagccgtggctgagagggagagcgctgaggtggtgaaggaaggcctggcggagaaggaggtaatggaggagcagatggaggtagaggagcagccgccagaaggtgaagaaatagaagtggcggaggaggatagattggaggaggaggcgagggaggaagaagggccctggcctttgcatgaggctctccgcatggaccctctggaggccatccagctggaactggacactgtgaatgctcaggccgacagggccttccaacagctggagcacaagtttgggcggatgcgtcgacactacctggagcggaggaactacatcattcagaatatcccgggcttctggatgactgcttttcgaaaccacccccagttgtccgccatgattaggggccaagatgcagagatgttaaggtacataaccaatttagaggtgaaggaactcagacaccctagaaccggttgcaagttcaagttcttctttagaagaaacccctacttcagaaacaagctgattgtcaaggaatatgaggtaagatcctccggccgagtggtgtctctttctactccaattatatggcgcagggggcatgaaccccagtccttcattcgcagaaaccaagacctcatctgcagcttcttcacttggttttcagaccacagccttccagagtccgacaaaattgctgagattattaaagaggatctgtggccaaatccactgcaatactacctgttgcgtgaaggagtccgtagagcccgacgtcgcccgctaagggagcctgtagagatccccaggccctttgggttccagtctggttaacatttgcccttgggaatactcctgcacaaggtctcctaccaccttctgctggacctgtgcttgggcatcagcaatgagtatgccttctattgtgctttgtttttgctgacttttctgcaccctgtttcctttggatattcagttctctcaacctcaagattgagacggtggtgggtatgcttctccacttccatatgaccttcatgctgttctggaatatcacatgctacgaggtcatccttcacactacttgtaagccaagcaaatgatactgtagattgtactgcctttatctgcactgcttggaccctgtttattcccagggcctctgaactggttgctgtcacttggatttctagctttgggagcctgttccacctactcagctctgcattgagcagtatgggcacatgccctgtggacagttactggacgttaatgaactcagaggagaaaagcagtgagccacttgttctgtgtgatttatggtacttcattgctcttccttcacctctagtcactttctattgctacctgccctacattggctcctgccaaggtccctctctctccctgttttccttttttttttttttttttttttttttgagacggaggacggagtcttgctctgtcgcccaggttggagtgcagtggcgcgatctcggctcactgcaacctccacctcccgggttcaagcgattctcctgcctcagcctcccgagtagctgggactacaggcgcgcgccgccacgcccggctaatttttatatttttagtagagacggggtttcaccatgctggccaggctggtctcgaaccccgatctcgtgatccgccctccttagcctcccaatcctctcttaaaaaagtgatagctcagaaacatttgtaaaagcaaggtttttatttcattttggctctgtcattttcagaggcaaagaagttggcctgtaaaatagagtgctagagctcttacgcccctccccttcttcccaacttcctacttcctagcccttttatcaactcctagaatagttaaagagagacacatctagatgggatgaaaggtgccctaagcaggagaaactgaacaaaaggctagaggcatgggccaggtaaaaattgggcctagagtgaagactgtgctgtcgttaagagctttcgaggaaggagtacttactccccaatgatgatgaatggaaaaatacttttcagggagaattgaaggggttaaagtgttaaatatgttgcctagacaagggttctttaaagaaagacagcgcaactttgaatgctttcttacttgttttgtgacctaatttatgtggaagattgttatttcattaggatttagtaaaatttttttttctgattctaaacttattgtgaaaattgagctgtacagatattcttttgatttcaattgggaacatttggaagaacaacagtcttacttgcctgtacaatatagagacatatgaatagtcataacagttttcaacttgttcttgtttctgttaaactatattcctagaaacatagtttgaacaacttggtctttgttaggcttgtcaaattgccttcatggaaaaataatctacaaaagtatggtttaattgattgtcttacatgataattttccctggtaacaacttagtaagtgatatatcttttttcctaaattgcttaaatactgtgaaattgctctgacaaattggaagtgtaccattggcatatttgtcttcctttttatgcatgatggtaaaataaaagcatgttgttctgctagatttcttatttttcaccttacccataaatgtaatgcttgaatgaagttgttcatattaattaaaaattatggaatcattaaagtcctttaatccattaaagttcttaatggattaaaatcattaaagttcttaatggattaaaatca

SEQ ID NO: 33021 - DNA, 1108 bp, Homo sapiens
  source 1..1108: mol_type = unassigned DNA
agttcggcctctgaggaaaacgggcgttcgcctgcggttggtccgactgttagcaacatgagcggcctggatggggtcaagaggaccactcccctccaaacccacagcatcattatttctgaccaagtcccgagcgaccaggacgcacaccagtacctgaggctccgcgaccaaagcgaggcgacacaggtgatggcggagccgggtgagggaggctcggagaccgtcgcgctcccgcctccaccgccttcagaggaggggggcgtaccccaggatgccgcgggccgtggcggtactccccagatccgagttgttgggggtcgcggtcatgtggcgatcaaagccgggcaggaagagggccagcctcccgccgaaggcctggcagccgcttctgtggtgatggcagccgaccgcagcctgaaaaagggcgttcagggtggagagaaggccctagaaatctgtggcgcccagagatccgcgtctgagctgacggcgggggcggaggctgaggcggaggaggtgaagacaggaaagtgcgccaccgtctcagcagccgtggccaagatgcagagatgttaaggtacataaccaatttagaggtgaaggaactcagacaccctagaaccggttgcaagttcaagttcttctttagaagaaacccctacttcagaaacaagctgattgtcaaggaatatgaggtaagatcctccggccgagtggtgtctctttctactccaattatatggcgcagggggcatgaaccccagtccttcattcgcagaaaccaagacctcatctgcagcttcttcacttggttttcagaccacagccttccagagtccgacaaaattgctgagattattaaagaggatctgtggccaaatccactgcaatactacctgttgcgtgaaggagtccgtagagcccgacgtcgcccgctaagggagcctgtagagatccccaggccctttgggttccagtctggttaacatttgcccttgggaatactcctgcacaaggtctcctaccaccttctgctggacctgtgcttgggcatcagcaatgagtatgccttctattgtgctttgtttttgctgacttttctgca

SEQ ID NO: 33022 - DNA, 2815 bp, Homo sapiens
  source 1..2815: mol_type = unassigned DNA
agagcgaggtggtgaggagagctggttgcgtgagtctcctcagctctgcttaccggtgcgactagcggcagcgacgcggctaaaagcgaaggggcgagtgcgagtcccctgagctgtacgaacgcggtcgccatggaccgcccagatgaggggcctccggccaagacccgccgcctgagcagctccgagtctccacagcgcgacccgcccccgccgccgccgccgccgccgctcctccgactgccgctgcctccaccccagcagcgcccgaggctccaggaggaaacggaggcggcacaggtgctggccgatatgaggggggtgggactgggccccgcgctgcccccgccgcctccctatgtcattctcgaggagggggggatccgcgcatacttcacgctcggtgctgagtgtcccggctgggattctaccatcgagtcggggtatggggaggcgcccccgcccacggagagcctggaagcactccccactcctgaggcctcgggggggagcctggaaatcgattttcaggttgtacagtcgagcagttttggtggagagggggccctagaaacctgtagcgcagtggggtgggcgccccagaggttagttgacccgaagagcaaggaagaggcgatcatcatagtggaggatgaggatgaggatgagcgggagagtatgaggagcagcaggaggcggcggcggcggcggaggaggaagcagaggaaggtgaagagggaaagcagagagagaaatgccgagaggatggagagcatcctgcaggcactggaggatattcagctggatctggaggcagtgaacatcaaggcaggcaaagccttcctgcgtctcaagcgcaagttcatccagatgcgaagacccttcctggagcgcagagacctcatcatccagcatatcccaggcttctgggtcaaagcattcctcaaccaccccagaatttcaattttgatcaaccgacgtgatgaagacattttccgctacttgaccaatctgcaggtacaggatctcagacatatctccatgggctacaaaatgaagctgtacttccagactaacccctacttcacaaacatggtgattgtcaaggagttccagcgcaaccgctcaggccggctggtgtctcactcaaccccaatccgctggcaccggggccaggaaccccaggcccgtcgtcacgggaaccaggatgcgagccacagctttttcagctggttctcaaaccatagcctcccagaggctgacaggattgctgagattatcaagaatgatctgtgggttaaccctctacgctactacctgagagaaaggggctccaggataaagagaaagaagcaagaaatgaagaaacgtaaaaccaggggcagatgtgaggtggtgatcatggaagacgcccctgactattatgcagtggaagacattttcagcgagatctcagacattgatgagacaattcatgacatcaagatctctgacttcatggagaccaccgactacttcgagaccactgacaatgagataactgacatcaatgagaacatctgcgacagcgagaatcctgaccacaatgaggtccccaacaacgagaccactgataacaacgagagtgctgatgaccacgaaaccactgacaacaatgagagtgcagatgacaacaacgagaatcctgaagacaataacaagaacactgatgacaacgaagagaaccctaacaacaacgagaacacttacggcaacaacttcttcaaaggtggcttctggggcagccatggcaacaaccaggacagcagcgacagtgacaatgaagcagatgaggccagtgatgatgaagataatgatggcaacgaaggtgacaatgagggcagtgatgatgatggcaatgaaggtgacaatgaaggcagcgatgatgacgacagagacattgagtactatgagaaagttattgaagactttgacaaggatcaggctgactacgaggacgtgatagagatcatctcagacgaatcagtggaagaagagggcattgaggaaggcatccagcaagatgaggacatctatgaggaaggaaactatgaggaggaaggaagtgaagatgtctgggaagaaggggaagattcggacgactctgacctagaggatgtgcttcaggtcccaaacggttgggccaatccggggaagagggggaaaaccggataagggttttccccttttggggatcacctctctgtatcccccacccactatcccatttgccctcctcctcagctagggccacgcggccccacattgcacttctggggggtgaccgacttcgtacacgggtttaaagtttatttttatggtttagtcattgcagagttcttattttggggggagggaaagggggctagtccccttcttttggccctccgcccccgcaggcttctgtgtgctgctaactgtatttattgtgatgccttggtcagggcccctctacccacttctcccagtcagttgtggccccagcccctctccctgtgctgtgtggagtggacaccctgacccccgaagcggggagggccgctgtggccttcgtcacagccgcgcagtgcccatggaggcgctgctgccaccttcctctcccaagttctttctccatccctctcctcttcccgccgcgccgctagcccgcctcggtgtctatgcaaggccgcttcgccattgcggtattctttgcggtattcttgtccccgtcccccagaaggctcgcctctccccgtggaccctgttaatcccaataaaattctgagcaagttca

SEQ ID NO: 33023 - DNA, 2712 bp, Homo sapiens
  source 1..2712: mol_type = unassigned DNA
cccgcggccggcccgagccgccacccggcgcccggcaggggggagcctggctgcgggcggggaccggggggcgggccgcgccgcgcggagaaaagcgctggccggagggcccgcggccgggccgccggggtgagcgtgccgaggcggctgtggcgcaggcttccagcccccaccatgccgtggcccctgctgctgctgctggccgtgagtggggcccagacaacccggccatgcttccccgggtgccaatgcgaggtggagaccttcggccttttcgacagcttcagcctgactcgggtggattgtagcggcctgggcccccacatcatgccggtgcccatccctctggacacagcccacttggacctgtcctccaaccggctggagatggtgaatgagtcggtgttggcggggccgggctacacgacgttggctggcctggatctcagccacaacctgctcaccagcatctcacccactgccttctcccgccttcgctacctggagtcgcttgacctcagccacaatggcctgacagccctgccagccgagagcttcaccagctcacccctgagcgacgtgaaccttagccacaaccagctccgggaggtctcagtgtctgccttcacgacgcacagtcagggccgggcactacacgtggacctctcccacaacctcattcaccgcctcgtgccccaccccacgagggccggcctgcctgcgcccaccattcagagcctgaacctggcctggaaccggctccatgccgtgcccaacctccgagacttgcccctgcgctacctgagcctggatgggaaccctctagctgtcattggtccgggtgccttcgcggggctgggaggccttacacacctgtctctggccagcctgcagaggctccctgagctggcgcccagtggcttccgtgagctaccgggcctgcaggtcctggacctgtcgggcaaccccaagcttaactgggcaggagctgaggtgttttcaggcctgagctccctgcaggagctggacctttcgggcaccaacctggtgcccctgcctgaggcgctgctcctccacctcccggcactgcagagcgtcagcgtgggccaggatgtgcggtgccggcgcctggtgcgggagggcacctacccccggaggcctggctccagccccaaggtggccctgcactgcgtagacacccgggattctgctgccaggggccccaccatcttgtgacaaatggtgtggcccagggccacataacagactgctgtcctgggctgcctcaggtcccgagtaacttatgttcaatgtgccaacaccagtggggagcccgcaggcctatgtggcagcgtcaccacaggagttgtgggcctaggagaggctttggacctgggagccacacctaggagcaaagtctcacccctttgtctacgttgcttccccaaaccatgagcagagggacttcgatgccaaaccagactcgggtcccctcctgcttcccttccccacttatcccccaagtgccttccctcatgcctgggccggcctgacccgcaatgggcagagggtgggtgggaccccctgctgcagggcagagttcaggtccactgggctgagtgtccccttgggcccatggcccagtcactcaggggcgagtttcttttctaacatagccctttctttgccatgaggccatgaggcccgcttcatccttttctatttccctagaaccttaatggtagaaggaattgcaaagaatcaagtccacccttctcatgtgacagatggggaaactgaggccttgagaaggaaaaaggctaatctaagttcctgcgggcagtggcatgactggagcacagcctcctgcctcccagcccggacccaatgcactttcttgtctcctctaataagccccaccctccccgcctgggctccccttgctgcccttgcctgttccccattagcacaggagtagcagcagcaggacaggcaagagcctcacaagtgggactctgggcctctgaccagctgtgcggcatgggctaagtcactctgcccttcggagcctctggaagcttagggcacattggttccagcctagccagtttctcaccctgggttggggtcccccagcatccagactggaaacctacccattttcccctgagcatcctctagatgctgccccaaggagttgctgcagttctggagcctcatctggctgggatctccaaggggcctcctggattcagtccccactggccctgagcacgacagcccttcttaccctcccaggaatgccgtgaaaggagacaaggtctgcccgacccatgtctatgctctacccccagggtagcatctcagcttccgaaccctgggctgtttccttagtcttcattttataaaagttgttgcctttttaacggagtgtcactttcaaccggcctcccctacccctgctggccggggatggagacatgtcatttgtaaaagcagaaaaaggttgcatttgttcacttttgtaatattgtcctgggcctgtgttggggtgttgggggaagctgggcatcagtggccacatgggcatcaggggctggccccacagagaccccacagggcagtgagctctgtcttcccccacctgcctagcccatcatctatctaaccggtccttgatttaataaacactataaaaagttctttgcttta

SEQ ID NO: 33024 - DNA, 2507 bp, Homo sapiens
  source 1..2507: mol_type = unassigned DNA
gaaaagcgctggccggagggcccgcggccgggccgccggggtgagcgtgccgaggcggctgtggcgcaggcttccagcccccaccatgccgtggcccctgctgctgctgctggccgtgagtggggcccagacaacccggccatgcttccccgggtgccaatgcgaggtggagaccttcggccttttcgacagcttcagcctgactcgggtggattgtagcggcctgggcccccacatcatgccggtgcccatccctctggacacagcccacttggacctgtcctccaaccggctggagatggtgaatgagtcggtgttggcggggccgggctacacgacgttggctggcctggatctcagccacaacctgctcaccagctcacccctgagcgacgtgaaccttagccacaaccagctccgggaggtctcagtgtctgccttcacgacgcacagtcagggccgggcactacacgtggacctctcccacaacctcattcaccgcctcgtgccccaccccacgagggccggcctgcctgcgcccaccattcagagcctgaacctggcctggaaccggctccatgccgtgcccaacctccgagacttgcccctgcgctacctgagcctggatgggaaccctctagctgtcattggtccgggtgccttcgcggggctgggaggccttacacacctgtctctggccagcctgcagaggctccctgagctggcgcccagtggcttccgtgagctaccgggcctgcaggtcctggacctgtcgggcaaccccaagcttaactgggcaggagctgaggtgttttcaggcctgagctccctgcaggagctggacctttcgggcaccaacctggtgcccctgcctgaggcgctgctcctccacctcccggcactgcagagcgtcagcgtgggccaggatgtgcggtgccggcgcctggtgcgggagggcacctacccccggaggcctggctccagccccaaggtggccctgcactgcgtagacacccgggattctgctgccaggggccccaccatcttgtgacaaatggtgtggcccagggccacataacagactgctgtcctgggctgcctcaggtcccgagtaacttatgttcaatgtgccaacaccagtggggagcccgcaggcctatgtggcagcgtcaccacaggagttgtgggcctaggagaggctttggacctgggagccacacctaggagcaaagtctcacccctttgtctacgttgcttccccaaaccatgagcagagggacttcgatgccaaaccagactcgggtcccctcctgcttcccttccccacttatcccccaagtgccttccctcatgcctgggccggcctgacccgcaatgggcagagggtgggtgggaccccctgctgcagggcagagttcaggtccactgggctgagtgtccccttgggcccatggcccagtcactcaggggcgagtttcttttctaacatagccctttctttgccatgaggccatgaggcccgcttcatccttttctatttccctagaaccttaatggtagaaggaattgcaaagaatcaagtccacccttctcatgtgacagatggggaaactgaggccttgagaaggaaaaaggctaatctaagttcctgcgggcagtggcatgactggagcacagcctcctgcctcccagcccggacccaatgcactttcttgtctcctctaataagccccaccctccccgcctgggctccccttgctgcccttgcctgttccccattagcacaggagtagcagcagcaggacaggcaagagcctcacaagtgggactctgggcctctgaccagctgtgcggcatgggctaagtcactctgcccttcggagcctctggaagcttagggcacattggttccagcctagccagtttctcaccctgggttggggtcccccagcatccagactggaaacctacccattttcccctgagcatcctctagatgctgccccaaggagttgctgcagttctggagcctcatctggctgggatctccaaggggcctcctggattcagtccccactggccctgagcacgacagcccttcttaccctcccaggaatgccgtgaaaggagacaaggtctgcccgacccatgtctatgctctacccccagggtagcatctcagcttccgaaccctgggctgtttccttagtcttcattttataaaagttgttgcctttttaacggagtgtcactttcaaccggcctcccctacccctgctggccggggatggagacatgtcatttgtaaaagcagaaaaaggttgcatttgttcacttttgtaatattgtcctgggcctgtgttggggtgttgggggaagctgggcatcagtggccacatgggcatcaggggctggccccacagagaccccacagggcagtgagctctgtcttcccccacctgcctagcccatcatctatctaaccggtccttgatttaataaacact

SEQ ID NO: 33025 - DNA, 542 bp, Homo sapiens
  source 1..542: mol_type = unassigned DNA
agaccccggctgggaggaagaggcgagcggtgggtcccaggctccggccctgggctggggagaggaagggacagggcggctggcgttgccctccccgcgcttcttggaaagagtgtgatccagagttgcgtctgtttggtagggagacaggctccgctttgagacccactctccgtttgcagcccgcccccggggtagggggccaaccctcggacccgcccccaccatgccgtggcccctgctgctgctgctggccgtgagtggggcccagacaacccggccatgcttccccgggtgccaatgcgaggtggagaccttcggccttttcgacagcttcagcctgactcgggtggattgtagcggcctgggcccccacatcatgccggtgcccatccctctggacacagcccacttggacctgtcctccaaccggctggagatggtgaatgagtcggtgttggcggggccgggctacacgacgttggctggcctggatctcagccacaacctgctcaccagcatctcacccactgccttctccc

SEQ ID NO: 33026 - DNA, 3554 bp, Homo sapiens
  source 1..3554: mol_type = unassigned DNA
gtacacagaagtcaagaattgaggtttgggaacctctgcctagatttcagaagatgtatggaaacacctggatgcccaggcaaaagtttgctgcaggggtgggaccctcatggagaacctctgctagggcagtgcagaaaggaaatgtggggttggagtagagtccctactggggcaccgcctagtggagctgtgagaagaggggcaccatcctctagaccgcagaatggcagatccactaacagcttgcactgtgcacctggaaaagctgcagacactcaacgccagtccgtgaaagcagccagaaaggaggctgcaccctgcaaagccacgggggtggagctgcccaagactgtgggaacccacctcttgcatcagcatgactcagatatgcgggacatggagtcaaaggagatcattttggaactttaataagatttgactgccctgctggattttgaacttgcctggggcctgtagcccctttgttttggctaatttcttccatgtggaacagctgtatttacccaatgcctgtacccccactgtatctaggaagtaactaacttgcttttgattttacaggctcgtaggtggaagggacttgtctcagatgagacattggactgtggacttttgggttaatactgaaatgagttaagactttgggggactgttgggaaggcatgattggttttgaaatgtgagaacatgagatttgggagggaccaggggtggaatgatatggtttagctgtgcccgcacccaaatctcaacttgaattgtatctcccagtattcccatgtgttgtgggagggacccagtgggaggtaattgaatcatggggccagtctttcccgagctattctcgtgatagtgaataagtctcacaagatctgatgggtttatcaggggcttcagcttttgcttcctcctcattctctcttgccgccgccatgtaagaagtgccttttgccttccaccatgattgttagaccttccacagccacgtggaattcccccaccatgccgtggcccctgctgctgctgctggccgtgagtggggcccagacaacccggccatgcttccccgggtgccaatgcgaggtggagaccttcggccttttcgacagcttcagcctgactcgggtggattgtagcggcctgggcccccacatcatgccggtgcccatccctctggacacagcccacttggacctgtcctccaaccggctggagatggtgaatgagtcggtgttggcggggccgggctacacgacgttggctggcctggatctcagccacaacctgctcaccagcatctcacccactgccttctcccgccttcgctacctggagtcgcttgacctcagccacaatggcctgacagccctgccagccgagagcttcaccagctcacccctgagcgacgtgaaccttagccacaaccagctccgggaggtctcagtgtctgccttcacgacgcacagtcagggccgggcactacacgtggacctctcccacaacctcattcaccgcctcgtgccccaccccacgagggccggcctgcctgcgcccaccattcagagcctgaacctggcctggaaccggctccatgccgtgcccaacctccgagacttgcccctgcgctacctgagcctggatgggaaccctctagctgtcattggtccgggtgccttcgcggggctgggaggccttacacacctgtctctggccagcctgcagaggctccctgagctggcgcccagtggcttccgtgagctaccgggcctgcaggtcctggacctgtcgggcaaccccaagcttaactgggcaggagctgaggtgttttcaggcctgagctccctgcaggagctggacctttcgggcaccaacctggtgcccctgcctgaggcgctgctcctccacctcccggcactgcagagcgtcagcgtgggccaggatgtgcggtgccggcgcctggtgcgggagggcacctacccccggaggcctggctccagccccaaggtggccctgcactgcgtagacacccgggattctgctgccaggggccccaccatcttgtgacaaatggtgtggcccagggccacataacagactgctgtcctgggctgcctcaggtcccgagtaacttatgttcaatgtgccaacaccagtggggagcccgcaggcctatgtggcagcgtcaccacaggagttgtgggcctaggagaggctttggacctgggagccacacctaggagcaaagtctcacccctttgtctacgttgcttccccaaaccatgagcagagggacttcgatgccaaaccagactcgggtcccctcctgcttcccttccccacttatcccccaagtgccttccctcatgcctgggccggcctgacccgcaatgggcagagggtgggtgggaccccctgctgcagggcagagttcaggtccactgggctgagtgtccccttgggcccatggcccagtcactcaggggcgagtttcttttctaacatagccctttctttgccatgaggccatgaggcccgcttcatccttttctatttccctagaaccttaatggtagaaggaattgcaaagaatcaagtccacccttctcatgtgacagatggggaaactgaggccttgagaaggaaaaaggctaatctaagttcctgcgggcagtggcatgactggagcacagcctcctgcctcccagcccggacccaatgcactttcttgtctcctctaataagccccaccctccccgcctgggctccccttgctgcccttgcctgttccccattagcacaggagtagcagcagcaggacaggcaagagcctcacaagtgggactctgggcctctgaccagctgtgcggcatgggctaagtcactctgcccttcggagcctctggaagcttagggcacattggttccagcctagccagtttctcaccctgggttggggtcccccagcatccagactggaaacctacccattttcccctgagcatcctctagatgctgccccaaggagttgctgcagttctggagcctcatctggctgggatctccaaggggcctcctggattcagtccccactggccctgagcacgacagcccttcttaccctcccaggaatgccgtgaaaggagacaaggtctgcccgacccatgtctatgctctacccccagggtagcatctcagcttccgaaccctgggctgtttccttagtcttcattttataaaagttgttgcctttttaacggagtgtcactttcaaccggcctcccctacccctgctggccggggatggagacatgtcatttgtaaaagcagaaaaaggttgcatttgttcacttttgtaatattgtcctgggcctgtgttggggtgttgggggaagctgggcatcagtggccacatgggcatcaggggctggccccacagagaccccacagggcagtgagctctgtcttcccccacctgcctagcccatcatctatctaaccggtccttgatttaataaacactataaaaagtt

SEQ ID NO: 33027 - DNA, 643 bp, Homo sapiens
  source 1..643: mol_type = unassigned DNA
aataaggaaagaagcagcaagcagactgggtgtgttaacaagtctgggccactgcaggaggtacattgcccaatttctgcaccccgaggccctccaaagtctaggagaagctcctgggaggtccagggcccaagaccaaagcctctatcaactctcccacctgtgaactgcccctctcccaagcccccaccatgccgtggcccctgctgctgctgctggccgtgagtggggcccagacaacccggccatgcttccccgggtgccaatgcgaggtggagaccttcggccttttcgacagcttcagcctgactcgggtggattgtagcggcctgggcccccacatcatgccggtgcccatccctctggacacagcccacttggacctgtcctccaaccggctggagatggtgaatgagtcggtgttggcggggccgggctacacgacgttggctggcctggatctcagccacaacctgctcaccagcatctcacccactgccttctcccgccttcgctacctggagtcgcttgacctcagccacaatggcctgacagccctgccagccgagagcttcaccagctcacccctgagcgacgtgaaccttagccacaaccagctccgggaggtctcagtgtctgcctt

SEQ ID NO: 33028 - DNA, 3010 bp, Homo sapiens
  source 1..3010: mol_type = unassigned DNA
agcattgaccaataggagaccgtagtgatagcgacggggaaattcaaacgtgtttgcggaaaggagtttgggttccatcttttcatttccccagcgcagctttctgtagaaatggaatccgaggatttaagtggcagagaattgacaattgattccataatgaacaaagtgagagacattaaaaataagtttaaaaatgaagaccttactgatgaactaagcttgaataaaatttctgctgatactacagataactcgggaactgttaaccaaattatgatgatggcaaacaacccagaggactggttgagtttgttgctcaaactagagaaaaacagtgttccgctaagtgatgctcttttaaataaattgattggtcgttacagtcaagcaattgaagcgcttcccccagataaatatggccaaaatgagagttttgctagaattcaagtgagatttgctgaattaaaagctattcaagagccagatgatgcacgtgactactttcaaatggccagagcaaactgcaagaaatttgcttttgttcatatatcttttgcacaatttgaactgtcacaaggtaatgtcaaaaaaagtaaacaacttcttcaaaaagctgtagaacgtggagcagtaccactagaaatgctggaaattgccctgcggaatttaaacctccaaaaaaagcagctgctttcagaggaggaaaagaagaatttatcagcatctacggtattaactgcccaagaatcattttccggttcacttgggcatttacagaataggaacaacagttgtgattccagaggacagactactaaagccaggtttttatatggagagaacatgccaccacaagatgcagaaataggttaccggaattcattgagacaaactaacaaaactaaacagtcatgcccatttggaagagtcccagttaaccttctaaatagcccagattgtgatgtgaagacagatgattcagttgtaccttgttttatgaaaagacaaacctctagatcagaatgccgagatttggttgtgcctggatctaaaccaagtggaaatgattcctgtgaattaagaaatttaaagtctgttcaaaatagtcatttcaaggaacctctggtgtcagatgaaaagagttctgaacttattattactgattcaataaccctgaagaataaaacggaatcaagtcttctagctaaattagaagaaactaaagagtatcaagaaccagaggttccagagagtaaccagaaacagtggcaatctaagagaaagtcagagtgtattaaccagaatcctgctgcatcttcaaatcactggcagattccggagttagcccgaaaagttaatacagagcagaaacataccacttttgagcaacctgtcttttcagtttcaaaacagtcaccaccaatatcaacatctaaatggtttgacccaaaatctatttgtaagacaccaagcagcaataccttggatgattacatgagctgttttagaactccagttgtaaagaatgactttccacctgcttgtcagttgtcaacaccttatggccaacctgcctgtttccagcagcaacagcatcaaatacttgccactccacttcaaaatttacaggttttagcatcttcttcagcaaatgaatgcatttcggttaaaggaagaatttattccatattaaagcagataggaagtggaggttcaagcaaggtatttcaggtgttaaatgaaaagaaacagatatatgctataaaatatgtgaacttagaagaagcagataaccaaactcttgatagttaccggaacgaaatagcttatttgaataaactacaacaacacagtgataagatcatccgactttatgattatgaaatcacggaccagtacatctacatggtaatggagtgtggaaatattgatcttaatagttggcttaaaaagaaaaaatccattgatccatgggaacgcaagagttactggaaaaatatgttagaggcagttcacacaatccatcaacatggcattgttcacagtgatcttaaaccagctaactttctgatagttgatggaatgctaaagctaattgattttgggattgcaaaccaaatgcaaccagatacaacaagtgttgttaaagattctcaggttggcacagttaattatatgccaccagaagcaatcaaagatatgtcttcctccagagagaatgggaaatctaagtcaaagataagccccaaaagtgatgtttggtccttaggatgtattttgtactatatgacttacgggaaaacaccatttcagcagataattaatcagatttctaaattacatgccataattgatcctaatcatgaaattgaatttcccgatattccagagaaagatcttcaagatgtgttaaagtgttgtttaaaaagggacccaaaacagaggatatccattcctgagctcctggctcatccatatgttcaaattcaaactcatccagttaaccaaatggccaagggaaccactgaagaaatgaaatatgttctgggccaacttgttggtctgaattctcctaactccattttgaaagctgctaaaactttatatgaacactatagtggtggtgaaagtcataattcttcatcctccaagacttttgaaaaaaaaaggggaaaaaaatgatttgcagttattcgtaatgtcagataccacctataaaatatattggactgttatactcttgaatccctgtggaaatctacatttgaagacaacatcactctgaagtgttatcagcaaaaaaaattcagtagattatctttaaaagaaaactgtaaaaatagcaaccacttatggcactgtatatattgtagacttgttttctctgttttatgctcttgtgtaatctacttgacatcattttactcttggaatagtgggtggatagcaagtatattctaaaaaactttgtaaataaagttttgtggctaaaatgacactaacattt

SEQ ID NO: 33029 - DNA, 541 bp, Homo sapiens
  source 1..541: mol_type = unassigned DNA
gtaggtaagttctgtcttaccggtgcaccggcgcactgaggaacagccgcagccggtgtaggggctcattgttagcgctggtcggtgaggggtggggcgaggtgggggcagctcggagccagaaatggaatccgaggatttaagtggcagagaattgacaattgattccataatgaacaaagtgagagacattaaaaataagtttaaaaatgaagaccttactgatgaactaagcttgaataaaatttctgctgatactacagataactcgggaactgttaaccaaattatgatgatggcaaacaacccagaggactggttgagtttgttgctcaaactagagaaaaacagtgttccgctaagtgatgctcttttaaataaattgattggtcgttacagtcaagcaattgaagcgcttcccccagataaatatggccaaaatgagagttttgctagaattcaagtgagatttgctgaattaaaagctattcaagagccagatgatgcacgtgactactttcaaatggccagagcaaactgc

SEQ ID NO: 33030 - DNA, 569 bp, Homo sapiens
  source 1..569: mol_type = unassigned DNA
agttaaagtaggagttatgactgttcagtttttttcttagaaatggaatccgaggatttaagtggcagagaattgacaattgattccataatgaacaaagtgagagacattaaaaataagtttaaaaatgaagaccttactgatgaactaagcttgaataaaatttctgctgatactacagataactcgggaactgttaaccaaattatgatgatggcaaacaacccagaggactggttgagtttgttgctcaaactagagaaaaacagtgttccgctaagtgatgctcttttaaataaattgattggtcgttacagtcaagcaattgaagcgcttcccccagataaatatggccaaaatgagagttttgctagaattcaagtgagatttgctgaattaaaagctattcaagagccagatgatgcacgtgactactttcaaatggccagagcaaactgcaagaaatttgcttttgttcatatatcttttgcacaatttgaactgtcacaaggtaatgtcaaaaaaagtaaacaacttcttcaaaaagctgtagaacgtggagcagtacc

SEQ ID NO: 33031 - DNA, 549 bp, Homo sapiens
  source 1..549: mol_type = unassigned DNA
atgcgacgcggctaaacgagctggagggggaggggatgtctcactgcctcagcgggtctggccggtggggtgatgcaggaggttttgttgaggaaaaatggaatccgaggatttaagtggcagagaattgacaattgattccataatgaacaaagtgagagacattaaaaataagtttaaaaatgaagaccttactgatgaactaagcttgaataaaatttctgctgatactacagataactcgggaactgttaaccaaattatgatgatggcaaacaacccagaggactggttgagtttgttgctcaaactagagaaaaacagtgttccgctaagtgatgctcttttaaataaattgattggtcgttacagtcaagcaattgaagcgcttcccccagataaatatggccaaaatgagagttttgctagaattcaagtgagatttgctgaattaaaagctattcaagagccagatgatgcacgtgactactttcaaatggccagagcaaactgcaagaaatttgcttttgttcatatatcttttgcaca

SEQ ID NO: 33032 - DNA, 3477 bp, Homo sapiens
  source 1..3477: mol_type = unassigned DNA
aaaaagcactgaaattcttgagctggcggcagggctgaacgtagctcagtgaaagatcctttcttgccacatcctctctaagccaggctgtgagaaccgcgggaaacgaaggagaagggtggcggtggggtcagtaaagggccggcccaaggtgcatcttttaggtcctgatgctaggagcagccgtccctgcccctatattcctctcactgggtaggtttgctcgggagtggctacctcccaggcaaaaattcggcctggttaaactggaaagaccaggaaagcccgcccacgggcgtccggggaacgcctgcaaagtgccagcaccctaccaacccaggcgccgcacgggtggggtcgcggccgcaggctcttccggggcgggcctagcctgacgcaggaggaggggcggcccccgtcgcacaagaaccaatcacgactgtcgcttctacgtggctagcattgaccaataggagaccgtagtgatagcgacggggaaattcaaacgtgtttgcggaaaggagtttgggttccatcttttcatttccccagcgcagctttctgtagtttttttcttagaaatggaatccgaggatttaagtggcagagaattgacaattgattccataatgaacaaagtgagagacattaaaaataagtttaaaaatgaagaccttactgatgaactaagcttgaataaaatttctgctgatactacagataactcgggaactgttaaccaaattatgatgatggcaaacaacccagaggactggttgagtttgttgctcaaactagagaaaaacagtgttccgctaagtgatgctcttttaaataaattgattggtcgttacagtcaagcaattgaagcgcttcccccagataaatatggccaaaatgagagttttgctagaattcaagtgagatttgctgaattaaaagctattcaagagccagatgatgcacgtgactactttcaaatggccagagcaaactgcaagaaatttgcttttgttcatatatcttttgcacaatttgaactgtcacaaggtaatgtcaaaaaaagtaaacaacttcttcaaaaagctgtagaacgtggagcagtaccactagaaatgctggaaattgccctgcggaatttaaacctccaaaaaaagcagctgctttcagaggaggaaaagaagaatttatcagcatctacggtattaactgcccaagaatcattttccggttcacttgggcatttacagaataggaacaacagttgtgattccagaggacagactactaaagccaggtttttatatggagagaacatgccaccacaagatgcagaaataggttaccggaattcattgagacaaactaacaaaactaaacagtcatgcccatttggaagagtcccagttaaccttctaaatagcccagattgtgatgtgaagacagatgattcagttgtaccttgttttatgaaaagacaaacctctagatcagaatgccgagatttggttgtgcctggatctaaaccaagtggaaatgattcctgtgaattaagaaatttaaagtctgttcaaaatagtcatttcaaggaacctctggtgtcagatgaaaagagttctgaacttattattactgattcaataaccctgaagaataaaacggaatcaagtcttctagctaaattagaagaaactaaagagtatcaagaaccagaggttccagagagtaaccagaaacagtggcaatctaagagaaagtcagagtgtattaaccagaatcctgctgcatcttcaaatcactggcagattccggagttagcccgaaaagttaatacagagaaacataccacttttgagcaacctgtcttttcagtttcaaaacagtcaccaccaatatcaacatctaaatggtttgacccaaaatctatttgtaagacaccaagcagcaataccttggatgattacatgagctgttttagaactccagttgtaaagaatgactttccacctgcttgtcagttgtcaacaccttatggccaacctgcctgtttccagcagcaacagcatcaaatacttgccactccacttcaaaatttacaggttttagcatcttcttcagcaaatgaatgcatttcggttaaaggaagaatttattccatattaaagcagataggaagtggaggttcaagcaaggtatttcaggtgttaaatgaaaagaaacagatatatgctataaaatatgtgaacttagaagaagcagataaccaaactcttgatagttaccggaacgaaatagcttatttgaataaactacaacaacacagtgataagatcatccgactttatgattatgaaatcacggaccagtacatctacatggtaatggagtgtggaaatattgatcttaatagttggcttaaaaagaaaaaatccattgatccatgggaacgcaagagttactggaaaaatatgttagaggcagttcacacaatccatcaacatggcattgttcacagtgatcttaaaccagctaactttctgatagttgatggaatgctaaagctaattgattttgggattgcaaaccaaatgcaaccagatacaacaagtgttgttaaagattctcaggttggcacagttaattatatgccaccagaagcaatcaaagatatgtcttcctccagagagaatgggaaatctaagtcaaagataagccccaaaagtgatgtttggtccttaggatgtattttgtactatatgacttacgggaaaacaccatttcagcagataattaatcagatttctaaattacatgccataattgatcctaatcatgaaattgaatttcccgatattccagagaaagatcttcaagatgtgttaaagtgttgtttaaaaagggacccaaaacagaggatatccattcctgagctcctggctcatccatatgttcaaattcaaactcatccagttaaccaaatggccaagggaaccactgaagaaatgaaatatgttctgggccaacttgttggtctgaattctcctaactccattttgaaagctgctaaaactttatatgaacactatagtggtggtgaaagtcataattcttcatcctccaagacttttgaaaaaaaaaggggaaaaaaatgatttgcagttattcgtaatgtcagataccacctataaaatatattggactgttatactcttgaatccctgtggaaatctacatttgaagacaacatcactctgaagtgttatcagcaaaaaaaattcagtagattatctttaaaagaaaactgtaaaaatagcaaccacttatggcactgtatatattgtagacttgttttctctgttttatgctcttgtgtaatctacttgacatcattttactcttggaatagtgggtggatagcaagtatattctaaaaaactttgtaaataaagttttgtggctaaaatgacactaacattt

SEQ ID NO: 33033 - DNA, 2071 bp, Homo sapiens
  source 1..2071: mol_type = unassigned DNA
agacactggcggctagaggggcccggacttgccctcccagctctaacttccgccggaagtgccttccagccgcaggcgcccttcttcttctgtgcgctcgggctcctggtcccggctccccggttaccggggcgcgagtatgaccacaatggcggccgccaccctgctgcgcgcgacgccccacttcagcggtctcgccgccggccggaccttcctgctgcagggtctgttgcggctgctgaaagccccggcattgcctctcttgtgccgcggcctggccgtggaggccaagaagacttacgtgcgcgacaagccacatgtgaatgtgggtaccatcggccatgtggaccacgggaagaccacgctgactgcagccatcacgaagattctagctgagggaggtggggctaagttcaagaagtacgaggagattgacaatgccccggaggagcgagctcggggtatcaccatcaatgcggctcatgtggagtatagcactgccgcccgccactacgcccacacagactgcccgggtcatgcagattatgttaagaatatgatcacaggcactgcacccctcgacggctgcatcctggtggtagcagccaatgacggccccatgccccagacccgagagcacttattactggccagacagattggggtggagcatgtggtggtgtatgtgaacaaggctgacgctgtccaggactctgagatggtggaactggtggaactggagatccgggagctgctcaccgagtttggctataaaggggaggagaccccagtcatcgtaggctctgctctctgtgcccttgagggtcgggaccctgagttaggcctgaagtctgtgcagaagctactggatgctgtggacacttacatcccagtgcccgcccgggacctggagaagcctttcctgctgcctgtggaggcggtgtactccgtccctggccgtggcaccgtggtgacaggtacactagagcgtggcattttaaagaagggagacgagtgtgagctcctaggacatagcaagaacatccgcactgtggtgacaggcattgagatgttccacaagagcctggagagggccgaggccggagataacctcggggccctggtccgaggcttgaagcgggaggacttgcggcggggcctggtcatggtcaagccaggttccatcaagccccaccagaaggtggaggcccaggtttacatcctcagcaaggaggaaggtggccgccacaagccctttgtgtcccacttcatgcctgtcatgttctccctgacttgggacatggcctgtcggattatcctgcccccagagaaggagcttgccatgcccggggaggacctgaagttcaacctaatcttgcggcagccaatgatcttagagaaaggccagcgtttcaccctgcgagatggcaaccggactattggcaccggtctagtcaccaacacgctggccatgactgaggaggagaagaatatcaaatggggttgagtgtgcagatctctgctcagcttcccttgcgtttaaggcctgccctagccagggctccctcctgcttccagtaccctctcatggcataggctgcaacccagcagagggcagctagatggacatttcccctgctcggaagggttggcctgcctggctggggaggtcagtaaactttgaatagtaagccagcctgtgtcctgtgtcctttgtgcaaattggagaggataggggaggacaaaaagggtgttgaaccccagacagatggggagcttgtgagatcccagagcagttttaacggataaatcaagtccagtgagcttagtgattgcctagacacagtaggatgccgttattcagcctcctgggagatagtgggaaagaatgttctatcgctctggagccagcatggcttcagctcaggtgccaaacccatcttgtttcctcggaatactaagtgaatgtctagcatccattcacattctgtgggaacagggactggacaggcatacctcagatgctgtaggtttgcttccagactaccacaataaagcaggtcacaaattt

SEQ ID NO: 33034 - DNA, 2162 bp, Homo sapiens
  source 1..2162: mol_type = unassigned DNA
gaagttgagccgagattagcaggagtcgggagggaggctcctagacctgcagagaaaggggtgcgataggcaaaggcaccatgcctctgcgggatgaaaccctccgagaggtgtgggcctctgacagtgggcatgaagaagaaagcctgagcccggaggccccgcggcgccccaaacagcgacccgccccggcacagaggctaaggaagaagaggacggaggcccccgaatccccctgccccacgggatccaagccccggaagcccggagctgggcggacggggaggccgcgggaggagccttccccagacccagcccaggcccgggcgccgcagacggtctacgccaggttcctcagggaccccgaggccaagaagcgcgacccccgggaaacctttctggtagcccgtgccccagacgcggaggacgaggaggaggaggaagaggaggacgaggaggacgaggaagaggaggcagaggaaaagaaagagaaaatccttctgcctcccaagaagcccctgagagagaagagctccgcagacctgaaggagaggagggccaaggcccagggcccaaggggagacctgggaagccctgaccccccaccgaaacctctgcgtgttaggaataaggaagctccagcaggggaggggaccaagatgagaaagaccaagaagaaagggtctggggaggccgacaaggacccctcagggagcccagccagtgcgaggaagagcccagcagccatgtttctggttggggaaggcagtcctgacaagaaagccctgaagaagaaaggcactcccaaaggcgcgaggaaggaggaagaagaggaggaggaggcagctacggtgataaagaagagcaatcaaaagggcaaagccaaaggaaaaggcaaaaagaaagcgaaggaggagagggccccgtctccccccgtggaggtggacgaaccccgggagtttgtgctccggcctgccccccagggccgcacggtgcgctgccggctgacccgggacaaaaagggcatggatcgaggcatgtatccctcctacttcctgcacctggacacggagaagaaggtgttcctcttggctggcaggaaacgaaaacggagcaagacagccaattacctcatctccatcgaccctaccaatctgtcccgaggaggggagaatttcatcgggaagctgaggtccaacctcctggggaaccgcttcacggtctttgacaacgggcagaacccacagcgtgggtacagcactaatgtggcaagccttcggcaggagctggcagctgtgatctatgaaaccaacgtgctgggcttccgtggcccccggcgcatgaccgtcatcattcctggcatgagtgcggagaacgagagggtccccatccggccccgaaatgctagtgacggcctgctggtgcgctggcagaacaagacgctggagagcctcatagaactgcacaacaagccacctgtctggaacgatgacagtggctcctacaccctcaacttccaaggccgggtcacccaggcctcagtcaagaacttccagattgtccacgctgatgaccccgactatatcgtgctgcagttcggccgcgtggcggaggacgccttcaccctagactaccggtacccgctgtgcgccctgcaggccttcgccatcgccctctccagtttcgacgggaagctggcctgcgagtgaccccagcagcccctcagcgcccccagagcccgtcagcgtgggggaaaggattcagtggaggctggcagggtccctccagcaaagctcccgcggaaaactgctcctgtgtcggggctgacctctcactgcctctcggtgacctccgtcctctccccagcctggcacaggccgaggcaggaggagcccggacggcgggtaggacggagatgaagaacatctggagttggagccgcacatctggtctcggagctcgcctgcgccgctgtgcccccctcctccccgcgccccagtcacttcctgtccgggagcagtagtcattgttgttttaacctcccctctccccgggaccgcgctagggctccgaggagctggggcgggctaggaggagggggtaggtgatgggggacgagggccaggcacccacatccccaataaagccgcgtccttggccaa

SEQ ID NO: 33035 - DNA, 1941 bp, Homo sapiens
  source 1..1941: mol_type = unassigned DNA
gcgataggcaaaggcaccatgcctctgcgggatgaaaccctccgagaggtgtgggcctctgacagtgggcatgaagaagaaagcctgagcccggaggccccgcggcgccccaaacagcgacccgccccggcacagaggctaaggaagaagaggacggaggcccccgaatccccctgccccacgggatccaagccccggaagcccggagaggaggaggaggaagaggaggacgaggaggacgaggaagaggaggcagaggaaaagaaagagaaaatccttctgcctcccaagaagcccctgagagagaagagctccgcagacctgaaggagaggagggccaaggcccagggcccaaggggagacctgggaagccctgaccccccaccgaaacctctgcgtgttaggaataaggaagctccagcaggggaggggaccaagatgagaaagaccaagaagaaagggtctggggaggccgacaaggacccctcagggagcccagccagtgcgaggaagagcccagcagccatgtttctggttggggaaggcagtcctgacaagaaagccctgaagaagaaaggcactcccaaaggcgcgaggaaggaggaagaagaggaggaggaggcagctacggtgataaagaagagcaatcaaaagggcaaagccaaaggaaaaggcaaaaagaaagcgaaggaggagagggccccgtctccccccgtggaggtggacgaaccccgggagtttgtgctccggcctgccccccagggccgcacggtgcgctgccggctgacccgggacaaaaagggcatggatcgaggcatgtatccctcctacttcctgcacctggacacggagaagaaggtgttcctcttggctggcaggaaacgaaaacggagcaagacagccaattacctcatctccatcgaccctaccaatctgtcccgaggaggggagaatttcatcgggaagctgaggtccaacctcctggggaaccgcttcacggtctttgacaacgggcagaacccacagcgtgggtacagcactaatgtggcaagccttcggcaggagctggcagctgtgatctatgaaaccaacgtgctgggcttccgtggcccccggcgcatgaccgtcatcattcctggcatgagtgcggagaacgagagggtccccatccggccccgaaatgctagtgacggcctgctggtgcgctggcagaacaagacgctggagagcctcatagaactgcacaacaagccacctgtctggaacgatgacagtggctcctacaccctcaacttccaaggccgggtcacccaggcctcagtcaagaacttccagattgtccacgctgatgaccccgactatatcgtgctgcagttcggccgcgtggcggaggacgccttcaccctagactaccggtacccgctgtgcgccctgcaggccttcgccatcgccctctccagtttcgacgggaagctggcctgcgagtgaccccagcagcccctcagcgcccccagagcccgtcagcgtgggggaaaggattcagtggaggctggcagggtccctccagcaaagctcccgcggaaaactgctcctgtgtcggggctgacctctcactgcctctcggtgacctccgtcctctccccagcctggcacaggccgaggcaggaggagcccggacggcgggtaggacggagatgaagaacatctggagttggagccgcacatctggtctcggagctcgcctgcgccgctgtgcccccctcctccccgcgccccagtcacttcctgtccgggagcagtagtcattgttgttttaacctcccctctccccgggaccgcgctagggctccgaggagctggggcgggctaggaggagggggtaggtgatgggggacgagggccaggcacccacatccccaataaagccgcgtccttggccaa

SEQ ID NO: 33036 - DNA, 1938 bp, Homo sapiens
  source 1..1938: mol_type = unassigned DNA
gcgataggcaaaggcaccatgcctctgcgggatgaaaccctccgagaggtgtgggcctctgacagtgggcatgaagaagaaagcctgagcccggaggccccgcggcgccccaaacagcgacccgccccggcacagaggctaaggaagaagaggacggaggcccccgaatccccctgccccacgggatccaagccccggaagcccggagaggaggaggaggaagaggaggacgaggaggacgaggaagaggaggcagaggaaaagaaagagaaaatccttctgcctcccaagaagcccctgagagagaagagctccgcagacctgaaggagaggagggccaaggcccagggcccaaggggagacctgggaagccctgaccccccaccgaaacctctgcgtgttaggaataaggaagctccagcaggggaggggaccaagatgagaaagaccaagaagaaagggtctggggaggccgacaaggacccctcagggagcccagccagtgcgaggaagagcccagcagccatgtttctggttggggaaggcagtcctgacaagaaagccctgaagaagaaaggcactcccaaaggcgcgaggaaggaggaagaagaggaggaggaggcagctacggtgataaagaagagcaatcaaaagggcaaagccaaaggaaaaggcaaaaagacccagaaggaggagagggccccgtctccccccgtggaggtggacgaaccccgggagtttgtgctccggcctgccccccagggccgcacggtgcgctgccggctgacccgggacaaaaagggcatggatcgaggcatgtatccctcctacttcctgcacctggacacggagaagaaggtgttcctcttggctggcaggaaacgaaaacggagcaagacagccaattacctcatctccatcgaccctaccaatctgtcccgaggaggggagaatttcatcgggaagctgaggtccaacctcctggggaaccgcttcacggtctttgacaacgggcagaacccacagcgtgggtacagcactaatgtggcaagccttcggcaggagctggcagctgtgatctatgaaaccaacgtgctgggcttccgtggcccccggcgcatgaccgtcatcattcctggcatgagtgcggagaacgagagggtccccatccggccccgaaatgctagtgacggcctgctggtgcgctggcagaacaagacgctggagagcctcatagaactgcacaacaagccacctgtctggaacgatgacagtggctcctacaccctcaacttccaaggccgggtcacccaggcctcagtcaagaacttccagattgtccacgctgatgaccccgactatatcgtgctgcagttcggccgcgtggcggaggacgccttcaccctagactaccggtacccgctgtgcgccctgcaggccttcgccatcgccctctccagtttcgacgggaagctggcctgcgagtgaccccagcagcccctcagcgcccccagagcccgtcagcgtgggggaaaggattcagtggaggctggcagggtccctccagcaaagctcccgcggaaaactgctcctgtgtcggggctgacctctcactgcctctcggtgacctccgtcctctccccagcctggcacaggccgaggcaggaggagcccggacggcgggtaggacggagatgaagaacatctggagttggagccgcacatctggtctcggagctcgcctgcgccgctgtgcccccctcctccccgcgccccagtcacttcctgtccgggagcagtagtcattgttgttttaacctcccctctccccgggaccgcgctagggctccgaggagctggggcgggctaggaggagggggtaggtgatgggggacgagggccaggcacccacatccccaataaagccgcgtccttggc

SEQ ID NO: 33037 - DNA, 1754 bp, Homo sapiens
  source 1..1754: mol_type = unassigned DNA
ggaagtggagagtggagggtcagaagggagtggaccagttcaggtcccagagggaatcctccctccctctgagccgtctttcttctcctccctatttcgcagatatcccgagattaggtccccagcttccaaagagaggatcagaatgtctcaggataatgacacattgatgagagacatcctggggcatgagctcgctgctatgaggctgcagaagctggaacagcagcggcggctgtttgaaaagaagcagcgacagaagcgccaggagctcctcatggttcaggccaatcctgacgcttccccgtggctttggcgctcttgtctgcgggaggagcgccttttaggtgacagaggccttgggaaccctttcctccggaagaaagtgtcagaggcacatctgccctctggcatccacagtgccctgggcaccgtgagctgtggtggagacggcaggggcgagcgcggcctcccgacaccgcggacagaagcagtgttcaggaatctcggtctccagtcccctttcttatcctggctcccagacaattccgatgcagaattggaggaagtctccgtggagaatggttccgtctctcccccaccttttaaacagtctccgagaatccgacgcaagggttggcaagcccaccaacgacctgggacccgtgcagagggtgagagtgactcccaggatatgggagatgcacacaagtcacccaatatgggaccaaaccctggaatggatggtgactgtgtatatgaaaacttggccttccaaaaggaagaagacttggaaaagaagagagaggcctctgagtctacagggacgaactcctcagcagcacacaacgaagagttgtccaaggccctgaaaggcgagggtggcacggacagcgaccatatgaggcacgaagcctccttggcaatccgctccccctgccctgggctggaggaggacatggaagcctacgtgctgcggccagcgctcccgggcaccatgatgcagtgctacctcacccgtgacaagcacggcgtggacaagggcttgttccccctctactacctctacctggagacctctgacagcctgcagcgcttcctcctggctgggcgaaagagaagaaggagcaaaacttctaattacctcatctccctggatcctacacacctatctcgggacggggacaatttcgtgggcaaagtcagatccaatgtcttcagcaccaagttcaccatctttgacaatggggtgaatcctgaccgggagcatttaaccaggaatactgcccggatcagacaggagctgggggctgtgtgttatgagcccaacgtcttaggatacctggggcctcggaaaatgactgtgattctcccaggaaccaacagccagaaccagcgaatcaatgtccagccactaaatgaacaggagtcgctactgagtcgttaccaacgtggggacaaacaagggttgcttttgttgcacaacaaaaccccgtcgtgggacaaggagaacggtgtctacacgctcaatttccatggtcgagtcactcgggcttcggtgaagaacttccaaatcgtggatcccaaacaccaagaacatctggtgctccagttcggccgagtgggcccagacacattcaccatggacttctgctttccatttagcccgctccaggccttcagcatctgcttgtccagtttcaattagaagctggctgttgaataactcaataaaataccatacccttgccagc

SEQ ID NO: 33038 - DNA, 2175 bp, Homo sapiens
  source 1..2175: mol_type = unassigned DNA
acgcggcggcgtgccagcctagccactctagcgacggcggggaagagtgtgtacgtggtgggggcttcctcggtggcgggcatggaggcttcgcgctgccggctcagtcccagcggcgacagtgtcttccatgaagaaatgatgaagatgcgacaggctaagctggattatcagaggctactacttgagaagaggcaaaggaaaaagcgccttgagccatttatggtgcagcccaatccagaagccaggctacgtcgggcaaagccaagggccagtgatgagcagactcccttggtgaactgtcatactccccacagcaatgtcatcttacatggtattgatggtccagctgctgtcctgaaaccagacgaagttcatgctccatcagtaagctcctctgttgtggaagaagatgctgaaaacaccgtggatactgcttccaagccaggacttcaggagcgtctccaaaagcatgatatctctgaaagtgtgaacttcgatgaggagactgatggaatatcccagtcagcatgtttagaaagacccaattctgcatcaagccagaattcaaccgatacaggcacttccggttctgctactgccgcccaaccagctgataacctcctgggagacatagacgacctggaggactttgtgtatagtcctgcccctcaaggtgtcacagtaagatgtcggataatccgggataaaaggggaatggatcggggtctcttccccacctactatatgtacttggaaaaagaagaaaatcagaagatatttcttcttgcagctagaaagcggaaaaagagcaaaacagccaactaccttatctccattgatccagttgatttatctcgtgaaggagaaagttatgtcggcaagcttagatccaacctcatggggaccaagtttacagtttatgaccgtggcatctgccccatgaagggccggggtttggtaggagcggcccacacccggcaggagctggctgccatctcctatgaaacaaacgtacttggatttaaaggtcctaggaaaatgtctgtgatcattcctggaatgacactgaatcataagcagatcccctatcagccacaaaacaaccatgacagtttgctctcaaggtggcagaacagaactatggaaaatctggttgagctgcacaacaaggcccccgtctggaacagtgacactcagtcctatgtcctcaacttccgtggccgggtcactcaggcgtctgtgaagaacttccagatagtccacaaaaatgaccctgattatatagtcatgcagtttggacgtgtggcagatgacgtgttcacactggattacaactacccactttgtgcagtacaggcctttggcatcggtctttctagctttgacagtaagctggcgtgtgaatgagagaacagtcaggcagggagcccttctccccacagagctttcaggagcagacagtggcctccccttcccctccctgccccaggacttaaagagcaatagtttgccccttttggaatgatctctgaatatataaaacacacacacaaagagcaatagtttgccccttttggaacgacccctgaatatataaaacacacacacgaagagcaatagtttgccccttttggaacgacccctgaatatataaaacacacacacaccccgcgcactctcactccttttccaggtttcatagacttggtgagggatcacagcttagcatgggtgagagatgatttaaagcacagggagattcttgtcacattggggtctccaaagctagaatgggatttcatgtgcttggaaacttgcagtagaatcagggactgacatcgcagttcctctcctctcttcattccctcacagcagattggccggcaccaatcttagtcaagagtggctgtgatcacatttgtgatcaattatgtgagaattttatataattgtcttcatttcaattaaggctgaaagcataaactctagaggtgactcagtcaggactgacagtaatgtgataattgccttcattttcaacccaggagtgcctctcacagctatatgactacggatccattagtgaggagcgacacacacacctgtaggcatcctgtgcaaacactttgtcattatcaagagagatggcagtattgaccatttagtttagtt

SEQ ID NO: 33039 - DNA, 3076 bp, Homo sapiens
  source 1..3076: mol_type = unassigned DNA
gcgacggcggggaagagtgtgtacgtggtgggggcttcctcggtggcgggcatggaggcttcgcgctgccggctcagtcccagcggcgacagtgtcttccatgaagaaatgatgaagatgcgacaggctaagctggattatcagaggctactacttgagaagaggcaaaggaaaaagcgccttgagccatttatggtgcagcccaatccagaagccaggctacgtcgggcaaagccaagggccagtgatgagcagactcccttggtgaactgtcatactccccacagcaatgtcatcttacatggtattgatggtccagctgctgtcctgaaaccagacgaagttcatgctccatcagtaagctcctctgttgtggaagaagatgctgaaaacaccgtggatactgcttccaagccaggacttcaggagcgtctccaaaagcatgatatctctgaaagtgtgaacttcgatgaggagactgatggaatatcccagtcagcatgtttagaaagacccaattctgcatcaagccagaattcaaccgatacaggcacttccggttctgctactgccgcccaaccagctgataacctcctgggagacatagacgacctggaggactttgtgtatagtcctgcccctcaaggtgtcacagtaagatgtcggataatccgggataaaaggggaatggatcggggtctcttccccacctactatatgtacttggaaaaagaagaaaatcagaagatatttcttcttgcagctagaaagcggaaaaagagcaaaacagccaactaccttatctccattgatccagttgatttatctcgtgaaggagaaagttatgtcggcaagcttagatccaacctcatggggaccaagtttacagtttatgaccgtggcatctgccccatgaagggccggggtttggtaggagcggcccacacccggcaggagctggctgccatctcctatgaaacaaacgtacttggatttaaaggtcctaggaaaatgtctgtgatcattcctggaatgacactgaatcataagcagatcccctatcagccacaaaacaaccatgacagtttgctctcaaggtggcagaacagaactatggaaaatctggttgagctgcacaacaaggcccccgtctggaacagtgacactcagtcctatgtcctcaacttccgtggccgggtcactcaggcgtctgtgaagaacttccagatagtccacaaaaatgaccctgattatatagtcatgcagtttggacgtgtggcagatgacgtgttcacactggattacaactacccactttgtgcagtacaggcctttggcatcggtctttctagctttgacagtaagctggcgtgtgaatgagagaacagtcaggcagggagcccttctccccacagagctttcaggagcagacagtggcctccccttcccctccctgccccaggacttaaagagcaatagtttgccccttttggaatgatctctgaatatataaaacacacacacaaagagcaatagtttgccccttttggaacgacccctgaatatataaaacacacacacgaagagcaatagtttgccccttttggaacgacccctgaatatataaaacacacacgaagagcaatagtttgccccttttggaacgacccctgaatatataaaacacacacacgaagagcaatagtttgccccttttggaacgacccctgaatatataaaacacacacacaccccgcgcactctcactccttttccaggtttcatagacttggtgagggatcacagcttagcatgggtgagagatgatttaaagcacagggagattcttgtcacattggggtctccaaagctagaatgggatttcatgtgcttggaaacttgcagtagaatcagggactgacatcgcagttcctctcctctcttcattccctcacagcagattggccggcaccaatcttagtcaagagtggctgtgatcacatttgtgatcaattatgtgagaattttatataattgtcttcatttcaattaaggctgaaagcataaactctagaggtgactcagtcaggactgacagtaatgtgataattgccttcattttcaacccaggagtgcctctcacagctatatgactacggatccattagtgaggagcgacacacacacctgtaggcatcctgtgcaaacactttgtcattatcaagagagatggcagtattgaccatttagtttagttaaaaaaaaaaaaaaaaaggtggcaggagaggctttggggaggatcagccagcagacatgagcactgctggcccgtgtggcagagctgtggactttcttctcggctccctcaaccctggctcaggcacagaaggtgttttgctacgtttttttgattattacacccctccacgtattatgtgactcttacaccagttcacccttcccagaatgtatccaaaccttgagaatgcaggagctctgtgagctccaccgtcagcaccattcagctgcatcccttgtgcacagaactgtttgccagcgttgggtgggacacccgtggcggctgctccctcagacctcccttctgtggactgacctctcacctccgcctgttgttcctgcaccacatcagataagcatgtgaaggagggccaactggcagctgcgggacccttggcttgtcccccaccgacaagtcccacctgctgggtgaggacgagactgtttccatctcaggcatgtatcccaccaagtgcctccctcacagccatgcccagaagcctcacacctcgtcaccaccaccaccccccaccccatcctgaggcactgcctggcagataaccctggttggccacagaagctattaatacacgacagcatgtggggaaggacttatggtgggccaggtggacctcatcctgcttcttcctccctctggtttaaagagatatataaactaatttcacataatttgtgtgtgcaggtgattggtttttacataagtcctatttataccttttatatgttacagaaataaaagttaatttatataaaaatg

SEQ ID NO: 33040 - DNA, 995 bp, Homo sapiens
  source 1..995: mol_type = unassigned DNA
attccgggctcgaaggctgtgcggtctgccaggagctgcggccccgtccggcccgggctgtgtcttccatgaagaaatgatgaagatgcgacaggctaagctggattatcagaggctactacttgagaagaggcaaaggaaaaagcgccttgagccatttatggtgcagcccaatccagaagccaggctacgtcgggcaaagccaagggccagtgatgagcagactcccttggtgaactgtcatactccccacagcaatgtcatcttacatggtattgatggtccagctgctgtcctgaaaccagacgaagttcatgctccatcagtaagctcctctgttgtggaagaagatgctgaaaacaccgtggatactgcttccaagccaggacttcaggagcgtctccaaaagcatgatatctctgaaagtgtgaacttcgatgaggagactgatggaatatcccagtcagcatgtttagaaagacccaattctgcatcaagccagaattcaaccttttcctcattctgtcagaagactgaagacacgggatacaggcacttccggttctgctactgccgcccaaccagctgataacctcctgggagacatagacgacctggaggactttgtgtatagtcctgcccctcaaggtgtcacagtaagatgtcggataatccgggataaaaggggaatggatcggggtctcttccccacctactatatgtacttggaaaaagaagaaaatcagaagatatttcttcttgcagctagaaagcggaaaaagagcaaaacagccaactaccttatctccattgatccagttgatttatctcgtgaaggagaaagttatgtcggcaagcttagatccaacctcatggggaccaagtttacagtttatgaccgtggcatctgccccatgaagggccggggtttggtaggagcggcccacacccggcaggagctggctgccatctcctatgaaacaaacgtacttgga

SEQ ID NO: 33041 - DNA, 1373 bp, Homo sapiens
  source 1..1373: mol_type = unassigned DNA
actctagcgacggcggggaagagtgtgtacgtggtgggggcttcctcggtggcgggcatggaggcttcgcgctgccggctcagtcccagcggcgacagtgtcttccatgaagaaatgatgaagatgcgacaggctaagctggattatcaggtattgatggtccagctgctgtcctgaaaccagacgaagttcatgctccatcagtaagctcctctgttgtggaagaagatgctgaaaacaccgtggatactgcttccaagccaggacttcaggagcgtctccaaaagcatggatacaggcacttccggttctgctactgccgcccaaccagctgataacctcctgggagacatagacgacctggaggactttgtgtatagtcctgcccctcaaggtgtcacagtaagatgtcggataatccgggataaaaggggaatggatcggggtctcttccccacctactatatgtacttggaaaaagaagaaaatcagaagatatttcttcttgcagctagaaagcggaaaaagagcaaaacagccaactaccttatctccattgatccagttgatttatctcgtgaaggagaaagttatgtcggcaagcttagatccaacctcatggggaccaagtttacagtttatgaccgtggcatctgccccatgaagggccggggtttggtaggagcggcccacacccggcaggagctggctgccatctcctataaccatgacagtttgctctcaaggtggcagaacagaactatggaaaatctggttgagctgcacaacaaggcccccgtctggaacagtgacactcagtcctatgtcctcaacttccgtggccgggtcactcaggcgtctgtgaagaacttccagatagtccacaaaaatgaccctgattatatagtcatgcagtttggacgtgtggcagatgacgtgttcacactggattacaactacccactttgtgcagtacaggcctttggcatcggtctttctagctttgacagtaagctggcgtgtgaatgagagaacagtcaggcagggagcccttctccccacagagctttcaggagcagacagtggcctccccttcccctccctgccccaggacttaaagagcaatagtttgccccttttggaatgatctctgaatatataaaacacacacacaaagagcaatagtttgccccttttggaacgacccctgaatatataaaacacacacacgaagagcaatagtttgccccttttggaacgacccctgaatatataaaacacacacgaagagcaatagtttgccccttttggaacgacccctgaatatataaaacacacacacgaagagcaatagtttgccccttttggaacga

SEQ ID NO: 33042 - DNA, 1951 bp, Homo sapiens
  source 1..1951: mol_type = unassigned DNA
ggaagagtgtgtacgtggtgggggcttcctcggtggcgggcatggaggcttcgcgctgccggctcagtcccagcggcgacagtgtcttccatgaagaaatgatgaagatgcgacaggctaagctggattatcagaggctactacttgagaagaggcaaaggaaaaagcgccttgagccatttatggtgcagcccaatccagaagccaggctacgtcgggcaaagccaagggccagtgatgagcagactcccttggtgaactgtcatactccccacagcaatgtcatcttacatggtattgatggtccagctgctgtcctgaaaccagacgaagttcatgctccatcagtaagctcctctgttgtggaagaagatgctgaaaacaccgtggatactgcttccaagccaggacttcaggagcgtctccaaaagcatgatatctctgaaagtgtgaacttcgatgaggagactgatggaatatcccagtcagcatgtttagaaagacccaattctgcatcaagccagaattcaaccgatacaggcacttccggttctgctactgccgcccaaccagctgataacctcctgggagacatagacgacctggaggactttgtgtatagtcctgcccctcaaggtgtcacagtaagatgtcggataatccgggataaaaggggaatggatcggggtctcttccccacctactatatgtacttggaaaaagaagaaaatcagaagatatttcttcttgcagctagaaagcggaaaaagagcaaaacagccaactaccttatctccattgatccagttgatttatctcgtgaaggagaaagttatgtcggcaagcttagatccaacctcatggggaccaagtttacagtttatgaccgtggcatctgccccatgaagggccggggtttggtaggagcggcccacacccggcaggagctggctgccatctcctatgaaacaaacgtacttggatttaaaggtcctaggaaaatgtctgtgatcattcctggaatgacactgaatcataagcagatcccctatcagccacaaaacaaccatgacagtttgctctcaaggtggcagaacagaactatggaaaatctggttgagctgcacaacaaggcccccgtctggaacagtgacactcagtcctatgtcctcaacttccgtggccgggtcactcaggcgtctgtgaagaacttccagatagtccacaaaaatgaccctgattatatagtcatgcagtttggacgtgtggcagatgacgtgttcacactggattacaactacccactttgtgcagtacaggcctttggcatcggtctttctagctttgacaaatgtatccaaaccttgagaatgcaggagctctgtgagctccaccgtcagcaccattcagctgcatcccttgtgcacagaactgtttgccagcgttgggtgggacacccgtggcggctgctccctcagacctcccttctgtggactgacctctcacctccgcctgttgttcctgcaccacatcagataagcatgtgaaggagggccaactggcagctgcgggacccttggcttgtcccccaccgacaagtcccacctgctgggtgaggacgagactgtttccatctcaggcatgtatcccaccaagtgcctccctcacagccatgcccagaagcctcacacctcgtcaccaccaccaccccccaccccatcctgaggcactgcctggcagataaccctggttggccacagaagctattaatacacgacagcatgtggggaaggacttatggtgggccaggtggacctcatcctgcttcttcctccctctggtttaaagagatatataaactaatttcacataatttgtgtgtgcaggtgattggtttttacataagtcctatttataccttttatatgttacagaaataaaagttaattta

SEQ ID NO: 33043 - DNA, 3876 bp, Homo sapiens
  source 1..3876: mol_type = unassigned DNA
tagcgggcgcctccttttcatccctcatccttcatccctggctttcgcgctctagcggagtgggatctgcgaacacgtgaggcgggggcgcggtccccaggctgccgagatggccctgagcgacgaaccggccgcgggcggccccgaggaggaggcggaggacgagacactggcctttggcgcggcgctggaagcgttcggcgagagcgcggagacccgggcgctgctgggccgcctgcgggaggtgcacggcggcggcgcggagcgcgaggtggccctggagcggttccgcgaatggatgatgaacttgttgttggacatagtgcaagatcagacatctccagcttcccttgtacatctggcttttaaatttctttacatcatcaccaaggttcgaggctataaaacatttcttcgtttatttcctcatgaagttgccgatgtagagcctgttttagatttggtcacaattcagaatcccaaggaccatgaagcttgggaaacccgctacatgcttttgctctggctctccgtgacctgcctgatcccttttgatttttctcgccttgacgggaacctcctcacccagcctgggcaagcacgaatgtccataatggaccgtattctccaaatagcagagtcctacttgattgtcagtgacaaggcccgagatgcagctgctgtccttgtgtccagatttatcacacgtcctgatgtcaagcaaagcaagatggctgagttcctggactggagcctgtgcaatctggcccgttcctccttccagaccatgcagggggtcatcaccatggatgggacgctgcaggccctggcacaaatatttaaacatggaaaacgtgaagactgtttgccctatgctgccactgtcctcaggtgcctcgatggctgcagactccctgagagcaaccagaccctgctgcggaagctgggggtgaagcttgtgcagcgactggggctgacattcctgaagccgaaggtggcagcatggaggtaccagcgtggctgccgatctttggctgcaaatctgcagctcctcactcagggtcagagtgagcagaagccactcatcctgaccgaagatgacgacgaagatgacgacgtcccagagggggtggagcgtgtgatagagcagctgctggtcgggctgaaggacaaggacacggtcgtgcggtggtctgcagccaagggcatcggtaggatggctggcaggcttcccagagccctggcggatgatgtggtcgggtctgtgctggactgcttcagtttccaggagactgacaaggcgtggcatgggggatgtctggcgctggcagagctgggcaggagaggcctgttgctgccgtctcgactcgtggatgttgtcgccgtgatcctgaaggcgctgacctacgacgagaagcggggtgcctgcagcgtgggcaccaacgtcagggacgccgcctgctacgtgtgctgggccttcgcgcgtgcctatgagcctcaggagctgaagccctttgtgactgcaatctcgagtgcactggtgattgctgcggtgtttgaccgagacataaactgcagaagagcagcctctgccgccttccaggagaatgtggggagacagggcactttccctcatggtattgatattttgaccacagctgactattttgccgtcggtaacagatccaactgtttcctggttataagtgtgtttattgccggctttcctgagtacacgcagccaatgatagaccacctggttaccatgaagatcagccactgggatggggtcatccgagagttggctgcgagggcgctgcacaacctggcccagcaggcacccgagttcagcgccacgcaagtcttcccgaggctgctgtccatgacactgagtccagatcttcacatgaggcatgggtcgattctcgcctgcgcagaagttgcttacgccttgtacaaacttgcagcccaagagaacaggcccgtcacggaccatctggacgagcaggcagtgcagggcctgaagcagattcaccagcagctctatgatcgtcagttatacaggggtctgggaggacagctcatgagacaagcagtgtgtgttttaatagaaaagttgtcactttccaaaatgccctttagaggtgacaccgtaattgatggttggcaatggctgataaatgacactttgagacatctccatctcatctcaagtcactcccgccagcagatgaaggatgcagcagtctcggccctggctgctctatgcagtgaatattacatgaaggagccgggggaggcagatcccgcaattcaggaggagctgatcacgcagtacctggctgagcttcggaaccccgaggagatgactcgctgtggcttctcgttggccttgggcgcccttccaggcttccttctgaaaggccggctccagcaggttctcacaggtttaagagcagttacccacacttcccccgaggacgtaagttttgctgagtccaggagagacggcttgaaggccattgcgaggatttgccagactgttggtgtgaaagcaggagccccagacgaagctgtgtgcggagagaatgtttcccagatttactgtgcgctgctgggctgcatggacgactacaccacggacagcagaggggacgtgggcacctgggtccgcaaggccgccatgaccagtctgatggatctgacacttctgctggctcggagccagcctgagctgatcgaggcccatacctgtgagcgcatcatgtgctgtgtggcccagcaggccagtgagaagattgaccgtttccgtgctcacgccgccagcgtgttcctgacgctcctgcactttgacagccctcccatcccccacgtgccccaccgaggagaactggaaaagctgtttcccaggtccgatgtggcctccgtgaactggagtgcaccttcccaggccttcccacgcatcacccagctccttgggctgcccacctaccgctaccacgtcctgctggggctagtcgtgtccctgggcggcttgacggagtcgacgatccggcactccacccagagcctctttgagtacatgaagggcattcagagcgacccgcaggccctgggcagcttcagcgggacccttctgcagatctttgaggacaaccttctgaatgagagggtgtccgtgccgctgctgaagacgctggaccacgtgctcacccacggctgcttcgacatcttcaccacggaggaggaccacccctttgctgtgaagttgcttgcgctctgtaagaaagaaatcaagaattcaaaagatatccagaagctcctgtcaggcatcgcagtgttctgcgagatggtgcagttccccggcgacgtgaggaggcaggccctcctgcagctgtgtctgctcctctgccaccgtttcccgctgatccggaagaccacggccagccaggtgtacgagacattgctcacctacagtgacgtcgtgggcgcggatgtgctggacgaggtggtgactgtgctcagtgacactgcgtgggacgcggagcttgcagtggtgagagagcagcgcaaccgtctgtgtgaccttctgggcgtacccaggccccagctggtgccccagcctggtgcctgctgaagccagtcctggagcccatacctcacccctgcctggtgaggatgtcttgttcctgagggaggccggtgtggaaagcctcgcacagtggtgcctccagctgttgaagggtagcgctggcccttggaggctggcactagctgacagcttttcctctctgcacctgcgctctggtgacttggggtggacgcctctgccttcacttgaacacaaatgtgcttcctataaaatcatgtaccaag

SEQ ID NO: 33044 - DNA, 4036 bp, Homo sapiens
  source 1..4036: mol_type = unassigned DNA
tagcgggcgcctccttttcatccctcatccttcatccctggctttcgcgctctagcggagtgggatctgcgaacacgtgaggcgggggcgcggtccccaggctgccgagatggccctgagcgacgaaccggccgcgggcggccccgaggaggaggcggaggacgagacactggcctttggcgcggcgctggaagcgttcggcgagagcgcggagacccgggcgctgctgggccgcctgcgggaggtgcacggcggcggcgcggagcgcgaggtggccctggagcggttccgcgtaataatggacaaataccaggagcagcctcatctgttggacccgcaccttgaatggatgatgaacttgttgttggacatagtgcaagatcagacatctccagcttcccttgtacatctggcttttaaatttctttacatcatcaccaaggttcgaggctataaaacatttcttcgtttatttcctcatgaagttgccgatgtagagcctgttttagatttggtcacaattcagaatcccaaggaccatgaagcttgggaaacccgctacatgcttttgctctggctctccgtgacctgcctgatcccttttgatttttctcgccttgacgggaacctcctcacccagcctgggcaagcacgaatgtccataatggaccgtattctccaaatagcagagtcctacttgattgtcagtgacaaggcccgagatgcagctgctgtccttgtgtccagatttatcacacgtcctgatgtcaagcaaagcaagatggctgagttcctggactggagcctgtgcaatctggcccgttcctccttccagaccatgcagggggtcatcaccatggatgggacgctgcaggccctggcacaaatatttaaacatggaaaacgtgaagactgtttgccctatgctgccactgtcctcaggtgcctcgatggctgcagactccctgagagcaaccagaccctgctgcggaagctgggggtgaagcttgtgcagcgactggggctgacattcctgaagccgaaggtggcagcatggaggtaccagcgtggctgccgatctttggctgcaaatctgcagctcctcactcagggtcagagtgagcagaagccactcatcctgaccgaagatgacgacgaagatgacgacgtcccagagggggtggagcgtgtgatagagcagctgctggtcgggctgaaggacaaggacacggtcgtgcggtggtctgcagccaagggcatcggtaggatggctggcaggcttcccagagccctggcggatgatgtggtcgggtctgtgctggactgcttcagtttccaggagactgacaaggcgtggcatgggggatgtctggcgctggcagagctgggcaggagaggcctgttgctgccgtctcgactcgtggatgttgtcgccgtgatcctgaaggcgctgacctacgacgagaagcggggtgcctgcagcgtgggcaccaacgtcagggacgccgcctgctacgtgtgctgggccttcgcgcgtgcctatgagcctcaggagctgaagccctttgtgactgcaatctcgagtgcactggtgattgctgcggtgtttgaccgagacataaactgcagaagagcagcctctgccgccttccaggagaatgtggggagacagggcactttccctcatggtattgatattttgaccacagctgactattttgccgtcggtaacagatccaactgtttcctggttataagtgtgtttattgccggctttcctgagtacacgcagccaatgatagaccacctggttaccatgaagatcagccactgggatggggtcatccgagagttggctgcgagggcgctgcacaacctggcccagcaggcacccgagttcagcgccacgcaagtcttcccgaggctgctgtccatgacactgagtccagatcttcacatgaggcatgggtcgattctcgcctgcgcagaagttgcttacgccttgtacaaacttgcagcccaagagaacaggcccgtcacggaccatctggacgagcaggcagtgcagggcctgaagcagattcaccagcagctctatgatcgtcagttatacaggggtctgggaggacagctcatgagacaagcagtgtgtgttttaatagaaaagttgtcactttccaaaatgccctttagaggtgacaccgtaattgatggttggcaatggctgataaatgacactttgagacatctccatctcatctcaagtcactcccgccagcagatgaaggatgcagcagtctcggccctggctgctctatgcagtgaatattacatgaaggagccgggggaggcagatcccgcaattcaggaggagctgatcacgcagtacctggctgagcttcggaaccccgaggagatgactcgctgtggcttctcgttggccttgggcgcccttccaggcttccttctgaaaggccggctccagcaggttctcacaggtttaagagcagttacccacacttcccccgaggacgtaagttttgctgagtccaggagagacggcttgaaggccattgcgaggatttgccagactgttggtgtgaaagcaggagccccagacgaagctgtgtgcggagagaatgtttcccagatttactgtgcgctgctgggctgcatggacgactacaccacggacagcagaggggacgtgggcacctgggtccgcaaggccgccatgaccagtctgatggatctgacacttctgctggctcggagccagcctgagctgatcgaggcccatacctgtgagcgcatcatgtgctgtgtggcccagcaggccagtgagaagattgaccgtttccgtgctcacgccgccagcgtgttcctgacgctcctgcactttgacagccctcccatcccccacgtgccccaccgaggagaactggaaaagctgtttcccaggtccgatgtggcctccgtgaactggagtgcaccttcccaggccttcccacgcatcacccagctccttgggctgcccacctaccgctaccacgtcctgctggggctagtcgtgtccctgggcggcttgacggagtcgacgatccggcactccacccagagcctctttgagtacatgaagggcattcagagcgacccgcaggccctgggcagcttcagcgggacccttctgcagatctttgaggacaaccttctgaatgagagggtgtccgtgccgctgctgaagacgctggaccacgtgctcacccacggctgcttcgacatcttcaccacggaggaggaccacccctttgctgtgaagttgcttgcgctctgtaagaaagaaatcaagaattcaaaagatatccagaagctcctgtcaggcatcgcagttgactttccaagtgcgacactcgtgtgtgtaggcacagtgcagatgtacgcacacacacacctccggcttggggccccaggcccgcactgtgctcacggatctgctctgcccaggttctgcgagatggtgcagttccccggcgacgtgaggaggcaggccctcctgcagctgtgtctgctcctctgccaccgtttcccgctgatccggaagaccacggccagccaggtgtacgagacattgctcacctacagtgacgtcgtgggcgcggatgtgctggacgaggtggtgactgtgctcagtgacactgcgtgggacgcggagcttgcagtggtgagagagcagcgcaaccgtctgtgtgaccttctgggcgtaccccccagctggtgccccacctggtgcctgctgaagccagtcctggagcccatacctcacccctgcctggtgaggatgtcttgttcctgagggaggccggtgtggaaagcctcgcacagtggtgcctccagctgttgaagggtagcgctggcccttggaggctggcactagctgacagcttttcctctctgcacctgcgctctggtgacttggggtggacgcctctgccttcacttgaacacaaatgtgcttcctataaaatcatgtaccaag

SEQ ID NO: 33045 - DNA, 4426 bp, Homo sapiens
  source 1..4426: mol_type = unassigned DNA
ggccagcgtcggttgccgccttagcgggcgcctccttttcatccctcatccttcatccctggctttcgcgctctagcggagtgggatctgcgaacacgtgaggcgggggcgcggtccccaggctgccgagatggccctgagcgacgaaccggccgcgggcggccccgaggaggaggcggaggacgagacactggcctttggcgcggcgctggaagcgttcggcgagagcgcggagacccgggcgctgctgggccgcctgcgggaggtgcacggcggcggcgcggagcgcgaggtggccctggagcggttccgcgtaataatggacaaataccaggagcagcctcatctgttggacccgcaccttgaatggatgatgaacttgttgttggacatagtgcaagatcagacatctccagcttcccttgtacatctggcttttaaatttctttacatcatcaccaaggttcgaggctataaaacatttcttcgtttatttcctcatgaagttgccgatgtagagcctgttttagatttggtcacaattcagaatcccaaggaccatgaagcttgggaaacccgctacatgcttttgctctggctctccgtgacctgcctgatcccttttgatttttctcgccttgacgggaacctcctcacccagcctgggcaagcacgaatgtccataatggaccgtattctccaaatagcagagtcctacttgattgtcagtgacaaggcccgagatgcagctgctgtccttgtgtccagatttatcacacgtcctgatgtcaagcaaagcaagatggctgagttcctggactggagcctgtgcaatctggcccgttcctccttccagaccatgcagggggtcatcaccatggatgggacgctgcaggccctggcacaaatatttaaacatggaaaacgtgaagactgtttgccctatgctgccactgtcctcaggtgcctcgatggctgcagactccctgagagcaaccagaccctgctgcggaagctgggggtgaagcttgtgcagcgactggggctgacattcctgaagccgaaggtggcagcatggaggtaccagcgtggctgccgatctttggctgcaaatctgcagctcctcactcagggtcagagtgagcagaagccactcatcctgaccgaagatgacgacgaagatgacgacgtcccagagggggtggagcgtgtgatagagcagctgctggtcgggctgaaggacaaggacacggtcgtgcggtggtctgcagccaagggcatcggtaggatggctggcaggcttcccagagccctggcggatgatgtggtcgggtctgtgctggactgcttcagtttccaggagactgacaaggcgtggcatgggggatgtctggcgctggcagagctgggcaggagaggcctgttgctgccgtctcgactcgtggatgttgtcgccgtgatcctgaaggcgctgacctacgacgagaagcggggtgcctgcagcgtgggcaccaacgtcagggacgccgcctgctacgtgtgctgggccttcgcgcgtgcctatgagcctcaggagctgaagccctttgtgactgcaatctcgagtgcactggtgattgctgcggtgtttgaccgagacataaactgcagaagagcagcctctgccgccttccaggagaatgtggggagacagggcactttccctcatggtattgatattttgaccacagctgactattttgccgtcggtaacagatccaactgtttcctggttataagtgtgtttattgccggctttcctgagtacacgcagccaatgatagaccacctggttaccatgaagatcagccactgggatggggtcatccgagagttggctgcgagggcgctgcacaacctggcccagcaggcacccgagttcagcgccacgcaagtcttcccgaggctgctgtccatgacactgagtccagatcttcacatgaggcatgggtcgattctcgcctgcgcagaagttgcttacgccttgtacaaacttgcagcccaagagaacaggcccgtcacggaccatctggacgagcaggcagtgcagggcctgaagcagattcaccagcagctctatgatcgtcagttatacaggggtctgggaggacagctcatgagacaagcagtgtgtgttttaatagaaaagttgtcactttccaaaatgccctttagaggtgacaccgtaattgatggttggcaatggctgataaatgacactttgagacatctccatctcatctcaagtcactcccgccagcagatgaaggatgcagcagtctcggccctggctgctctatgcagtgaatattacatgaaggagccgggggaggcagatcccgcaattcaggaggagctgatcacgcagtacctggctgagcttcggaaccccgaggagatgactcgctgtggcttctcgttggccttgggcgcccttccaggcttccttctgaaaggccggctccagcaggttctcacaggtttaagagcagttacccacacttcccccgaggacgtaagttttgctgagtccaggagagacggcttgaaggccattgcgaggatttgccagactgttggtgtgaaagcaggagccccagacgaagctgtgtgcggagagaatgtttcccagatttactgtgcgctgctgggctgcatggacgactacaccacggacagcagaggggacgtgggcacctgggtccgcaaggccgccatgaccagtctgatggatctgacacttctgctggctcggagccagcctgagctgatcgaggcccatacctgtgagcgcatcatgtgctgtgtggcccagcaggccagtgagaagattgaccgtttccgtgctcacgccgccagcgtgttcctgacgctcctgcactttgacagccctcccatcccccacgtgccccaccgaggagaactggaaaagctgtttcccaggtccgatgtggcctccgtgaactggagtgcaccttcccaggccttcccacgcatcacccagctccttgggctgcccacctaccgctaccacgtcctgctggggctagtcgtgtccctgggcggcttgacggagtcgacgatccggcactccacccagagcctctttgagtacatgaagggcattcagagcgacccgcaggccctgggcagcttcagcgggacccttctgcagatctttgaggacaaccttctgaatgagagggtgtccgtgccgctgctgaagacgctggaccacgtgctcacccacggctgcttcgacatcttcaccacggaggaggaccacccctttgctgtgaagttgcttgcgctctgtaagaaagaaatcaagaattcaaaagatatccagaagctcctgtcaggcatcgcagtgttctgcgagatggtgcagttccccggcgacgtgaggaggcaggccctcctgcagctgtgtctgctcctctgccaccgtttcccgctgatccggaagaccacggccagccaggtgtacgagacattgctcacctacagtgacgtcgtgggcgcggatgtgctggacgaggtggtgactgtgctcagtgacactgcgtgggacgcggagcttgcagtggtgagagagcagcgcaaccgtctgtgtgaccttctgggcgtacccaggccccagctggtgccccagcctggtgcctgctgaagccagtcctggagcccatacctcacccctgcctggtgaggatgtcttgttcctgagggaggccggtgtggaaagcctcgcacagtggtgcctccagctgttgaagggtagcgctggcccttggaggctggcactagctgacagcttttcctctctgcacctgcgctctggtgacttggggtggacgcctctgccttcacttgaacacaaatgtgcttcctataaaatcatgtaccaagaagttcctgccttttgtctctgagcctgatgtgtgtaggggtgatggaaaggctcactgcccaggggtcagccagaggggaggtgggctgcactcctcctgcctggagaccaggcccccttcttgcctggtgctgtccctgctgtgggagacgtctggccacaggcagtgccccacccagtcttggagagagatgaatgttaaatcagaggttcaaatgctagagaactgagaagccctggtggcaggcatggtctggagtgctgggcagatgctgtttctgggcccgtctgcctggtgggggtgctgtcctcccccctgtgcacacgtgagcatcgtgcatgtggcccctctgcagtgcaggagtcactgattgatgggtgtgccgaccagcagcttcacaaatgtctgctgcaaggggaatcgtcagagtccaatgtgtgcctctacagtaatgtcggaaataaataccattcttg

SEQ ID NO: 33046 - DNA, 2203 bp, Homo sapiens
  source 1..2203: mol_type = unassigned DNA
tagcgggcgcctccttttcatccctcatccttcatccctggctttcgcgctctagcggagtgggatctgcgaacacgtgaggcgggggcgcggtccccaggctgccgagatggccctgagcgacgaaccggccgcgggcggccccgaggaggaggcggaggacgagacactggcctttggcgcggcgctggaagcgttcggcgagagcgcggagacccgggcgctgctgggccgcctgcgggaggtgcacggcggcggcgcggagcgcgaggtggccctggagcggttccgcgtaataatggacaaataccaggagcagcctcatctgttggacccgcaccttgaatggatgatgaacttgttgttggacatagtgcaagatcagacatctccagcttcccttgtacatctggcttttaaatttctttacatcatcaccaaggttcgaggctataaaacatttcttcgtttatttcctcatgaagttgccgatgtagagcctgttttagatttggtcacaattcagaatcccaaggaccatgaagcttgggaaacccgctacatgcttttgctctggctctccgtgacctgcctgatcccttttgatttttctcgccttgacgggaacctcctcacccagcctgggcaagcacgaatgtccataatggaccgtattctccaaatagcagagtcctacttgattgtcagtgacaaggcccgagatgcagctgctgtccttgtgtccagatttatcacacgtcctgatgtcaagcaaagcaagatggctgagttcctggactggagcctgtgcaatctggcccgttcctccttccagaccatgcagggggtcatcaccatggatgggacgctgcaggccctggcacaaatatttaaacatggaaaacgtgaagactgtttgccctatgctgccactgtcctcaggtgcctcgatggctgcagactccctgagagcaaccagaccctgctgcggaagctgggggtgaagcttgtgcagcgactggggctgacattcctgaagccgaaggtggcagcatggaggtaccagcgtggctgccgatctttggctgcaaatctgcagctcctcactcagggtcagagtgagcagaagccactcatcctgaccgaagatgacgacgaagatgacgacgtcccagagggggtggagcgtgtgatagagcagctgctggtcgggctgaaggacaaggacacggtcgtgcggtggtctgcagccaagggcatcggtaggatggctggcaggcttcccagagccctggcggatgatgtggtcgggtctgtgctggactgcttcagtttccaggagactgacaaggcgtggcatgggggatgtctggcgctggcagagctgggcaggagaggcctgttgctgccgtctcgactcgtggatgttgtcgccgtgatcctgaaggcgctgacctacgacgagaagcggggtgcctgcagcgtgggcaccaacgtcagggacgccgcctgctacgtgtgctgggccttcgcgcgtgcctatgagcctcaggagctgaagccctttgtgactgcaatctcgagtgcactggtgattgctgcggtgtttgaccgagacataaactgcagaagagcagcctctgccgccttccaggagaatgtggggagacagggcactttccctcatggtattgatattttgaccacagctgactattttgccgtcggtaacagatccaactgtttcctggttataagtgtgtttattgccggctttcctgagtacacgcagccaatgatagaccacctggttaccatgaagatcagccactgggatggggtcatccgagagttggctgcgagggcgctgcacaacctggcccagcaggcacccgagttcagcgccacgcaagtcttcccgaggctgctgtccatgacactgagtccagatcttcacatgaggcatgggtcgattctcgcctgcgcagaagttgcttacgccttgtacaaacttgcagcccaagagaacaggcccgtcacggaccatctggacgagcaggcagtgcagggcctgaagcagattcaccagcagccgtgcatctgcagctggggtctgatgtctcctgaaagtaaagcagaattttgtgtgtgcgtctgtcggatttctctggggagacagtgtgttcatctttctgggctttga

SEQ ID NO: 33047 - DNA, 3717 bp, Homo sapiens
  source 1..3717: mol_type = unassigned DNA
cctcatccttcatccctggctttcgcgctctagcggagtgggatctgcgaacacgtgaggcgggggcgcggtccccaggctgccgagatggccctgagcgacgaaccggccgcgggcggccccgaggaggaggcggaggacgagacactggcctttggcgcggcgctggaagcgttcggcgagagcgcggagacccgggcgctgctgggccgcctgcgggaggtgcacggcggcggcgcggagcgcgaggtggccctggagcggttccgcgtaataatggacaaataccaggagcagcctcatctgttggacccgcaccttgaatggatgatgaacttgttgttggacatagtgcaagatcagacatctccagcttcccttgtacatctggcttttaaatttctttacatcatcaccaaggttcgaggctataaaacatttcttcgtttatttcctcatgaagttgccgatgtagagcctgttttagatttggtcacaattcagaatcccaaggaccatgaagcttgggaaacccgctacatgcttttgctctggctctccgtgacctgcctgatcccttttgatttttctcgccttgacgggaacctcctcacccagcctgggcaagcacgaatgtccataatggaccgtattctccaaatagcagagtcctacttgattgtcagtgacaaggcccgagatgcagctgctgtccttgtgtccagatttatcacacgtcctgatgtcaagcaaagcaagatggctgagttcctggactggagcctgtgcaatctggcccgttcctccttccagaccatgcagggggtcatcaccatggatgggacgctgcaggccctggcacaaatatttaaacatggaaaacgtgaagactgtttgccctatgctgccactgtcctcaggtgcctcgatggctgcagactccctgagagcaaccagaccctgctgcggaagctgggggtgaagcttgtgcagcgactggggctgacattcctgaagccgaaggtggcagcatggaggtaccagcgtggctgccgatctttggctgcaaatctgcagctcctcactcagggtcagagtgagcagaagccactcatcctgaccgaagatgacgacgaagatgacgacgtcccagagggggtggagcgtgtgatagagcagctgctggtcgggctgaaggacaaggacacggtcgtgcggtggtctgcagccaagggcatcggtaggatggctggcaggcttcccagagccctggcggatgatgtggtcgggtctgtgctggactgcttcagtttccaggagactgacaaggcgtggcatgggggatgtctggcgctggcagagctgggcaggagaggcctgttgctgccgtctcgactcgtggatgttgtcgccgtgatcctgaaggcgctgacctacgacgagaagcggggtgcctgcagcgtgggcaccaacgtcagggacgccgcctgctacgtgtgctgggccttcgcgcgtgcctatgagcctcaggagctgaagccctttgtgactgcaatctcgagtgcactggtgattgctgcggtgtttgaccgagacataaactgcagaagagcagcctctgccgccttccaggagaatgtggggagacagggcactttccctcatggtattgatattttgaccacagctgactattttgccgtcggtaacagatccaactgtttcctggttataagtgtgtttattgccggctttcctgagtacacgcagccaatgatagaccacctggttaccatgaagatcagccactgggatggggtcatccgagagttggctgcgagggcgctgcacaacctggcccagcaggcacccgagttcagcgccacgcaagtcttcccgaggctgctgtccatgacactgagtccagatcttcacatgaggcatgggtcgattctcgcctgcgcagaagttgcttacgccttgtacaaacttgcagcccaagagaacaggcccgtcacggaccatctggacgagcaggcagtgcagggcctgaagcagattcaccagcagctctatgatcgtcagttatacaggggtctgggaggacagctcatgagacaagcagtgtgtgttttaatagaaaagttgtcactttccaaaatgccctttagaggtgacaccgtaattgatggttggcaatggctgataaatgactcgctgtggcttctcgttggccttgggcgcccttccaggcttccttctgaaaggccggctccagcaggttctcacaggtttaagagcagttacccacacttcccccgaggacgtaagttttgctgagtccaggagagacggcttgaaggccattgcgaggatttgccagactgttggtgtgaaagcaggagccccagacgaagctgtgtgcggagagaatgtttcccagatttactgtgcgctgctgggctgcatggacgactacaccacggacagcagaggggacgtgggcacctgggtccgcaaggccgccatgaccagtctgatggatctgacacttctgctggctcggagccagcctgagctgatcgaggcccatacctgtgagcgcatcatgtgctgtgtggcccagcaggccagtgagaagattgaccgtttccgtgctcacgccgccagcgtgttcctgacgctcctgcactttgacagccctcccatcccccacgtgccccaccgaggagaactggaaaagctgtttcccaggtccgatgtggcctccgtgaactggagtgcaccttcccaggccttcccacgcatcacccagctccttgggctgcccacctaccgctaccacgtcctgctggggctagtcgtgtccctgggcggcttgacggagtcgacgatccggcactccacccagagcctctttgagtacatgaagggcattcagagcgacccgcaggccctgggcagcttcagcgggacccttctgcagatctttgaggacaaccttctgaatgagagggtgtccgtgccgctgctgaagacgctggaccacgtgctcacccacggctgcttcgacatcttcaccacggaggaggaccacccctttgctgtgaagttgcttgcgctctgtaagaaagaaatcaagaattcaaaagatatccagaagctcctgtcaggcatcgcagtgttctgcgagatggtgcagttccccggcgacgtgaggaggcaggccctcctgcagctgtgtctgctcctctgccaccgtttcccgctgatccggaagaccacggccagccaggtgtacgagacattgctcacctacagtgacgtcgtgggcgcggatgtgctggacgaggtggtgactgtgctcagtgacactgcgtgggacgcggagcttgcagtggtgagagagcagcgcaaccgtctgtgtgaccttctgggcgtacccaggccccagctggtgccccagcctggtgcctgctgaagccagtcctggagcccatacctcacccctgcctggtgaggatgtcttgttcctgagggaggccggtgtggaaagcctcgcacagtggtgcctccagctgttgaagggtagcgctggcccttggaggctggcactagctgacagcttttcctctctgcacctgcgctctggtgacttggggtggacgcctctgccttcacttgaacacaaatgtgcttcctataaaatcatgtacc

SEQ ID NO: 33048 - DNA, 3685 bp, Homo sapiens
  source 1..3685: mol_type = unassigned DNA
tagcgggcgcctccttttcatccctcatccttcatccctggctttcgcgctctagcggagtgggatctgcgaacacgtgaggcgggggcgcggtccccaggctgccgagatggccctgagcgacgaaccggccgcgggcggccccgaggaggaggcggaggacgagacactggcctttggcgcggcgctggaagcgttcggcgagagcgcggagacccgggcgctgctgggccgcctgcgggaggtgcacggcggcggcgcggagcgcgaggtggccctggagcggttccgcgtaataatggacaaataccaggagcagcctcatctgttggacccgcaccttgaatggatgatgaacttgttgttggacatagtgcaagatcagacatctccagcttcccttgtacatctggcttttaaatttctttacatcatcaccaaggttcgaggctataaaacatttcttcgtttatttcctcatgaagttgccgatgtagagcctgttttagatttggtcacaattcagaatcccaaggaccatgaagcttgggaaacccgctacatgcttttgctctggctctccgtgacctgcctgatcccttttgatttttctcgccttgacgggaacctcctcacccagcctgggcaagcacgaatgtccataatggaccgtattctccaaatagcagagtcctacttgattgtcagtgacaaggcccgagatgcagctgctgtccttgtgtccagatttatcacacgtcctgatgtcaagcaaagcaagatggctgagttcctggactggagcctgtgcaatctggcccgttcctccttccagaccatgcagggggtcatcaccatggatgggacgctgcaggccctggcacaaatatttaaacatggaaaacgtgaagactgtttgccctatgctgccactgtcctcaggtgcctcgatggctgcagactccctgagagcaaccagaccctgctgcggaagctgggggtgaagcttgtgcagcgactggggctgacattcctgaagccgaaggtggcagcatggaggtaccagcgtggctgccgatctttggctgcaaatctgcagctcctcactcagggtcagagtgagcagaagccactcatcctgaccgaagatgacgacgaagatgacgacgtcccagagggggtggagcgtgtgatagagcagctgctggtcgggctgaaggacaaggacacggtcgtgcggtggtctgcagccaagggcatcggtaggatggctggcaggcttcccagagccctggcggatgatgtggtcgggtctgtgctggactgcttcagtttccaggagactgacaaggcgtggcatgggggatgtctggcgctggcagagctgggcaggagaggcctgttgctgccgtctcgactcgtggatgttgtcgccgtgatcctgaaggcgctgacctacgacgagaagcggggtgcctgcagcgtgggcaccaacgtcagggacgccgcctgctacgtgtgctgggccttcgcgcgtgcctatgagcctcaggagctgaagccctttgtgactgcaatctcgagtgcactggtgattgctgcggtgtttgaccgagacataaactgcagaagagcagcctctgccgccttccaggagaatgtggggagacagggcactttccctcatggtattgatattttgaccacagctgactattttgccgtcggtaacagatccaactgtttcctggttataagtgtgtttattgccggctttcctgagtacacgcagccaatgatagaccacctggttaccatgaagatcagccactgggatggggtcatccgagagttggctgcgagggcgctgcacaacctggcccagcaggcacccgagttcagcgccacgcaagtcttcccgaggctgctgtccatgacactgagtccagatcttcacatgaggcatgggtcgattctcgcctgcgcagaagttgcttacgccttgtacaaacttgcagcccaagagaacaggcccgtcacggaccatctggacgagcaggcagtgcagggcctgaagcagattcaccagcagctctatgatcgtcagttatacaggggtctgggaggacagctcatgagacaagcagtgtgtgttttaatagaaaagttgtcactttccaaaatgccctttagaggtgacaccgtaattgatggttggcaatggctgataaatgacactttgagacatctccatctcatctcaagtcactcccgccagcagatgaaggatgcagcagtctcggccctggctgctctatgcagtgaatattacatgaaggagccgggggaggcagatcccgcaattcaggaggagctgatcacgcagtacctggctgagcttcggaaccccgaggagatgactcgctgtggcttctcgttggccttgggcgcccttccaggcttccttctgaaaggccggctccagcaggttctcacaggtttaagagcagttacccacacttcccccgaggacgtaagttttgctgagtccaggagagacggcttgaaggccattgcgaggatttgccagactgttggtgtgaaagcaggagccccagacgaagctgtgtgcggagagaatgtttcccagatttactgtgcgctgctgggctgcatggacgactacaccacggacagcagaggggacgtgggcacctgggtccgcaaggccgccatgaccagtctgatggatctgacacttctgctggctcggagccagcctgagctgatcgaggcccatacctgtgagcgcatcatgtgctgtgtggcccagcaggccagtgagaagattgaccgtttccgtgctcacgccgccagcgtgttcctgacgctcctgcactttgacagccctcccatcccccacgtgccccaccgaggagaactggaaaagctgtttcccaggtccgatgtggcctccgtgaactggagtgcaccttcccaggccttcccacgcatcacccagctccttgggctgcccacctaccgctaccacgtcctgctggggctagtcgtgtccctgggcggcttgacggagtcgacgatccggcactccacccagagcctctttgagtacatgaagggcattcagagcgacccgcaggccctgggcagcttcagcgggacccttctgcagatctttgaggacaaccttctgaatgagagggtgtccgtgccgctgctgaagacgctggaccacgtgctcacccacggctgcttcgacatcttcaccacggaggaggaccacccctttgctgtgaagttgcttgcgctctgtaagaaagaaatcaagaattcaaaagatatccagaagctcctgtcaggcatcgcagtgttctgcgagatggtgcagttccccggcgacgtgaggaggcaggccctcctgcagctgtgtctgctcctctgccaccgtttcccgctgatccggaagaccacggccagccaggtgtacgagacattgctcacctacagtgacgtcgtgggcgcggatgtgctggacgaggtggtgactgtgctcagtgacactgcgtgggacgcggagcttgcagtggtgagagagcagcgcaaccgtctgtgtgaccttctgggcgtacccaggccccagctggtgccccagcctggagcttgt

SEQ ID NO: 33049 - DNA, 1966 bp, Homo sapiens
  source 1..1966: mol_type = unassigned DNA
attctcgtctatgctccagcagccgtacctcactccggtggaggcgggacttcctacagcacttccggccagagcctcaagcttcgctgctgggcagttggctggaggggctgctgctgggaacacctggagtctccgcgggcagatctcatattttggattctggatatattataatgagtgacactttgacagcggatgtcattggtcgaagagttgaagttaatggagaacatgcaacagtacgttttgctggtgttgtccctcccgtggcaggaccctggttaggagtagaatgggacaatcccgagagaggaaagcatgatgggagccacgaagggactgtgtattttaaatgcaggcacccgacaggaggatcctttattcgtccgaacaaggtaaattttggaacagactttcttactgcaattaagaaccgctatgtgttagaagatggaccagaggaagatagaaaagagcaaattgttacaattggaaataaacctgtggagactatcggttttgactctattatgaaacagcaaagtcagctgagcaagttgcaagaagtttctctgaggaactgtgcagtaagttgtgctggtgaaaaaggaggagttgctgaagcatgtcctaatatcagaaaggtagatttgtcaaaaaacctgttgtcatcatgggatgaagtgatacacattgctgatcagctcagacacctggaagtccttaatgtcagtgaaaataaactaaaatttccctccggttcagtattaactggaacgctttctgtactgaaggttttagtcctcaatcaaacaggaataacgtgggctgaggtgctgcggtgtgtcgcggggtgcccaggcctggaggaactctaccttgagtctaacaacattttcatttccgaaaggccaacagatgttctccagacagtcaagttattagatctttcctctaatcaattaattgatgaaaatcagctgtatctgatagcccacctgcccaggttagaacaattaatcctctctgacactggaatttcttctctacattttccggatgctggaattgggtgcaaaacgtccatgttcccatccttgaagtacctggtagtaaacgacaatcagatatcacaatggtcgtttttcaatgagctagagaagttaccaagtctacgggctttgtcctgcctaagaaaccccctgaccaaagaggacaaagaagcagagacggcgcgactactcattatcgccagcattggccagctgaagacgctgaacaaatgtgagattctccccgaggagaggcggagagctgagcttgactaccgaaaagcttttggaaatgagtggaaacaggctggtggacataaggatccggaaaaaaacagactcagcgaagaattcctcacagcccatcccagataccagttcctctgcctgaaatatggtgcacctgaagattgggaactcaaaacacagcaaccacttatgctgaaaaaccagctactaacactgaagataaaataccctcatcaacttgatcagaaagtcctggagaaacaactgccgggctccatgacaattcaaaaggtgaagggattgctgtcacgtcttctcaaagttcctgtgtcagaccttctgttgtcctatgaaagtcccaaaaagccgggcagagaaatcgagctggaaaatgacctaaagtcattacagttttattctgtggaaaatggagattgtctattagtgcgatggtgacaaccaactaataaaatttaaagaccacactgcttatcgtgtctggggttcaccggaaataaatgattcactggaacaattctactgtcaaaacaaagggggtttacaacttgtcctaagtataacaagggatgtattttttgttgggaagtgaccatttctaggcttatacataatagcaataataaaggctttgaacctactaa

SEQ ID NO: 33050 - DNA, 1956 bp, Homo sapiens
  source 1..1956: mol_type = unassigned DNA
ctacagcacttccggccagagcctcaagcttcgctgctgggcagttggctggaggggctgctgctgggaacacctggagtctccgcgggcaggtgagcttcagaggttcggggagctttcggaacgagcattcctggccgatctcatattttggattctggatatattataatgagtgacactttgacagcggatgtcattggtcgaagagttgaagttaatggagaacatgcaacagtacgttttgctggtgttgtccctcccgtggcaggaccctggttaggagtagaatgggacaatcccgagagaggaaagcatgatgggagccacgaagggactgtgtattttaaatgcaggcacccgacaggaggatcctttattcgtccgaacaaggtaaattttggaacagactttcttactgcaattaagaaccgctatgtgttagaagatggaccagaggaagatagaaaagagcaaattgttacaattggaaataaacctgtggagactatcggttttgactctattatgaaacagcaaagtcagctgagcaagttgcaagaagtttctctgaggaactgtgcagtaagttgtgctggtgaaaaaggaggagttgctgaagcatgtcctaatatcagaaaggtagatttgtcaaaaaacctgttgtcatcatgggatgaagtgatacacattgctgatcagctcagacacctggaagtccttaatgtcagtgaaaataaactaaaatttccctccggttcagtattaactggaacgctttctgtactgaaggttttagtcctcaatcaaacaggaataacgtgggctgaggtgctgcggtgtgtcgcggggtgcccaggcctggaggaactctaccttgagtctaacaacattttcatttccgaaaggccaacagatgttctccagacagtcaagttattagatctttcctctaatcaattaattgatgaaaatcagctgtatctgatagcccacctgcccaggttagaacaattaatcctctctgacactggaatttcttctctacattttccggatgctggaattgggtgcaaaacgtccatgttcccatccttgaagtacctggtagtaaacgacaatcagatatcacaatggtcgtttttcaatgagctagagaagttaccaagtctacgggctttgtcctgcctaagaaaccccctgaccaaagaggacaaagaagcagagacggcgcgactactcattatcgccagcattggccagctgaagacgctgaacaaatgtgagattctccccgaggagaggcggagagctgagcttgactaccgaaaagcttttggaaatgagtggaaacaggctggtggacataaggatccggaaaaaaacagactcagcgaagaattcctcacagcccatcccagataccagttcctctgcctgaaatatggtgcacctgaagattgggaactcaaaacacagcaaccacttatgctgaaaaaccagctactaacactgaagataaaataccctcatcaacttgatcagaaagtcctggagaaacaactgccgggctccatgacaattcaaaaggtgaagggattgctgtcacgtcttctcaaagttcctgtgtcagaccttctgttgtcctatgaaagtcccaaaaagccgggcagagaaatcgagctggaaaatgacctaaagtcattacagttttattctgtggaaaatggagattgtctattagtgcgatggtgacaaccaactaataaaatttaaagaccacactgcttatcgtgtctggggttcaccggaaataaatgattcactggaacaattctactgtcaaaacaaagggggtttacaacttgtcctaagtataacaagggatgtattttttgttgggaagtgaccatttctaggcttatacataatagcaataataaaggctttgaacct

SEQ ID NO: 33051 - DNA, 1980 bp, Homo sapiens
  source 1..1980: mol_type = unassigned DNA
agagcctcaagcttcgctgctgggcagttggctggaggggctgctgctgggaacacctggagtctccgcgggcagatctcatattttggattctggatatattataatgagtgacactttgacagcggatgtcattggtcgaagagttgaagttaatggagaacatgcaacagtacgttttgctggtgttgtccctcccgtggcaggaccctggttaggagtagaatgggacaatcccgagagaggaaagcatgatgggagccacgaagggactgtgtattttaaatgcaggcacccgacaggaggatcctttattcgtccgaacaaggtaaattttggaacagactttcttactgcaattaagaaccgctatgtgttagaagatggaccagaggaagatagaaaagagcaaattgttacaattggaaataaacctgtggagactatcggttttgactctattatgaaacagcaaagtcagctgagcaagttgcaagaagtttctctgaggaactgtgcagtaagttgtgctggtgaaaaaggaggagttgctgaagcatgtcctaatatcagaaaggtagatttgtcaaaaaacctgttgtcatcatgggatgaagtgatacacattgctgatcagctcagacacctggaagtccttaatgtcagtgaaaataaactaaaatttccctccggttcagtattaactggaacgctttctgtactgaaggttttagtcctcaatcaaacaggaataacgtgggctgaggctcatgcgcagtgtggtggcagcaggcacggtctcgacatgcagaaagacgccagcaagttcgtggatctgtgcgtgctgcagaaatgctccaccagcaactgcatcatcagtgccaaggaccacacatccatgcggatgaacgtggccaaggtgctgcggtgtgtcgcggggtgcccaggcctggaggaactctaccttgagtctaacaacattttcatttccgaaaggccaacagatgttctccagacagtcaagttattagatctttcctctaatcaattaattgatgaaaatcagctgtatctgatagcccacctgcccaggttagaacaattaatcctctctgacactggaatttcttctctacattttccggatgctggaattgggtgcaaaacgtccatgttcccatccttgaagtacctggtagtaaacgacaatcagatatcacaatggtcgtttttcaatgagctagagaagttaccaagtctacgggctttgtcctgcctaagaaaccccctgaccaaagaggacaaagaagcagagacggcgcgactactcattatcgccagcattggccagctgaagacgctgaacaaatgtgagattctccccgaggagaggcggagagctgagcttgactaccgaaaagcttttggaaatgagtggaaacaggctggtggacataaggatccggaaaaaaacagactcagcgaagaattcctcacagcccatcccagataccagttcctctgcctgaaatatggtgcacctgaagattgggaactcaaaacacagcaaccacttatgctgaaaaaccagctactaacactgaagataaaataccctcatcaacttgatcagaaagtcctggagaaacaactgccgggctccatgacaattcaaaaggtgaagggattgctgtcacgtcttctcaaagttcctgtgtcagaccttctgttgtcctatgaaagtcccaaaaagccgggcagagaaatcgagctggaaaatgacctaaagtcattacagttttattctgtggaaaatggagattgtctattagtgcgatggtgacaaccaactaataaaatttaaagaccacactgcttatcgtgtctggggttcaccggaaataaatgattcactggaacaattctactgtcaaaacaaagggggtttacaacttgtcctaagtataacaagggatgtat

SEQ ID NO: 33052 - DNA, 4122 bp, Homo sapiens
  source 1..4122: mol_type = unassigned DNA
ccgggcgggagtagctggtggaccccgttgagctgccgaacttccgggactcccccgcgaccccttcccagcttcccgtccgctccgccgcagcgattgtctcggtgggttgattcggcacaaaccgcccgacccaggggccggtgcgcgtgtggaaggggaagcactcccctcgtggtcgcctggaggtgcgctggaggagggggtgacataaccagggactcgaggtccgccgtgggaatgatccacgaactgctcttggctctgagcgggtaccctgggtccattttcacctggaacaagcggagtggcctgcaggtatcgcaggacttccctttcctccaccccagtgagaccagtgtcctgaatcgactctgccggctcggcacagactatattcgcttcactgagttcattgaacagtacacgggccatgtgcaacagcaggatcaccatccatctcaacagggccaaggtgggttacatggaatctacctgcgggccttctgcacagggctggattctgttttgcagccttatcgccaagcactgcttgatttggaacaagagttcctgggtgatccccatctctccatatcacatgtcaactacttcctagaccagttccagcttctttttccctctgtgatggttgtagtagaacaaattaaaagtcaaaagattcatggttgtcaaatcctggaaacagtctacaaacacagctgtggggggttgcctcctgttcgaagtgcactggaaaaaatcctggccgtttgtcatggggtcatgtataaacagctctcagcctggatgctccatggactcctcttggaccagcatgaagaattctttatcaaacaggggccatcttctggtaatgtcagtgcccagccagaagaggacgaggaggatctgggcattgggggactgacaggaaaacaactgagagaactgcaggacttgcgcctgattgaggaagagaacatgctggcaccatctctgaagcagttttccctacgagtggagattttgccatcctacattccagtgagggttgctgaaaaaatcctatttgttggagaatctgtccagatgtttgagaatcaaaatgtgaacctgactagaaaaggatccattttgaaaaaccaggaagacacttttgctgcagagctgcaccgtctcaagcagcagccactcttcagcttggtggactttgaacaggtggtggatcgcattcgcagcactgtggctgagcatctctggaagttgatggtagaagaatccgatttactgggtcagctgaagatcattaaagacttttaccttctgggacgtggagaactgtttcaggccttcattgacacagctcaacacatgttgaaaacaccacccactgcagtaactgagcatgatgtgaatgtggcctttcaacagtcagcacacaaggtattgctagatgatgacaaccttctccctctgttgcacttgacaatcgagtatcacggaaaggagcacaaagatgctactcaggcaagagaagggccttctcgggaaacttctccccgggaagcccctgcatctggctgggcagccctaggtctttcctacaaagtacagtggccactacatattctcttcaccccagctgtcctggaaaagtacaatgttgtttttaagtacttactgagtgtgcgccgggtgcaagctgagctgcagcactgctgggccctacaaatgcagcgcaagcacctcaagtcgaaccagactgatgcaatcaagtggcgcctaagaaatcacatggcatttttggtggataatcttcagtactatctccaggtagatgtgttggagtctcagttctcccagctgcttcatcagatcaattctacccgagactttgaaagcatccgattggctcatgaccacttcctgagcaatttgctggctcaatcctttatcctattgaaacctgtgtttcactgcctgaatgaaatcctagatctctgtcacagtttttgttcgctggtcagtcagaacctaggcccactggatgagcgtggagccgcccagctgagcattctcgtgaagggctttagccgccagtcttcactcctgttcaagattctctccagtgttcggaatcatcagatcaactcagatttggctcaactactgttacgactagattataacaaatactatacccaggctggtggaactctgggcagtttcgggatgtgaaaatttctggctcataaattgaaataacagccacgttcccaaggttgtaacagaagattcaaaacatcccattctagccacacacaaataaatatctgcggcttagtgataggactctaccttttctcctagaagcagttactgaacatccaggagtacaactccttcccatcattcccatgtggaagggtctctcccatcaaggagaacatgtggcatctctgatcctttacattgagaacatttgttggatatgttcatttattcaatagtcatttattgagcacctactacgtaccttggtactgttcaagctgtgggagatacagcggtaaacaaacaatatagagcagaaagttaaatattttatggttcatatgtgaaaaagtaattatgtttataaatagactaactgctggatgttaccaccaagtaagaaagcaacaggtaagataggctttctctctccctataccaagtaatttatacctacacagattgggcaattctagctaatgaaaatatacttaaaagtatttcttaggccgggcatggtggctcacacctgtaatcccagcactttgggaggccgaggcgggcggatcacctgaagtcaggagtttgagaccagcctgaccaacatgatgaaacctcgattctactaaaaatacaaaaattagccaggtgtggtggcatgtgcctgtaatcccagctactcaggaggctgagacaggagaattgcttgaacctgggaagcagacgctgcagtgagctgagattgtgccattgcattccagcccgggcaacaagagcgaaattccgtctcaaaaaaaaaaaaaaaaaaaaaaaaagtattattctccaagaaaaaggtccttaagaaaaaattgagatcaagttgttagatttttaaatactgaagattgcaggcccaattacccatcttacacaaaccataggggttgaagttatcttaatatggcccagccatcactggtaatcaatattcatatcagtgtaagtaaaaagaaatattcactgaacaacgccctccaaactgaaaaagaatgcagtgttctggcatcaggttatagtcactgcatctggttttcatcactacatattctacacacactgggaagctctgacaacttattccctgctattatcaactaaagatcaccctttctactgctgtctctggagcaggagctggcaaactatggcctgctgtctgtttttgtacagttttactgaaacacagccatgcccatttgtttactcattgtctatggttgctttcatgccctcacagcaaaggcgagtagttgtgatggatcaaatggcccacaaagcctgaaatatttactctttgaccctttacagaaaaaaaccttgttgacccctgctttagagaatgagaagccatgcagggatcagtgatgccagaggaagggaaggaactgcttccagctattgtgacaataataataataataatattgggtctttgactagaacgtgtaacatttccaggtgttctcacttgtgcttcccatgtttatcttacggaaggtcattccatcaagcttatggtcactgtcccttcatggcagttggtcctttcgttctccctttagctctaagagttggggagtacccacaggtgagctgtgatctcagctcagagagagagcatgaggtcttttttaactgtcaggaaacagagctgtgcccaattccactcaacttttggcacaactgttaatctgggccttcacctaccttaaactgagtttctgcaagcatagcattttagacaccctggaataaccttttgggaatgatgccacagaataaagttcactcttaacttttcaa

SEQ ID NO: 33053 - DNA, 5116 bp, Homo sapiens
  source 1..5116: mol_type = unassigned DNA
gggcggtgctgggcgggacgggcgggcgcggggcggcggctggagagctccgctgagcaccgggtcgcgcgcggccgagtcgcggaggcgcctccgctgcagtcgctgcgtctccaagcaacatggctgacaaggccaagcctgccaaagctgccaacaggacgccccccaagtccccgggggacccctcgaaggaccgggcagccaagaggctgtcgctggaatcggagggtgctggtgagggggcagccgcatcccctgagctcagtgccctggaggaggccttccggcgctttgccgtgcacggggacgccagggccaccgggagggagatgcacggcaagaactggtcgaagctgtgcaaggactgccaggtgatcgacggcaggaacgtgaccgtcactgacgtggacatcgtcttcagcaagatcaaagggaagtcttgccggaccatcacctttgagcagttccaggaggcgctggaggagctcgccaagaagcgattcaaagacaagagcagcgaggaggccgttcgcgaggtgcacaggctcatcgagggcaaggcgcccatcatctcaggggtgacgaaagccatctcgtcgcccacagtgtcgaggctcacggacaccaccaagttcacgggctcccacaaggagcgcttcgacccctctggcaagggcaagggcaaggctggccgcgtggatctggtggacgagtcaggctatgtgtccggctacaagcacgcaggcacctacgaccagaaggtgcaagggggcaagtagcccccgctccatgcctcgcggcactgccggtgtccccagagcagggactctgtcacctcgcacttcattacattcctgtactaactggggcagaactcagacgggtgccccagagggggctggggggcggccaggcccaggcctccctcctgcccctcctcctaccggatgcccccagcactcccctctcaaaccaggtttgggccccagttcgctgaccctcctaatacacctgcctcgtcctcagccatttccaaagtgtctcgcggatcacaccacactgggcacgtggtttgcaggtcaaaggggcgttttaaagcagctggctgtcatggcaacaggaggctgtgctgacctcctgagcggcagacaccttccaggagccctgagggtggcaggagctaaccccaaccagcaggcaactaacacggaattggccccacaccggacgtgggaggtgtctgtggggcccgaggcctgtcctgtgtgcagcggacaccacggggccttcctgctttcctgggcagagggcagagtgaggccacctggcgggggtgctgggcgcctggcacatgtgtggggaagccggtcacatggacacacctgtgcacacatgcctacaggccagctctgtgccaagggcaacctaggtaaaacgaaagccgtcaggggcagtgggcggcttcccggctgaccacagtggcttggactgtgagggtagagtaggctcgctttgctttcctgagaagatgcggtggctgcctatgttctcagagcgggtctgggaagattcagaatgtccggtccctgtggtgttgccaggcaagagacacgaagtgccgagacactcctcgcctcaccgcgtgacagagcctctgcccggccctcccgttcgcccgtcctcactagctgcaccctgtttgctcgcagacctcccattgccacagcccaagcaccttcttcaactctcccaaaatggctcagcctaacctctcctggccaatcccccccgccggagagcaggacactagggaggacccccagtcctgcagtgtctgtgggggtttctctgccagcagggggctgagcagagcccatccaggacactccacactgccaggacacacccaggcggcccgcccttgcctgtctgcacctggggagaagccggcgctcctgctccctcctggggaggctgacgggtgtggccacccgctgtcacaatggcacactgccactgtcccttggcacgcacacagccacagccacacgtgtgacctgctgggccgtggttctggagtctacctgcggatgagcctgcggcagtcctggggaaacttttccagagcctgttagcccgtggctacggtcaggctctggccagggcagagggctgcccagggccaggctcacagtacaggagggtggcgaggcccctccctcactggcacgcatgagcaccacccgcctccccgactcccaagagtgcacctgctgcggccacagctccgtggaaggactccccctacctgagcagagcagaagccccagggcggagctcccagccagcatggtccgctgagggctggggggcggtctccgaggcccctcaacagagaagcctccacctgaggatggggaggacctggcaggcagcttccacggcagggctgggaagttcagtgcctggaaataaagagcaaggaaaaatggacctcaggcttcgtggctcctttaggatgtcacctcaccggcctggggaaggcggggggtgcccaagcccagccctgtgcccccgctgaacctggctggaccgcgtgtgaaaggcagaactaacgtgcggaaacatttgaaaacaactctgaatgtgcggttcggaatcacccgatcacagacgagcggtcaccggaatcgcccggtcacagacgagcagtcatcggactcacccgatcacagacgagcggtcaccggaatcgcccgatcacagacgagcggccaccggaatcgcccaatcacagacaagcagtcatcggaatcacccgatcacagacgagcagtcatcggactcacccgatcacagacgagcggtcaccagactcgcccgatcacagacgagcagtcatcggaatcacccgatcacagacgagcagtcatcggactcacccgatcacagacgagcggtcaccagaatcgcccgatcacagacgagcagtcatcggaatcacccgatcacagacgagtggccaccggaatcacccgataacagcccatcacaactccaaagcccttgtgttgaaaaggccgaggacgagtggtcaccaaacagggtggctccccaggtcccgaagcctgagacccggaaggccctggcacccttacaccctcggactcctgccctcctcggcctccctggccccagcgcggctccaccctgggctgcgtctcctggtcacaggctgcgtttctcctttctgtccgtgggcagcccagtccccacagtcacggccaagccacgcagaacgaacatgactccagaggacctcgccctggagctgagcctggcgccgggtcaggacggagggaagggcgggttggggtccgcgggtcctcacaccgcacggcaggcacagaggctcgccaggccctgatccggtctgtggggacgagggacactgaggagaggtgctgggcaccaggacgctgcctcctggtccctggttggcctcagacaagcacggcctcgagaaaagagccaagcgcatcgggagcacaccagaaaccggccctgagcacgagaagagcctccgcccggcccgggcaccacccgacctcgcagggagcaggccctgtcaccgacgggtcacctcgcccacacggccagcaccgactcaccacagcccttcccagacctggctggagtggccggagcggcggggctcatggctcccatcttggcccctggaggtgagctcattcacagaagtggtcccttcactctgagagagaaaatcgtggcgtgcatcccaaaccctaggccacgcctgtgggtttcgtgaatgagatcgaggctgctgtggcaccctgcccgtcctggcctggagcaccctgggatcctggagggagaggccccacgcccccactctccctccacacttccagggttggtgcccacgagttagaggcacgccctcccccagcggccctcaggcttttctcagacatgcgggagccaggagagcacccttctccactcagctccaaagcgaatctttgaaaacacccactcggctcccatctctgtcacctagccaggaggggtagcaaaaataaagtcacgaggacatagtggtcaccactgtcagttacaacttgtctgtggaatccgtaattgcatctgtgtgccgcctccgaacacagaacattgtttggacggcagccccactgcacataacagacccgtgcatcttcctcagtcagtttctgaatattgtgaattcaggcaggtgtgtgttctcttctgcatgtttttatgcactgccaattagcttctactaaccacggttcaacagaaaataaatgtgtatttgtgaataacaaactgcacaacctgcaaaccaggagagagggacaggttctgtcaggggtgacaccaggacacagggacaggttctgtcgggggtgacaccaggacacagggacaggttctgtcatgggtgacacgaggacacagggacaggttctatcatgggtgacaccaggagagagggacaggttctgttgggggtgacaagaggagacagggacaggttctgtcgggggtgacaccaggagagagggacaggttctgtcaggggtgacaccaggagagagggacaggttctgttgggggtgacaccaggacacaggaataggttctgtcgggaggacagtgctgatcgtgtctcagcatcaggaaaggagaaaggcagagggagagcgctgagaagactgttcacgccagagtgcttatttatttttaatttactgctataggataagcaaccaggtagtgttcctaacaattagcgttaccaaaattaaagttcaaattatatgtttaaaatattgtagaagatatatatttatactggactacttttacaccttctaatatcctgtccaagtttgggcgcagatggtggagttgggctggcatcatgtcctgtggccgccccacttgcctgttggtgccactccatcccgggccccagggatgccagctcagggctgaccacagcagccctgcgtgggcatcacctcctaccccagcccccatcctgggctgctgcggccgc

SEQ ID NO: 33054 - DNA, 5180 bp, Homo sapiens
  source 1..5180: mol_type = unassigned DNA
gcgctttcctctccggcacccggcgggcgcccgggcgcggcgccgccggcacccgagaggcgcggtagccggcgcgggcggcgggggccgggccgcggcgggcgcccgggcggggtccgcgctgagccgccttctcggccgcctggtccctgcggcggctgcccggcggcccgggcgcgcggcgcttcgccatgtacaccttcgtggtacgcgatgagaacagcagcgtctacgccgaggtctcccggctgctcctcgccaccggccactggaagaggctgcggcgagacaaccccagattcaacctgatgctgggagagaggaatcggctgcccttcgggagactgggtcacgagcccgggctggtacagttggtgaattactacaggggtgctgacaaactgtgtcgcaaagcttctttagtgaagctaatcaagacaagccctgaactggctgagtcctgcacatggttccctgaatcttatgtgatttatccaaccaatctcaagactccagttgctccagcacagaatggaattcagccaccaatcagtaactcaaggacagatgaaagagaattctttctcgcctcttataacagaaagaaagaggatggagagggcaacgtttggattgcaaagtcatcagccggtgccaaaggtgaaggcattctcatctcctcagaggcttcagagcttctcgatttcatagacaaccagggccaagtgcacgtgatccagaaatatcttgagcaccctctgctgcttgagccaggtcatcgcaagtttgacatccgaagctgggtcttggtggatcatcagtataatatctacctctatagagagggtgtgcttcggactgcttcagaaccatatcatgttgataatttccaagacaaaacctgccatttgaccaatcactgcattcaaaaagagtattcaaagaactacgggaagtatgaagaaggaaatgaaatgttcttcaaggagttcaatcagtacctaacaagtgctttgaacattaccctagaaagtagtatcttactacaaatcaaacatataataaggaactgcctcctgagcgtggagcctgccattagcaccaagcacctcccttaccagagcttccagctcttcggctttgacttcatggtcgatgaggagctgaaggtgtggctcattgaggtcaacggtgcccctgcatgtgctcagaagctctatgcagaactgtgccaaggcatcgtggacatagccatttccagtgtcttcccacccccagatgtggagcaacctcagacccagccagctgccttcatcaagctgtgacagagggcactccctgctgccttggaaaaagcacggggtcctgctccagggaatggtgaaatgactggattgctctttatccagcccacagcaggggaaagaaaggcaactcgcaaagatgagatggaagaaggcacgtgagcagaggaggcagctcccaaagagagggctgctcagggggcttcccagatgtagctctcagcagtgctgttgagacttttgaaaacaactttggtacacaaaggcagctttgtgagcagagctccttcccctctccccgggaacggcagggcactgggacctctggtcggtgcctcccacccactgcagccctagtgccttagctccatgcccggctgcagccccactgctctggactatggattggacgtcagagcatattggaggttgcctgtgtgttccccacccatcccttcggtaacactctgccacactaagctctgtacaagcatgcaccaacagtccttagttttgtgctgtgcactggcctctcggcaaaggtggtttccctcatcaccttcctgatggtgtttggtcagtcacctgtcagggtttgtgcgggttgggccccaaaacagcatatgctgctctaagtctgctctctgcatgttttagaaacaaagtggcaagtctgccctgaacctgtaagcatcaaataagcatgagagagaaaaaaacatgatatattgctttacttaataggttgaatatggtaggtctttgaaaatatgatgattcaattttctcaattttctttgctttaaccaaaattctaaatgcagttttgcctagttccctttttttttctttttttacttttttttaaacgtttgtaaaaacctctttgaggatgaggagtcagtaaaattccactccccaagtggccctgccccagacaaaggttgctttccccctttttgttctttttatgcccccaagcactttctgcagtagctagagggacaggtttccttccaggaaggattcgagttcctgtgcctgtgggtattaggagagtatatatcctgcctgaatggggaagtcttctaaaatgggaaagaagtggtttcatctccacacagtgtcttgtaaatctcaacaaatgtgtactgttagaagtggcttccgcttactggattaactaatactttataggcttttcaggaggccacatcactagcagtagggagaacaagatgtcatttgtgttcagtgtaagctgagtaaacaggcccttcctagagtgtcctggaaatcacagcaacccattgaaaactgccctccccaccagaacgtgctacgttctttcttcatgcctatgtgtgctccattcctcatttctacttggctcaagaaaacatttctgcagtcaggtgagacttttacaaaagaggagaaaatcaatgcctccttgaacatgatgagatgtgagaacttacaatgaaaaaggcaataatgatagaaattatttcttaggtacagcaatagttgataggatgtgagggtgttaccttggggtgaagtggagaaggtcccaggtgaattggctctcatggaaatttggaattacaaaataaacgtcctgggggttacccagaatacagatttaaaagtttgcctgtagagcaaaataaaacagtcagttgtagtcattaatccttgaggcccaacgcagccgatgggttggtgtttgggaaattctgagatgggagtgagatctgatcggatcctgggaagatgtatacccagttagaacgtgtagggttctgggtccctggcaagtctaggtgggcgggtgacagggaaagcatgggcatttttgtattgctgtcacatgctaacagaggtttgtaattatcttttggacccaaattatagagacattcacgagttttctagccctcacagtaacagagctaagaattcagatgtcaggaagtctgtgaatcttgatggattttctgagaaacctgactcaatggcatatataagagggaagtaagacttttaagaaaagaaaaagttatgcctcattcctcatgtggcttccaataagtatcttaggaacttatttcctttttaaaaaatattttttaaatttttaaaatttgattttaaatttcaaataaatttaaataaattttaaataaattttaaataaaattttacagagacgtggtctcactgtgttgcccaggctggattgcagtggctattcgcagttgtaatcatagcacactgcagcctcgaatttctgggcttgagcagtcctcccgtctcagcctcctgagtagctgagactacaggtgcacaccaccaagcctggctttatgtatttatttctgttcatgcggaatgattggttcagaactgttcctttcccttccatgatgtccttgacacagaaggttatgcctggctcccagtcaggcttcatacttttggtccatgtaagtgctacccgttgctgggggaggagtcatggtttatttggaaatgtcagttgcaatcatggttctgtcatttgactgcacagtatcagaggagcctgttaacctctctgtgccttagtttcttagcccatgaaagagatcattgcctgacccagggactacctcaagggcttttgatgaggacaagtgacagtaggaagatgcaagagcctttagtaccaaggttctcaacactgactacatgctggaatgactgtgaagcttttaaaaaatgttagtgcccactcttcccctgtacccccggacagttaaatcagaacctcagacagcaatatgccttgagatgccttgaaccatgcttgagaaggaaggacaaacacattattatcttggaagaattgcataaggcttatgacttaaaaaaaaaaattctttttggaaacacaagcatttctttaaggatgaccggatgttgccgtatgtatttatggcacaagcaggtgttgtctaagcagtttctctgtttgcttgtcatagcagcatttggaaactcaaacatgctttcatttacataaatagtttatgaagctttgacaacaaatgtaaacagacacgaaattataaatctgctaaatatgtattaagggtattaattattgaaagtccctttccccaaaactcaactcctatggcaattatgaactccattttaccaagaacatttaagtgcctcagcatctgtatgatatagtggagcaggtgctgacataggtaccagctgacatgatgtgtcactagctctgtgggatgattgccacatacatggaacacctgggagtgctggaaatgtactgtgatcgaagtgacaaagtgtgttttcattcacagtggaggctacatcaagcaaggggaggtccagccctcttgcaagtgtggtgagaggctctactagcaaagacatgggcaccggagtaggtcccgtgtagcatgcgggtgctgtagagaaaattcagtgacgtacatggctctggttctggacacaaaatctgtactggagaggaaatgactgctgaaataaggcgattgtatgaatatttaaaatgcctggaacactaaagtaaagtaatgatatttcaagtgtttttgtgctctttggttcttgttgtaggtattgactgtcctgggatatcactggtcatttaaattcaccatataattagccgggcatggtggcatgtggtggtggctgaggtgggaggatcgcttgaggctgaggtgtgaggctgcagtgaaccatgttcacaccactgtactctagcttgagcaacagagcaagaccctgtctcaaaagtaaataaataataaagtaaatataaatcca

SEQ ID NO: 33055 - DNA, 1645 bp, Homo sapiens
  source 1..1645: mol_type = unassigned DNA
agtgcagcgcggggcggggcgggccggtgcgcctggcagtcggctgcgtactcctgcgagcgccggagaggggctggaggcggggcgagggcgcggctcgaggcatccctgcagggcgctcctccgagtccctcggcgctctgagcccacagggaagaaggaggggccggcgtcagtgacgtcagcgagaccgaggtgagcgtgggcgttgccagtggtgctctgtcagtgcctatggattatggcagggaaagtaaaatgggtcactgatatcgagaagtcagtgctgatcaataactttgaaaagagaggatgggtccaagtgacagaaaacgaggactggaatttttactggatgagtgtgcaaaccatccgaaatgtgttcagcgttgaagctggatatcggctctcagatgaccaaatagtcaaccattttccaaaccactatgaactgacccggaaggacctgatggtgaagaacatcaaaagatacaggaaggagctggagaaagaagggagtcctctggcagaaaaagatgaaaatggaaaatacctctatctggactttgttccagtcacctatatgctgcccgctgactacaacctgtttgtagaggagttccggaagagcccgtccagcacctggatcatgaagccttgtggcaaggcccagggaaagggcatcttccttatcaacaagctctcacagatcaaaaagtggtcccgggacagcaagacatcttcgtttgtgtctcaatctaataaggaagcctacgtgatctctctctatattaacaacccgttactaattggcgggaggaagttcgacctgcgcttgtacgttctggtgtccacgtaccgtccactgcgctgttacatgtacaagcttgggttttgccggttctgcacagtgaaatacaccccgagtaccagtgagctggacaacatgttcgttcatctcaccaacgtcgccatccagaaacacggggaggactacaaccacatccatgggggcaagtggacagtgagtaacctgcggctctacctggagagcacccgcggcaaggaggtgaccagcaagctgttcgacgagatccactggatcatcgtgcagtccctgaaggctgtggcgccggtgatgaacaatgacaagcactgctttgaatgctatggctacgacatcatcatcgacgacaagctgaagccctggctgatcgaggtgaatgcgtccccgtctctcacgtccagcactgccaatgaccgaatcctcaagtacaacctgattaatgacaccctcaacatcgccgtcccgaatggtgaaatcccagactgcaaatggaacaagtcgccacctaaggaagtcctcggcaattacgagattctgtatgatgaagaattggcccagggtgacggggctgaccgggagctgagaagccgtcagggtcagtctctggggcccagagcaggccgatcgagagactcggggagagcggtcctcaccacctggaagtgagtcccacctggaccttatcaaaactactcactccacctgggcccctgctgaagccctattttgaaatttcccttttgtagagcttttttcctttcctaagccctgtaaataaacgaaggcacttctttggaa

SEQ ID NO: 33056 - DNA, 1686 bp, Homo sapiens
  source 1..1686: mol_type = unassigned DNA
agtgcagcgcggggcggggcgggccggtgcgcctggcagtcggctgcgtactcctgcgagcgccggagaggggctggaggcggggcgagggcgcggctcgaggcatccctgcagggcgctcctccgagtccctcggcgctctgagcccacagggaagaaggaggggccggcgtcagtgacgtcagcgagaccgaggtgagcgtgggcgttgccagtggtgctctgtcagtgcctatggattatggcagggaaagtaaaatgggtcactgatatcgagaagtcagtgctgatcaataactttgaaaagagaggatgggtccaagtgacagaaaacgaggactggaatttttactggatgagtgtgcaaaccatccgaaatgtgttcagcgttgaagctggatatcggctctcagatgaccaaatagtcaaccattttccaaaccactatgaactgacccggaaggacctgatggtgaagaacatcaaaagatacaggaaggagctggagaaagaagggagtcctctggcagaaaaagatgaaaatggaaaatacctctatctggactttgttccagtcacctatatgctgcccgctgactacaacctgtttgtagaggagttccggaagagcccgtccagcacctggatcatgaagccttgtggcaaggcccagggaaagggcatcttccttatcaacaagctctcacagatcaaaaagtggtcccgggacagcaagacatcttcgtttgtgtctcaatctaataaggaagcctacgtgatctctctctatattaacaacccgttactaattggcgggaggaagttcgacctgcgcttgtacgttctggtgtccacgtaccgtccactgcgctgttacatgtacaagcttgggttttgccggttctgcacagtgaaatacaccccgagtaccagtgagctggacaacatgttcgttcatctcaccaacgtcgccatccagaaacacggggaggactacaaccacatccatgggggcaagtggacagtgagtaacctgcggctctacctggagagcacccgcggcaaggaggtgaccagcaagctgttcgacgagatccactggatcatcgtgcagtccctgaaggctgtggcggtgaatgcgtccccgtctctcacgtccagcactgccaatgaccgaatcctcaagtacaacctgattaatgacaccctcaacatcgccgtcccgaatggtgaaatcccagactgcaaatggaacaagtcgccacctaaggaagtcctcggcaattacgagattctgtatgatgaagaattggcccagggtgacggggctgaccgggagctgagaagccgtcagggtcagtctctggggcccagagcaggccgatcgagagactcggggagagcggtcctcaccacctggaagtgagtcccacctggaccttatcaaaactactcactccacctgggcccctgctgaagccctattttgaaatttcccttttgtagagcttttttcctttcctaagccctgtaaataaacgaaggcacttctttggaaggttatggagtctgtttgactagtgctaaaggaaacaattcatgcggatgtataaaactcgctcttttttttttaatttttaacctaagcagaattttcatattaaaaactcacttttttgacagaaa

SEQ ID NO: 33057 - DNA, 421 bp, Homo sapiens
  source 1..421: mol_type = unassigned DNA
agtgcagcgcggggcggggcgggccggtgcgcctggcagtcggctgcgtactcctgcgagcgccggagaggggctggaggcggggcgagggcgcggctcgaggcatccctgcagggcgctcctccgagtccctcggcgctctgagcccacagggaagaaggaggggccggcgtcagtgacgtcagcgagaccgaggtgagcgtgggcgttgccagtggtgctctgtcagtgcctatggattatggcagggaaagtaaaatgggtcactgatatcgagaagtcagtgctgatcaataactttgaaaagagaggatgggtccaagtgacagaaaacgaggactggaatttttactggctccttgaccttcctgaatttcggtacagatcctgtttaaatgagtttcctgacttcagagtctga

SEQ ID NO: 33058 - DNA, 4124 bp, Homo sapiens
  source 1..4124: mol_type = unassigned DNA
agctgagcgttatgagcgcctgcgcagtggctccgagcgggcggttgcttgttggttgttgtagtaaccggggaagcagccgtcggcggctgccctgagccttcctggggaaggaggagggaggtaggcgcagagcgcggtccacgcctgctcgccccgaaccatgggaagatgagacaggaatctgtgccatccaaattgcttgatccagtgaatctgctaggaaaggtctctgaggcccccgtctgctgactgcatgacaaaccctaaaggaaatgccaatcgtgatggcccgggacctggaggaaacagcatcatcctcagaggatgaggaggtcataagtcaagaggatcatccatgcatcatgtggactggaggctgcaggagaattccagttttggtattccatgccgacgctattcttacaaaggacaacaatattagagtaattggagaacgttatcatttgtcttataagattgtacgaacggacagtcgcctagtacgcagcattctgacagcccatggatttcatgaagttcacccaagcagcactgactataacctaatgtggacaggatcccacctgaagcccttcttactgcgcaccctctctgaagcacaaaaagttaatcactttcccaggtcttatgaacttacccggaaggaccgactgtacaaaaacattattcgaatgcagcatacacatggattcaaggcttttcacatcctcccccagaccttcctcctgccagctgagtacgcggaattttgtaattcatattcgaaggaccggggaccttggatagtaaaaccagtggcatcttcaagggggcggggcgtctacctgatcaacaatccaaaccagatctccctggaagagaacattttggtctcccgttacattaacaaccccctgctcatagatgatttcaagtttgacgtgcgcctctatgtgctcgtgacttcctatgatcctcttgtcatctatctctatgaagaaggattggctaggtttgcaactgtgcgatatgatcaaggagccaagaacattcggaaccagttcatgcatctgacaaactacagtgtcaacaagaaaagtggagattacgtcagttgtgacgatccagaagtggaggattatggaaacaaatggagcatgagtgctatgcttaggtacctgaaacaagaaggcagagatacaaccgcattgatggcccatgtagaagacctgatcattaagactataatctctgctgaactagctattgctactgcctgtaaaacctttgttcctcatcgcagcagttgttttgaactctatggctttgacgtgctcatagattctactctgaagccatggttgttggaagtgaatctctctccttctttggcctgtgatgcgcctctggacctaaagattaaagccagtatgatttcagatatgttcactgttgtaggatttgtgtgccaagatcctgcccagcgggcatcaactcggccaatttatcccacctttgagtcttccaggcgaaaccctttccagaaacctcagcgttgccgtccactctctgccagtgatgcggaaatgaaaaacctcgtgggctcagcccgggagaaagggccagggaagttgggtggttctgtgcttggtctgtcaatggaggagatcaaagttttacgaagggtgaaggaggagaatgatcggcgaggtggatttattcgcatatttcctacatctgagacatgggaaatatatgggtcctacctcgagcataagacctcaatgaactatatgctggcaacacgcctcttccaggacagaatgactgctgatggagcgccagaattgaagatagagagtctgaattcaaaggccaagctgcatgctgcactttacgagaggaagctcctgtctctggaggtgcgaaaacgtagacgacggagtagcagattgagggcaatgaggccaaaatacccagtgattacccaaccagctgaaatgaatgttaaaactgagacagagagtgaagaggaggaagaagtcgcattagataatgaagatgaagaacaggaggcttcccaggaggagtctgcaggatttcttagagaaaatcaagccaaatatacaccctcattgacagctttggtagaaaatacacccaaagaaaattccatgaaagttcgtgaatggaataataaaggtggacactgctgcaaacttgagactcaggagctagagcctaaatttaacctgatgcagattcttcaagataatggcaatcttagcaaaatgcaggcccgaatagcattctctgcctatctccagcatgttcaaattcgcctgatgaaagacagtggcggtcagacgttcagtgccagttgggctgccaaagaggatgaacagatggagctggttgttcgtttcctcaagcgagcatcaaataacctccagcattcactgaggatggtattacccagtcgacgattggcacttctggaacgcagaagaatcctggcccaccagctgggtgactttatcattgtatacaacaaggaaacagaacaaatggctgaaaagaaatcaaagaagaaagttgaggaagaagaggaagatggggtgaatatggaaaactttcaggagttcatcagacaagcaagtgaggctgaactggaggaggtgttgactttttatacccaaaagaacaagtctgctagtgtcttcctggggactcactctaaaatttctaagaacaacaacaattattctgatagtggggcaaaaggtgatcaccctgagactataatggaagaagtgaaaataaagccacctaaacagcaacagacgacagaaattcattctgataaattatctcgatttaccacttcagcagaaaaagaggcaaaattagtttatagcaattcctcctctggtcctactgctactctgcagaaaattcccaacacccatttgtcatctgttacaacctctgacctctctccagggccttgccaccattcttctttatctcaaattccttcagctatccccagcatgcctcaccagccaacaattttactgaacacagtctctgccagtgcttctccctgcctacatcccggggcacagaacatcccaagccctactggcctgccacgctgtcgatcaggaagtcacaccattggtcccttttcttccttccaaagtgctgcacacatctatagccagaaactgtctcgtccctcttcagcaaaggcagcaggatcgtgctatctaaacaagcatcattcaggaatagccaaaacacaaaaagagggagaagatgcttctttatatagcaaacggtacaaccaaagtatggttacagctgaacttcagcggctagctgagaagcaggcagcgagacagtattctccatccagccacatcaacctcctcacccaacaggtaacaaacctgaatttggcaactggcatcataaacagaagcagtgcttcagctcccccaaccctccgacccatcatcagtcctagtggcccgacatggtctacacagtcagacccccaagctcccgagaatcactccagctctcctggaagcaggagcctgcagacagggggatttgcctgggaaggagaagtagaaaacaacgtgtacagccaggctacaggggtggtcccccagcacaagtatcaccccacagcaggcagctatcagcttcaatttgccctgcagcaacttgaacaacaaaaacttcagtcccggcagctcctggaccagagtcgagcccggcaccaggcaatctttggcagccagacactacctaactccaatttatggacaatgaataatggtgcaggttgtagaatttccagtgccacagctagtggccagaagccaaccactctgccacaaaaagtggtaccacctccaagttcttgcgcctccctggttcccaaacccccacccaaccacgaacaagtgctcagaagggcaacatcccagaaagcttccaaagggtcctccgcggaagggcagctgaatggactccagagcagccttaaccctgcagcctttgtgcccatcaccagctctacagttaattctcacacagccctgtga

SEQ ID NO: 33059 - DNA, 4683 bp, Homo sapiens
  source 1..4683: mol_type = unassigned DNA
gggaagcagccgtcggcggctgccctgagccttcctggggaaggaggagggaggtaggcgcagagcgcggtccacgcctgctcgccccgaaccatgggaagatgagacaggaatctgtgccatccaaattgcttgatccagtgaatctgctaggaaaggtctctgaggcccccgtctgctgactgcatgacaaaccctaaaggaaatgccaatcgtgatggcccgggacctggaggaaacagcatcatcctcagaggatgaggaggtcataagtcaagaggatcatccatgcatcatgtggactggaggctgcaggagaattccagttttggtattccatgccgacgctattcttacaaaggacaacaatattagagtaattggagaacgttatcatttgtcttataagattgtacgaacggacagtcgcctagtacgcagcattctgacagcccatggatttcatgaagttcacccaagcagcactgactataacctaatgtggacaggatcccacctgaagcccttcttactgcgcaccctctctgaagcacaaaaagttaatcactttcccaggtcttatgaacttacccggaaggaccgactgtacaaaaacattattcgaatgcagcatacacatggattcaaggcttttcacatcctcccccagaccttcctcctgccagctgagtacgcggaattttgtaattcatattcgaaggaccggggaccttggatagtaaaaccagtggcatcttcaagggggcggggcgtctacctgatcaacaatccaaaccagatctccctggaagagaacattttggtctcccgttacattaacaaccccctgctcatagatgatttcaagtttgacgtgcgcctctatgtgctcgtgacttcctatgatcctcttgtcatctatctctatgaagaaggattggctaggtttgcaactgtgcgatatgatcaaggagccaagaacattcggaaccagttcatgcatctgacaaactacagtgtcaacaagaaaagtggagattacgtcagttgtgacgatccagaagtggaggattatggaaacaaatggagcatgagtgctatgcttaggtacctgaaacaagaaggcagagatacaaccgcattgatggcccatgtagaagacctgatcattaagactataatctctgctgaactagctattgctactgcctgtaaaacctttgttcctcatcgcagcagttgttttgaactctatggctttgacgtgctcatagattctactctgaagccatggttgttggaagtgaatctctctccttctttggcctgtgatgcgcctctggacctaaagattaaagccagtatgatttcagatatgttcactgttgtaggatttgtgtgccaagatcctgcccagcgggcatcaactcggccaatttatcccacctttgagtcttccaggcgaaaccctttccagaaacctcagcgttgccgtccactctctgccagtgatgcggaaatgaaaaacctcgtgggctcagcccgggagaaagggccagggaagttgggtggttctgtgcttggtctgtcaatggaggagatcaaagttttacgaagggtgaaggaggagaatgatcggcgaggtggatttattcgcatatttcctacatctgagacatgggaaatatatgggtcctacctcgagcataagacctcaatgaactatatgctggcaacacgcctcttccaggacagaatgactgctgatggagcgccagaattgaagatagagagtctgaattcaaaggccaagctgcatgctgcactttacgagaggaagctcctgtctctggaggtgcgaaaacgtagacgacggagtagcagattgagggcaatgaggccaaaatacccagtgattacccaaccagctgaaatgaatgttaaaactgagacagagagtgaagaggaggaagaagtcgcattagataatgaagatgaagaacaggaggcttcccaggaggagtctgcaggatttcttagagaaaatcaagccaaatatacaccctcattgacagctttggtagaaaatacacccaaagaaaattccatgaaagttcgtgaatggaataataaaggtggacactgctgcaaacttgagactcaggagctagagcctaaatttaacctgatgcagattcttcaagataatggcaatcttagcaaaatgcaggcccgaatagcattctctgcctatctccagcatgttcaaattcgcctgatgaaagacagtggcggtcagacgttcagtgccagttgggctgccaaagaggatgaacagatggagctggttgttcgtttcctcaagcgagcatcaaataacctccagcattcactgaggatggtattacccagtcgacgattggcacttctggaacgcagaagaatcctggcccaccagctgggtgactttatcattgtatacaacaaggaaacagaacaaatggctgaaaagaaatcaaagaagaaagttgaggaagaagaggaagatggggtgaatatggaaaactttcaggagttcatcagacaagcaagtgaggctgaactggaggaggtgttgactttttatacccaaaagaacaagtctgctagtgtcttcctggggactcactctaaaatttctaagaacaacaacaattattctgatagtggggcaaaaggtgatcaccctgagactataatggaagaagtgaaaataaagccacctaaacagcaacagacgacagaaattcattctgataaattatctcgatttaccacttcagcagaaaaagaggcaaaattagtttatagcaattcctcctctggtcctactgctactctgcagaaaattcccaacacccatttgtcatctgttacaacctctgacctctctccagggccttgccaccattcttctttatctcaaattccttcagctatccccagcatgcctcaccagccaacaattttactgaacacagtctctgccagtgcttctccctgcctacatcccggggcacagaacatcccaagccctactggcctgccacgctgtcgatcaggaagtcacaccattggtcccttttcttccttccaaagtgctgcacacatctatagccagaaactgtctcgtccctcttcagcaaaggcaggatcgtgctatctaaacaagcatcattcaggaatagccaaaacacaaaaagagggagaagatgcttctttatatagcaaacggtacaaccaaagtatggttacagctgaacttcagcggctagctgagaagcaggcagcgagacagtattctccatccagccacatcaacctcctcacccaacaggtaacaaacctgaatttggcaactggcatcataaacagaagcagtgcttcagctcccccaaccctccgacccatcatcagtcctagtggcccgacatggtctacacagtcagacccccaagctcccgagaatcactccagctctcctggaagcaggagcctgcagacagggggatttgcctgggaaggagaagtagaaaacaacgtgtacagccaggctacaggggtggtcccccagcacaagtatcaccccacagcaggcagctatcagcttcaatttgccctgcagcaacttgaacaacaaaaacttcagtcccggcagctcctggaccagagtcgagcccggcaccaggcaatctttggcagccagacactacctaactccaatttatggacaatgaataatggtgcaggttgtagaatttccagtgccacagctagtggccagaagccaaccactctgccacaaaaagtggtaccacctccaagttcttgcgcctccctggttcccaaacccccacccaaccacgaacaagtgctcagaagggcaacatcccagaaagcttccaaagggtcctccgcggaagggcagctgaatggactccagagcagccttaaccctgcagcctttgtgcccatcaccagctctacagatcctgctcacactaaaatatgaaccacaaacacacagagaaacaacctgttcaccactcctgggtgcatgattgagggtgaagcatccaccagcacttcaaggggtccatagtatttttttttttgctgcctcaaagtccccaaagccttcgagcagaagtggcagtagatggttgccaatcagccaatgcagactttcactgggacaacaagaaagcagatcttctgggttttgatggaacttggcagtggggacattcagctgatgcattatataccccgtcagagcacacttgtatcttttaccttccctttgccccatgcccccaaactgcttaggtcttctctgtccctttactgctgctgcacagagatgatataaaagaggctctttggctatttgcattttgcttcctcttcttttccagattacagtatgaagctttattttctttgtacaagcttaaaatttcaacatcatcatccgccaaagttgttcctcccttttcggaggatctagggggaaagaggagcattcatcacaagtttcctagagagaggagacaaatcggtgtgccattgacaacatgagccagggtaaaggcaccctttggaattactgatttcaaagattaataaagtaattctattttt

SEQ ID NO: 33060 - DNA, 2561 bp, Homo sapiens
  source 1..2561: mol_type = unassigned DNA
atgaaagaaatcaaagttttacgaagggtgaaggaggagaatgatcggcgaggtggatttattcgcatatttcctacatctgagacatgggaaatatatgggtcctacctcgagcataagacctcaatgaactatatgctggcaacacgcctcttccaggacaggggaaacccaagaagaagcttattgacaggaagaacacgaatgactgctgatggagcgccagaattgaagatagagagtctgaattcaaaggccaagctgcatgctgcactttacgagaggaagctcctgtctctggaggtgcgaaaacgtagacgacggagtagcagattgagggcaatgaggccaaaatacccagtgattacccaaccagctgaaatgaatgttaaaactgagacagagagtgaagaggaggaagaagtcgcattagataatgaagatgaagaacaggaggcttcccaggaggagtctgcaggatttcttagagaaaatcaagccaaatatacaccctcattgacagctttggtagaaaatacacccaaagaaaattccatgaaagttcgtgaatggaataataaaggtggacactgctgcaaacttgagactcaggagctagagcctaaatttaacctgatgcagattcttcaagataatggcaatcttagcaaaatgcaggcccgaatagcattctctgcctatctccagcatgttcaaattcgcctgatgaaagacagtggcggtcagacgttcagtgccagttgggctgccaaagaggatgaacagatggagctggttgttcgtttcctcaagcgagcatcaaataacctccagcattcactgaggatggtattacccagtcgacgattggcacttctggaacgcagaagaatcctggcccaccagctgggtgactttatcattgtatacaacaaggaaacagaacaaatggctgaaaagaaatcaaagaagaaagttgaggaagaagaggaagatggggtgaatatggaaaactttcaggagttcatcagacaagcaagtgaggctgaactggaggaggtgttgactttttatacccaaaagaacaagtctgctagtgtcttcctggggactcactctaaaatttctaagaacaacaacaattattctgatagtggggcaaaaggtgatcaccctgagactataatggaagaagtgaaaataaagccacctaaacagcaacagacgacagaaattcattctgataaattatctcgatttaccacttcagcagaaaaagaggcaaaattagtttatagcaattcctcctctggtcctactgctactctgcagaaaattcccaacacccatttgtcatctgttacaacctctgacctctctccagggccttgccaccattcttctttatctcaaattccttcagctatccccagcatgcctcaccagccaacaattttactgaacacagtctctgccagtgcttctccctgcctacatcccggggcacagaacatcccaagccctactggcctgccacgctgtcgatcaggaagtcacaccattggtcccttttcttccttccaaagtgctgcacacatctatagccagaaactgtctcgtccctcttcagcaaaggcaggatcgtgctatctaaacaagcatcattcaggaatagccaaaacacaaaaagagggagaagatgcttctttatatagcaaacggtacaaccaaagtatggttacagctgaacttcagcggctagctgagaagcaggcagcgagacagtattctccatccagccacatcaacctcctcacccaacaggtaacaaacctgaatttggcaactggcatcataaacagaagcagtgcttcagctcccccaaccctccgacccatcatcagtcctagtggcccgacatggtctacacagtcagacccccaagctcccgagaatcactccagctctcctggaagcaggagcctgcagacagggggatttgcctgggaaggagaagtagaaaacaacgtgtacagccaggctacaggggtggtcccccagcacaagtatcaccccacagcaggcagctatcagcttcaatttgccctgcagcaacttgaacaacaaaaacttcagtcccggcagctcctggaccagagtcgagcccggcaccaggcaatctttggcagccagacactacctaactccaatttatggacaatgaataatggtgcaggttgtagaatttccagtgccacagctagtggccagaagccaaccactctgccacaaaaagtggtaccacctccaagttcttgcgcctccctggttcccaaacccccacccaaccacgaacaagtgctcagaagggcaacatcccagaaagcttccaatacccgcttcagatcctcctttcaaaactatttgtggtatttcttccaagcagtcagctgaactgaggacgacagcctacaaacaactacatgcatctgaactgtctcttgtaaatgagcttttttcagagccagaatcatactctccaggaaatatggagaaagaaa

SEQ ID NO: 33061 - DNA, 3548 bp, Homo sapiens
  source 1..3548: mol_type = unassigned DNA
agctgagcgttatgagcgcctgcgcagtggctccgagcgggcggttgcttgttggttgttgtagtaaccggggaagcagccgtcggcggctgccctgagccttcctggggaaggaggagggaggtaggcgcagagcgcggtccacgcctgctcgccccgaaccatgggaagatgagacaggaatctgtgccatccaaattgcttgatccagtgaatctgctaggaaaggtctctgaggcccccgtctgctgactgcatgacaaaccctaaaggaaatgccaatcgtgatggcccgggacctggaggaaacagcatcatcctcagaggatgaggaggtcataagtcaagaggatcatccatgcatcatgtggactggaggctgcaggagaattccagttttggtattccatgccgacgctattcttacaaaggacaacaatattagagtaattggagaacgttatcatttgtcttataagattgtacgaacggacagtcgcctagtacgcagcattctgacagcccatggatttcatgaagttcacccaagcagcactgactataacctaatgtggacaggatcccacctgaagcccttcttactgcgcaccctctctgaagcacaaaaagttaatcactttcccaggtcttatgaacttacccggaaggaccgactgtacaaaaacattattcgaatgcagcatacacatggattcaaggcttttcacatcctcccccagaccttcctcctgccagctgagtacgcggaattttgtaattcatattcgaaggaccggggaccttggatagtaaaaccagtggcatcttcaagggggcggggcgtctacctgatcaacaatccaaaccagatctccctggaagagaacattttggtctcccgttacattaacaaccccctgctcatagatgatttcaagtttgacgtgcgcctctatgtgctcgtgacttcctatgatcctcttgtcatctatctctatgaagaaggattggctaggtttgcaactgtgcgatatgatcaaggagccaagaacattcggaaccagttcatgcatctgacaaactacagtgtcaacaagaaaagtggagattacgtcagttgtgacgatccagaagtggaggattatggaaacaaatggagcatgagtgctatgcttaggtacctgaaacaagaaggcagagatacaaccgcattgatggcccatgtagaagacctgatcattaagactataatctctgctgaactagctattgctactgcctgtaaaacctttgttcctcatcgcagcagttgttttgaactctatggctttgacgtgctcatagattctactctgaagccatggttgttggaagtgaatctctctccttctttggcctgtgatgcgcctctggacctaaagattaaagccagtatgatttcagatatgttcactgttgtaggatttgtgtgccaagatcctgcccagcgggcatcaactcggccaatttatcccacctttgagtcttccaggcgaaaccctttccagaaacctcagcgttgccgtccactctctgccagtgatgcggaaatgaaaaacctcgtgggctcagcccgggagaaagggccagggaagttgggtggttctgtgcttggtctgtcaatggaggagatcaaagttttacgaagggtgaaggaggagaatgatcggcgaggtggatttattcgcatatttcctacatctgagacatgggaaatatatgggtcctacctcgagcataagacctcaatgaactatatgctggcaacacgcctcttccaggacagaatgactgctgatggagcgccagaattgaagatagagagtctgaattcaaaggccaagctgcatgctgcactttacgagaggaagctcctgtctctggaggtgcgaaaacgtagacgacggagtagcagattgagggcaatgaggccaaaatacccagtgattacccaaccagctgaaatgaatgttaaaactgagacagagagtgaagaggaggaagaagtcgcattagataatgaagatgaagaacaggaggcttcccaggaggagtctgcaggatttcttagagaaaatcaagccaaatatacaccctcattgacagctttggtagaaaatacacccaaagaaaattccatgaaagttcgtgaatggaataataaaggtggacactgctgcaaacttgagactcaggagctagagcctaaatttaacctgatgcagattcttcaagataatggcaatcttagcaaaatgcaggcccgaatagcattctctgcctatctccagcatgttcaaattcgcctgatgaaagacagtggcggtcagacgttcagtgccagttgggctgccaaagaggatgaacagatggagctggttgttcgtttcctcaagcgagcatcaaataacctccagcattcactgaggatggtattacccagtcgacgattggcacttctggaacgcagaagaatcctggcccaccagctgggtgactttatcattgtatacaacaaggaaacagaacaaatggctgaaaagaaatcaaagaagaaagttgaggaagaagaggaagatggggtgaatatggaaaactttcaggagttcatcagacaagcaagtgaggctgaactggaggaggtgttgactttttatacccaaaagaacaagtctgctagtgtcttcctggggactcactctaaaatttctaagaacaacaacaattattctgatagtggggcaaaaggtgatcaccctgagactataatggaagaagtgaaaataaagccacctaaacagcaacagacgacagaaattcattctgataaattatctcgatttaccacttcagcagaaaaagaggcaaaattagtttatagcaattcctcctctggtcctactgctactctgcagaaaattcccaacacccatttgtcatctgttacaacctctgacctctctccagggccttgccaccattcttctttatctcaaattccttcagctatccccagcatgcctcaccagccaacaattttactgaacacagtctctgccagtgcttctccctgcctacatcccggggcacagaacatcccaagccctactggcctgccacgctgtcgatcaggaagtcacaccattggtcccttttcttccttccaaagtgctgcacacatctatagccagaaactgtctcgtccctcttcagcaaaggcaggatcgtgctatctaaacaagcatcattcaggaatagccaaaacacaaaaagagggagaagatgcttctttatatagcaaacggtacaaccaaagtatggttacagctgaacttcagcggctagctgagaagcaggcagcgagacagtattctccatccagccacactgatccatggaagtatgataggagtataaggatgtgttctccactgaacattttagaacctgaattcaagaaatacttgatgggtatctattcacctcactcctccaaaaaaaaaaaaaag

SEQ ID NO: 33062 - DNA, 2542 bp, Homo sapiens
  source 1..2542: mol_type = unassigned DNA
agtctaagggcacagaatggaaaggttctcattttcctcctccaatgagaattggcaccccaacagcaggccctgggccctcggctgtgatggaggggtgtctcggggtagcagaactaaggaagctctccaccttcagtgcatacttggaggaccacagctacaacgtggagcagatatggagggatattgaggacgtcatcatcaagaccctcatctcggcccaccccatcatcaggcataactaccacacctgcttccccaaccacacactcaacagcgcctgctttgagatcctgggctttgacattttgttggaccacaaactcaaaccctggctgctggaggtcaaccactctccaagcttctccaccgactctcggttggataaagaggtgaaagatggtctgctgtatgacaccttagtcctgatcaacctggaaagctgtgacaagaagaaagtcttggaggaggagagacaacgggggcagttcctgcagcagtgttgttctcgggagatgaggattgaggaagccaagggtttccgggccgtgcagttaaagaaaactgaaacgtatgagaaggaaaactgtggagggttccgactgatttatcccagtctgaattcggagaagtatgagaagtttttccaggacaacaactccctcttccagaatactgttgcttccagggctcgggaggagtatgcccggcaactgatccaggagctgagactaaaacgggagaaaaagcccttccaaatgaagaagaaggtagagatgcagggggaatcggcaggcgagcaagtgagaaagaagggcatgaggggctggcaacagaaacaacagcagaaagacaaggccgccacccaagcctccaaacagtacatccagccattgacattagtatcctacacacctgacttgctcttgagtgtcagaggtgaaaggaaaaatgaaacagacagcagcctcaaccaggaggctcccacggaggaggccagctctgttttccccaagctgacgtctgcgaagcccttcagttctctacccgatctgaggaatatcaatctcagcagctcgaagttggagcccagtaaacccaacttcagcatcaaggaggccaagtctgcctctgcagtgaacgtattcactggcactgtgcacttaacctccgtagaaaccaccccagaatccaccacccaactctcaatctccccaaagtctccgccaaccctggctgtgaccgccagctctgagtacagtggcccagagacggacagggtggtatcctttaaatgcaagaagcagcagacccctccacacttaacccagaagaaaatgttaaaatcttttctgcccacaaaatccaagagcttctgggagagtccgaacacaaactggactttgctaaagagtgacatgaacaagccacatttgatatccgagctactcaccaagcttcaactgagtgggaagctctccttcttcccagctcactacaaccccaagctggggatgaataacctgtcacaaaacccctccctgcctggggagtgccactcccgcagtgacagctctggcgagaagaggcagctggatgtgtcctccctcctcttgcagagtcctcagagctataatgttactctgagggacctgctggtgattgccactccagcccaactggatccaaggccttgtagaagccacgcaagtgctatgagggacccatgtatgcaggatcaagaagcatacagccattgcctgatctctggccaaaaaggatgtgagaggagctagaatcagactggatctctgccacttttcccttcctacctcttaacttgcaggaaacaatgtgtctcttccgacagtgtctccagtgttcacagaatcaactgaagttttgtttgctcatctagatatactggtcttccattagttcctagtagcagcaatggggccaacagccctgcctctgttccctcccagttagcttacagtgctacaggaccatgatttctggggttggattggtgctgccccaggacacactccagttgccgtaccagtggcacttctctgggttcttcacatggcaccatcatccagaatactcccccagataaagcaacttcgggagtagtgtttcagagaaggactcatgatttccaggagtcaaaagccctcagtccaccaacagaactatgccagttggtcttcgtctccaagataaaagatgaggtcagggatgggcatggtgcataactctgagccctgagtgagagaactgaggcagctgcaacttcacaaggtcaaggcccgacctccgcccatccccaccagcccaaagacttgccacctcagtgcccgagcatcctctggtgacctccctcaccagcccaacttaatctcaccagtgaaaacagaggtgaggcgagagtacccagcctgaagatgcttcttctatcagcctgcagaaatgttacactttcccttcaggcatccattaataaaagaaattgccatgcttactgccagga

SEQ ID NO: 33063 - DNA, 3551 bp, Homo sapiens
  source 1..3551: mol_type = unassigned DNA
aattggattcgggagggagggggcatggcagctactgcaggggccaatcgaaggcctagaaggccccgtatgcaaatatgagggccgggcggacccaaagttagggcgagcgcgggttggggttggggctgtctggcagccaatgggagcgttactccttcatccttcgaggagggggccggcaggtgtggttgcaagctggactagcagcccagcggggcgagacgggggagtaggaattgcgggggcctggtatttccccagagcctcctcccaggccagggagatgccacagtgcccgactttggaaagccaggaaggggaaaactccgaagagaagggggacagttccaaagaagatccaaaagaaaccgtcgcgctggcttttgtgagagagaacccaggggcacaaaacggacttcagaatgcccagcagcaaggcaagaagaagaggaagaaaaagagattggtgatcaatctatccagctgccggtatgagagtgtgcgcagggctgcccaacagtacggctttagagagggaggggaagacgatgactggactctctattggacagattactcagtgtcactggagcgggtgatggaaatgaaaagttaccagaagatcaatcacttccccgggatgagtgaaatctgccggaaggacttgctggccaggaacatgagccgcatgttaaagatgttccctaaagatttccgctttttccctaggacctggtgtcttcctgctgactggggagatttgcagacctacagcaggtcaagaaaaaataagacatacatttgtaagccggattcgggctgccaagggaaaggtatattcatcacccggacagtgaaagaaatcaaaccaggggaggatatgatctgtcagctgtatatttcaaagccctttatcattgatgggtttaagtttgacctacggatttatgtactggtgacatcctgtgaccctctcaggatttttgtgtacaatgaaggactggcccgctttgcgacgacctcttactcccgcccttgcacagacaacctggatgatatctgcatgcacctgactaattattccattaataagcacagttcaaatttcagtcgagatgcacactctggcagtaagaggaagctctccaccttcagtgcatacttggaggaccacagctacaacgtggagcagatatggagggatattgaggacgtcatcatcaagaccctcatctcggcccaccccatcatcaggcataactaccacacctgcttccccaaccacacactcaacagcgcctgctttgagatcctgggctttgacattttgttggaccacaaactcaaaccctggctgctggaggtcaaccactctccaagcttctccaccgactctcggttggataaagaggtgaaagatggtctgctgtatgacaccttagtcctgatcaacctggaaagctgtgacaagaagaaagtcttggaggaggagagacaacgggggcagttcctgcagcagtgttgttctcgggagatgaggattgaggaagccaagggtttccgggccgtgcagttaaagaaaactgaaacgtatgagaaggaaaactgtggagggttccgactgatttatcccagtctgaattcggagaagtatgagaagtttttccaggacaacaactccctcttccagaatactgttgcttccagggctcgggaggagtatgcccggcaactgatccaggagctgagactaaaacgggagaaaaagcccttccaaatgaagaagaaggtagagatgcagggggaatcggcaggcgagcaagtgagaaagaagggcatgaggggctggcaacagaaacaacagcagaaagacaaggccgccacccaagcctccaaacagtacatccagccattgacattagtatcctacacacctgacttgctcttgagtgtcagaggtgaaaggaaaaatgaaacagacagcagcctcaaccaggaggctcccacggaggaggccagctctgttttccccaagctgacgtctgcgaagcccttcagttctctacccgatctgaggaatatcaatctcagcagctcgaagttggagcccagtaaacccaacttcagcatcaaggaggccaagtctgcctctgcagtgaacgtattcactggcactgtgcacttaacctccgtagaaaccaccccagaatccaccacccaactctcaatctccccaaagtctccgccaaccctggctgtgaccgccagctctgagtacagtggcccagagacggacagggtggtatcctttaaatgcaagaagcagcagacccctccacacttaacccagaagaaaatgttaaaatcttttctgcccacaaaatccaagagcttctgggagagtccgaacacaaactggactttgctaaagagtgacatgaacaagccacatttgatatccgagctactcaccaagcttcaactgagtgggaagctctccttcttcccagctcactacaaccccaagctggggatgaataacctgtcacaaaacccctccctgcctggggagtgccactcccgcagtgacagctctggcgagaagaggcagctggatgtgtcctccctcctcttgcagagtcctcagagctataatgttactctgagggacctgctggtgattgccactccagcccaactggatccaaggccttgtagaagccacgcaagtgctatgagggacccatgtatgcaggatcaagaagcatacagccattgcctgatctctggccaaaaaggatgtgagaggagctagaatcagactggatctctgccacttttcccttcctacctcttaacttgcaggaaacaatgtgtctcttccgacagtgtctccagtgttcacagaatcaactgaagttttgtttgctcatctagatatactggtcttccattagttcctagtagcagcaatggggccaacagccctgcctctgttccctcccagttagcttacagtgctacaggaccatgatttctggggttggattggtgctgccccaggacacactccagttgccgtaccagtggcacttctctgggttcttcacatggcaccatcatccagaatactcccccagataaagcaacttcgggagtagtgtttcagagaaggactcatgatttccaggagtcaaaagccctcagtccaccaacagaactatgccagttggtcttcgtctccaagataaaagatgaggtcagggatgggcatggtgcataactctgagccctgagtgagagaactgaggcagctgcaacttcacaaggtcaaggcccgacctccgcccatccccaccagcccaaagacttgccacctcagtgcccgagcatcctctggtgacctccctcaccagcccaacttaatctcaccagtgaaaacagaggtgaggcgagagtacccagcctgaagatgcttcttctatcagcctgcagaaatgttacactttcccttcaggcatccattaataaaagaaattgccatgctt

SEQ ID NO: 33064 - DNA, 587 bp, Homo sapiens
  source 1..587: mol_type = unassigned DNA
gagcgcgggttggggttggggctgtctggcagccaatgggagcgttactccttcatccttcgaggagggggccggcaggtgtggttgcaagctggactagcagcccagcggggcgagacgggggagtaggaattgcgggggcctggtatttccccagagcctcctcccaggccagggagatgccacagtgcccgactttggaaagccaggaaggggaaaactccgaagagaagggggacagttccaaagaagatccaaaagaaaccgtcgcgctggcttttgtgagagagaacccaggggcacaaaacggacttcagaatgcccagcagcaaggcaagaagaagaggaagaaaaagaggatgcctttaaaaaatagcaggaaaagaagatttccttgttttaagaaggcgctgatttgtcctggaaatttagtacgccttcagtatgatagcaccatactgacttatcaggatccaactgcagcttgtgcattccagttcttgtttaatatttcaccatgccttgctccattcagactgattgatgaaggaaagcttgtccactttcttattcatagcttcccttaa

SEQ ID NO: 33065 - DNA, 2548 bp, Homo sapiens
  source 1..2548: mol_type = unassigned DNA
atttttccttagtctaagggcacagaatggaaaggttctcattttcctcctccaatgagaattggcaccccaacagcaggccctgggccctcggctgtgatggaggggtgtctcggggtagcagaactaaggaagctctccaccttcagtgcatacttggaggaccacagctacaacgtggagcagatatggagggatattgaggacgtcatcatcaagaccctcatctcggcccaccccatcatcaggcataactaccacacctgcttccccaaccacacactcaacagcgcctgctttgagatcctgggctttgacattttgttggaccacaaactcaaaccctggctgctggaggtcaaccactctccaagcttctccaccgactctcggttggataaagaggtgaaagatggtctgctgtatgacaccttagtcctgatcaacctggaaagctgtgacaagaagaaagtcttggaggaggagagacaacgggggcagttcctgcagcagtgttgttctcgggagatgaggattgaggaagccaagggtttccgggccgtgcagttaaagaaaactgaaacgtatgagaaggaaaactgtggagggttccgactgatttatcccagtctgaattcggagaagtatgagaagtttttccaggacaacaactccctcttccagaatactgttgcttccagggctcgggaggagtatgcccggcaactgatccaggagctgagactaaaacgggagaaaaagcccttccaaatgaagaagaaggtagagatgcagggggaatcggcaggcgagcaagtgagaaagaagggcatgaggggctggcaacagaaacaacagcagaaagacaaggccgccacccaagcctccaaacagtacatccagccattgacattagtatcctacacacctgacttgctcttgagtgtcagaggtgaaaggaaaaatgaaacagacagcagcctcaaccaggaggctcccacggaggaggccagctctgttttccccaagctgacgtctgcgaagcccttcagttctctacccgatctgaggaatatcaatctcagcagctcgaagttggagcccagtaaacccaacttcagcatcaaggaggccaagtctgcctctgcagtgaacgtattcactggcactgtgcacttaacctccgtagaaaccaccccagaatccaccacccaactctcaatctccccaaagtctccgccaaccctggctgtgaccgccagctctgagtacagtggcccagagacggacagggtggtatcctttaaatgcaagaagcagcagacccctccacacttaacccagaagaaaatgttaaaatcttttctgcccacaaaatccaagagcttctgggagagtccgaacacaaactggactttgctaaagagtgacatgaacaagccacatttgatatccgagctactcaccaagcttcaactgagtgggaagctctccttcttcccagctcactacaaccccaagctggggatgaataacctgtcacaaaacccctccctgcctggggagtgccactcccgcagtgacagctctggcgagaagaggcagctggatgtgtcctccctcctcttgcagagtcctcagagctataatgttactctgagggacctgctggtgattgccactccagcccaactggatccaaggccttgtagaagccacgcaagtgctatgagggacccatgtatgcaggatcaagaagcatacagccattgcctgatctctggccaaaaaggatgtgagaggagctagaatcagactggatctctgccacttttcccttcctacctcttaacttgcaggaaacaatgtgtctcttccgacagtgtctccagtgttcacagaatcaactgaagttttgtttgctcatctagatatactggtcttccattagttcctagtagcagcaatggggccaacagccctgcctctgttccctcccagttagcttacagtgctacaggaccatgatttctggggttggattggtgctgccccaggacacactccagttgccgtaccagtggcacttctctgggttcttcacatggcaccatcatccagaatactcccccagataaagcaacttcgggagtagtgtttcagagaaggactcatgatttccaggagtcaaaagccctcagtccaccaacagaactatgccagttggtcttcgtctccaagataaaagatgaggtcagggatgggcatggtgcataactctgagccctgagtgagagaactgaggcagctgcaacttcacaaggtcaaggcccgacctccgcccatccccaccagcccaaagacttgccacctcagtgcccgagcatcctctggtgacctccctcaccagcccaacttaatctcaccagtgaaaacagaggtgaggcgagagtacccagcctgaagatgcttcttctatcagcctgcagaaatgttacactttcccttcaggcatccattaataaaagaaattgccatgcttactgcc

SEQ ID NO: 33066 - DNA, 3454 bp, Homo sapiens
  source 1..3454: mol_type = unassigned DNA
gagcgcgggttggggttggggctgtctggcagccaatgggagcgttactccttcatccttcgaggagggggccggcaggtgtggttgcaagctggactagcagcccagcggggcgagacgggggagtaggaattgcgggggcctggtatttccccagagcctcctcccaggccagggagatgccacagtgcccgactttggaaagccaggaaggggaaaactccgaagagaagggggacagttccaaagaagatccaaaagaaaccgtcgcgctggcttttgtgagagagaacccaggggcacaaaacggacttcagaatgcccagcagcaaggcaagaagaagaggaagaaaaagagattggtgatcaatctatccagctgccggtatgagagtgtgcgcagggctgcccaacagtacggctttagagagggaggggaagacgatgactggactctctattggacagattactcagtgtcactggagcgggtgatggaaatgaaaagttaccagaagatcaatcacttccccgggatgagtgaaatctgccggaaggacttgctggccaggaacatgagccgcatgttaaagatgttccctaaagatttccgctttttccctaggacctggtgtcttcctgctgactggggagatttgcagacctacagcaggtcaagaaaaaataagacatacatttgtaagccggattcgggctgccaagggaaaggtatattcatcacccggacagtgaaagaaatcaaaccaggggaggatatgatctgtcagctgtatatttcaaagccctttatcattgatgggtttaagtttgacctacggatttatgtactggtgacatcctgtgaccctctcaggatttttgtgtacaatgaaggactggcccgctttgcgacgacctcttactcccgcccttgcacagacaacctggatgatatctgcatgcacctgactaattattccattaataagcacagttcaaatttcagtcgagatgcacactctggcagtaagaggaagctctccaccttcagtgcatacttggaggaccacagctacaacgtggagcagatatggagggatattgaggacgtcatcatcaagaccctcatctcggcccaccccatcatcaggcataactaccacacctgcttccccaaccacacactcaacagcgcctgctttgagatcctgggctttgacattttgttggaccacaaactcaaaccctggctgctggaggtcaaccactctccaagcttctccaccgactctcggttggataaagaggtgaaagatggtctgctgtatgacaccttagtcctgatcaacctggaaagctgtgacaagaagaaagtcttggaggaggagagacaacgggggcagttcctgcagcagtgttgttctcgggagatgaggattgaggaagccaagggtttccgggccgtgcagttaaagaaaactgaaacgtatgagaaggaaaactgtggagggttccgactgatttatcccagtctgaattcggagaagtatgagaagtttttccaggacaacaactccctcttccagaatactgttgcttccagggctcgggaggagtatgcccggcaactgatccaggagctgagactaaaacgggagaaaaagcccttccaaatgaagaagaaggtagagatgcagggggaatcggcaggcgagcaagtgagaaagaagggcatgaggggctggcaacagaaacaacagcagaaagacaaggccgccacccaagcctccaaacagtacatccagccattgacattagtatcctacacacctgacttgctcttgagtgtcagaggtgaaaggaaaaatgaaacagacagcagcctcaaccaggaggctcccacggaggaggccagctctgttttccccaagctgacgtctgcgaagcccttcagttctctacccgatctgaggaatatcaatctcagcagctcgaagttggagcccagtaaacccaacttcagcatcaaggaggccaagtctgcctctgcagtgaacgtattcactggcactgtgcacttaacctccgtagaaaccaccccagaatccaccacccaactctcaatctccccaaagtctccgccaaccctggctgtgaccgccagctctgagtacagtggcccagagacggacagggtggtatcctttaaatgcaagaagcagcagacccctccacacttaacccagaagaaaatgttaaaatcttttctgcccacaaaatccaagagcttctgggagagtccgaacacaaactggactttgctaaagagtgacatgaacaagccacatttgatatccgagctactcaccaagcttcaactgagtgggaagctctccttcttcccagctcactacaaccccaagctggggatgaataacctgtcacaaaacccctccctgcctggggagtgccactcccgcagtgacagctctggcgagaagaggcagctggatgtgtcctccctcctcttgcagagtcctcagagctataatgttactctgagggacctgctggtgattgccactccagcccaactggatccaaggccttgtagaagccacgcaagtgctatgagggacccatgtatgcaggatcaagaagcatacagccattgcctgatctctggccaaaaaggatgtgagaggagctagaatcagactggatctctgccacttttcccttcctacctcttaacttgcaggaaacaatgtgtctcttccgacagtgtctccagtgttcacagaatcaactgaagttttgtttgctcatctagatatactggtcttccattagttcctagtagcagcaatggggccaacagccctgcctctgttccctcccagttagcttacagtgctacaggaccatgatttctggggttggattggtgctgccccaggacacactccagttgccgtaccagtggcacttctctgggttcttcacatggcaccatcatccagaatactcccccagataaagcaacttcgggagtagtgtttcagagaaggactcatgatttccaggagtcaaaagccctcagtccaccaacagaactatgccagttggtcttcgtctccaagataaaagatgaggtcagggatgggcatggtgcataactctgagccctgagtgagagaactgaggcagctgcaacttcacaaggtcaaggcccgacctccgcccatccccaccagcccaaagacttgccacctcagtgcccgagcatcctctggtgacctccctcaccagcccaacttaatctcaccagtgaaaacagaggtgaggcgagagtacccagcctgaagatgcttcttctatcagcctgcagaaatgttacactttcccttcaggcatccattaataaaagaaattgccatgcttactgccagga

SEQ ID NO: 33067 - DNA, 580 bp, Homo sapiens
  source 1..580: mol_type = unassigned DNA
aaatatgagggccgggcggacccaaagttagggcgagcgcgggttggggttggggctgtctggcagccaatgggagcgttactccttcatccttcgaggagggggccggcaggtgtggttgcaagctggactagcagcccagcggggcgagacgggggagtaggaattgcggaaccactggaggccttcagagggatgcttccagtagggaaatgaggaccaaaagatgaaaaggaggggcctggtatttccccagagcctcctcccaggccagggagatgccacagtgcccgactttggaaagccaggaaggggaaaactccgaagagaagggggacagttccaaagaagatccaaaagaaaccgtcgcgctggcttttgtgagagagaacccaggggcacaaaacggacttcagaatgcccagcagcaaggcaagaagaagaggaagaaaaagagattggtgatcaatctatccagctgccggtatgagagtgtgcgcagggctgcccaacagtacggctttagagagggaggggaagacgatgactggactctctattggacagattactcagtgtc

SEQ ID NO: 33068 - DNA, 1887 bp, Homo sapiens
  source 1..1887: mol_type = unassigned DNA
tcttttctttcgtaagctctctgggcgagggtggtggtatgttttgtgaggtttagcttagccccaaatcctcaagccccgccgccgccgcagtgcgggtgcaggaaccgggccagtactgcgcccagggcgcagcagagcgctggggaggaacaaaggcggcgcctaggcgcctgtgttatccgagagactttcgggggccgcgggcagcccgtctgccgcgaccgaggggtctggggcgtcccggctgggccccgtgtctgtgcgcacggtttcgctgatgctgaggggccactttctgtctcgcgttgttctctggggaccgggagaggaggaggcacccaaaaagagcgggggcgttgggcgagctgggggacgtgggagggggaacgggaacaaagcgcagcctagggttagcgtgggaagaccctccgcggtctttggcgttttggaaagatacccacacattcccgggaaaacatgcgtgagtgcatctccatccacgttggccaggctggtgtccagattggcaatgcctgctgggagctctactgcctggaacacggcatccagcccgatggccagatgccaagtgacaagaccattgggggaggagatgattccttcaacaccttcttcagtgagacgggggctggcaagcatgtgccccgggcagtgtttgtagacttggaacccacagtcattgatgaagttcgcactggcacctaccgccagctcttccaccctgagcaacttatcacaggcaaagaagatgctgccaataactatgcccgagggcactacaccattggcaaggagatcattgacctcgtgttggaccgaattcgcaagctggccgaccagtgcacgggtctccagggcttcttggttttccacagctttggtgggggaactggttctgggttcacctcgctgctcatggaacgtctctcagttgattatggcaagaagtccaagctggagttctctatttacccggcgccccaggtttccacagctgtagttgagccctacaactccatcctcaccacccacaccaccctggagcactctgattgtgccttcatggtagacaatgaggccatctatgacatctgtcgtagaaacctcgatattgagcgtccaacctatactaacctgaataggttaataggtcaaattgtgtcctccatcactgcttccctgagatttgatggagccctgaatgttgacctgacagaattccagaccaacctggtgccctatccccgcatccacttccctctggccacatatgcccctgtcatctctgctgagaaagcctaccatgaacagctttctgtagcagagatcaccaatgcttgctttgagccagccaaccagatggtgaaatgtgaccctcgccatggtaaatacatggcttgctgcctgttgtaccgtggtgacgtggttcccaaagatgtcaatgctgccattgccaccatcaagaccaagcgtaccatccagtttgtggattggtgccccactggcttcaaggttggcatcaactaccagcctcccactgtggtgcctggtggagacctggccaaggtacagagagctgtgtgcatgctgagcaacaccacagccattgctgaggcctgggctcgcctggaccacaagtttgacctgatgtatgccaaacgtgcctttgttcactggtacgttggggaggggatggaggaaggtgagttttcagaggcccgtgaggacatggctgcccttgagaaggattatgaggaggttggtgtggattctgttgaaggagagggtgaggaagaaggagaggaatactaaagttaaaacgtcacaaaggtgctgcttttacagggaagcttattctgtttt

SEQ ID NO: 33069 - DNA, 1915 bp, Homo sapiens
  source 1..1915: mol_type = unassigned DNA
ataatggatgctcggccgactgcttctgcacggtctctttgtctaaaggatgcaaacagtctacggatgctagagaaaaaggggtgggggagagattacctcatcccacgtcgcttgcaccaatcaccagtctcctgtcatggcttctctgggcagattgggggtctggaccaacaggaaaaggccccggcccatccccatggtgaccgagttgtatatagggagccgcatccgcctatgtgccgcaggttctcttacatcgaccgcctaagagtcgcgctgtaagaagcaacaacctctcctcttcgtctccgccatcagctcggcagtcgcgaagcagcaaccatgcgtgagtgcatctccatccacgttggccaggctggtgtccagattggcaatgcctgctgggagctctactgcctggaacacggcatccagcccgatggccagatgccaagtgacaagaccattgggggaggagatgattccttcaacaccttcttcagtgagacgggggctggcaagcatgtgccccgggcagtgtttgtagacttggaacccacagtcattgatgaagttcgcactggcacctaccgccagctcttccaccctgagcaacttatcacaggcaaagaagatgctgccaataactatgcccgagggcactacaccattggcaaggagatcattgacctcgtgttggaccgaattcgcaagctggccgaccagtgcacgggtctccagggcttcttggttttccacagctttggtgggggaactggttctgggttcacctcgctgctcatggaacgtctctcagttgattatggcaagaagtccaagctggagttctctatttacccggcgccccaggtttccacagctgtagttgagccctacaactccatcctcaccacccacaccaccctggagcactctgattgtgccttcatggtagacaatgaggccatctatgacatctgtcgtagaaacctcgatattgagcgtccaacctatactaacctgaataggttaataggtcaaattgtgtcctccatcactgcttccctgagatttgatggagccctgaatgttgacctgacagaattccagaccaacctggtgccctatccccgcatccacttccctctggccacatatgcccctgtcatctctgctgagaaagcctaccatgaacagctttctgtagcagagatcaccaatgcttgctttgagccagccaaccagatggtgaaatgtgaccctcgccatggtaaatacatggcttgctgcctgttgtaccgtggtgacgtggttcccaaagatgtcaatgctgccattgccaccatcaagaccaagcgtaccatccagtttgtggattggtgccccactggcttcaaggttggcatcaactaccagcctcccactgtggtgcctggtggagacctggccaaggtacagagagctgtgtgcatgctgagcaacaccacagccattgctgaggcctgggctcgcctggaccacaagtttgacctgatgtatgccaaacgtgcctttgttcactggtacgttggggaggggatggaggaaggtgagttttcagaggcccgtgaggacatggctgcccttgagaaggattatgaggaggttggtgtggattctgttgaaggagagggtgaggaagaaggagaggaatactaaagttaaaacgtcacaaaggtgctgcttttacagggaagcttattctgttttaaacattgaaaagttgtggtctgatcagttaatttgtatgtagcagtgtatgctctcatatacaattactgacctatgctctaaaacatgaatgctttgttacagacccaagctgtccatttctgtgatgggttttgaataaagtattccctgtcttaaatga

SEQ ID NO: 33070 - DNA, 1518 bp, Homo sapiens
  source 1..1518: mol_type = unassigned DNA
tttgtgacctgcccgcccctccccggcactgtgatgccggggggcagctgcgggcccggcgcgcctgtccccggcgtccccccctcccggtgtgtcacaacggcggaggcggctgtatctggagcagtcggggcgggcaggcccagctgagagcgggaatgcatatcagtccacgtgggccaagcgggagttcagattggcaatgcctgctgggagctcttctgcctggaacacggcatccaggcagacggcacttttgatgctcaagctagcaagatcaacgatgatgactccttcaccacctttttcagcgagactggcaatgggaagcatgtgccccgggccgtcatgatagatctggagcctactgtagtggatgaggttcgggcaggaacctaccgccagctcttccatccagagcagctgatcacaggaaaggaggatgcagccaacaactatgcccggggccactacacggtgggcaaggagagcattgacctggtgctggaccgcatacggaagctgacagatgcttgctctggcctgcagggcttcctgattttccacagttttggtgggggcactggctccggcttcacttctctgctgatggaacgcctctccctggattatggcaagaaatccaagctggagtttgccatctacccagccccccaggtctctactgcagtggtggagccctacaactccatcctgaccacccacaccacactggaacattcagattgtgctttcatggtggacaacgaagccatctatgacatctgccgcaggaaccttgacattgagcgccctacctataccaacctcaaccgcctcatcagtcagattgtgtcctcaatcactgcttctctccgctttgacggggccctcaatgtggacctcactgagttccagaccaacctggtgccctacccccgcatccacttcccgctggtcacctacgcgcccatcatctctgccgagaaagcctatcacgaacagctctctgtggccgagataaccagctcctgctttgagcccaacagccagatggtgaagtgcgacccgagacatggcaagtacatggcctgctgcatgctctaccggggcgacgtggtgcccaaggatgtgaatgtcgctattgctgccatcaagaccaagaggaccatccagtttgtagactggtgtcccacaggcttcaaggtgggcatcaactaccagcccccgaccgtggtccccgggggagacctggccaaggtgcagcgggccgtctgcatgctcagcaacaccacggccattgcggaggcctgggcccgcctcgaccacaagttcgacctcatgtacgccaagcgggcctttgtgcattggtatgtgggagaggggatggaagaaggagaattttctgaggccagggaagacttagctgccctggagaaggattatgaagaagtggggactgattcgtttgaagaagaaaatgaaggggaggaattttaaatatataccttccccttg

SEQ ID NO: 33071 - DNA, 2018 bp, Homo sapiens
  source 1..2018: mol_type = unassigned DNA
aggcggctgtatctggagcagtcggggcgggcaggcccagctgagaggtgcgcgggcgaggacagcggcagcgatgcgggaatgcatatcagtccacgtgggccaagcgggagttcagattggcaatgcctgctgggagctcttctgcctggaacacggcatccaggcagacggcacttttgatgctcaagctagcaagatcaacgatgatgactccttcaccacctttttcagcgagactggcaatgggaagcatgtgccccgggccgtcatgatagatctggagcctactgtagtggatgaggttcgggcaggaacctaccgccagctcttccatccagagcagctgatcacaggaaaggaggatgcagccaacaactatgcccggggccactacacggtgggcaaggagagcattgacctggtgctggaccgcatacggaagctgacagatgcttgctctggcctgcagggcttcctgattttccacagttttggtgggggcactggctccggcttcacttctctgctgatggaacgcctctccctggattatggcaagaaatccaagctggagtttgccatctacccagccccccaggtctctactgcagtggtggagccctacaactccatcctgaccacccacaccacactggaacattcagattgtgctttcatggtggacaacgaagccatctatgacatctgccgcaggaaccttgacattgagcgccctacctataccaacctcaaccgcctcatcagtcagattgtgtcctcaatcactgcttctctccgctttgacggggccctcaatgtggacctcactgagttccagaccaacctggtgccctacccccgcatccacttcccgctggtcacctacgcgcccatcatctctgccgagaaagcctatcacgaacagctctctgtggccgagataaccagctcctgctttgagcccaacagccagatggtgaagtgcgacccgagacatggcaagtacatggcctgctgcatgctctaccggggcgacgtggtgcccaaggatgtgaatgtcgctattgctgccatcaagaccaagaggaccatccagtttgtagactggtgtcccacaggcttcaaggtgggcatcaactaccagcccccgaccgtggtccccgggggagacctggccaaggtgcagcgggccgtctgcatgctcagcaacaccacggccattgcggaggcctgggcccgcctcgaccacaagttcgacctcatgtacgccaagcgggcctttgtgcattggtatgtgggagaggggatggaagaaggagaattttctgaggccagggaagacttagctgccctggagaaggattatgaagaagtggggactgattcgtttgaagaagaaaatgaaggggaggaattttaaatatataccttccccttggctgtgtctctttatttatgctgtgccattcaaagcacatgttcaagagaacagaacactctccccgccccagcctgattcctgccttacccaggaggagggtgcctggccccagtacccagggtggcacgactgggctaagtggacactgagcttcatcaggccctccctgggtaggagcagctttgtgtcactaaagaaagtgagggccactgtctccggcgggtgaggctgcagcccagtttcacatgcgaggaggcctaatcaggagtttcaattccagatcgggctgggtccagccccaaaacatggcctgctggctggggagtgggaacactcagagaaaggggagatctgggcctgggaagattccggggcaggggtgagcggacgttcacatgagtgggtctatagcccgctccgggcatcatctagacttagcatgcattcactcccccatcacatattccaatacacaccctgtcctaggcactgagagctggagagttggtgataagcgagacgaacacatttcctgccctcatacacacataaataaagtgaatgagatcatgtc

SEQ ID NO: 33072 - DNA, 3496 bp, Homo sapiens
  source 1..3496: mol_type = unassigned DNA
ggggcagtattctgtgttgagggaggaaaaacactcccttccaaaagcatgacaggcagaaagcagagaagggccaggactggctgagggcggggagctgggcctctggggtggacacacccttggtcacattgtgagggtagcttggttggccagtcccaccactgcagtgaccacagttgtgttgggctcacaccagtgaaccgaagctctggattctgagagtctgaggattccgtgaagatctcagacttgggctcagagcaaggatgcgtgaaattgtccatattcagattggccagtgtggcaaccagatcggagccaagttctgggagatgattggtgaggaacacgggatcgacttggctgggagcgaccgcggggcctcggccttgcagctggagagaatcagcgtgtactacaacgaagcctacggtaggaaatatgtgccccgagcagtcttggtggacctagaacctgggacgatggacagcattcgatctagcaaattaggagctctctttcaacccgacagttttgtccatggtaactctggggctggcaacaactgggccaaaggccactacacggagggagccgagctgatcgagaatgtcctagaggtggtgaggcacgagagtgagagctgtgactgcctgcagggcttccagatcgtccactccctgggcgggggcacaggctccgggatgggcactctgctcatgaacaagattagagaggagtacccggaccggatcatgaattccttcagcgtcatgccttctcccaaggtgtcggacactgtggtggagccctacaacgcggttctgtctatccaccagctgattgagaatgcagatgcctgtttctgcattgacaatgaggccctctatgacatctgcttccgtaccctgaagctgacgacacccacctatggggatctcaaccacctagtgtccttgaccatgagcggcataaccacctccctccggttcccgggtcagctcaacgcagacctgcgcaagctggcggtgaacatggtccccttcccccgcctgcacttctttatgcccggctttgccccactcacggcccagggcagccagcagtaccgagccctctccgtggccgagctcacccagcagatgttcgatgcccgcaataccatggctgcctgtgacctccgccgtggccgctacctcacagtggcctgcattttccggggcaagatgtccaccaaggaagtggaccagcaactgctctccgtgcagaccaggaacagcagctgctttgtggagtggattcccaacaacgtcaaggtggctgtctgcgacatcccgccccgggggctgagcatggccgccaccttcattggcaacaacacggccatccaagagatctttaatagggtctctgagcatttctcagccatgttcaaaaggaaagcttttgtgcactggtacaccagcgaagggatggacataaacgaatttggggaagctgaaaataacatccatgatttggtatccgagtaccaacaatttcaagatgccaaagcagttctagaggaagatgaagaggtcacggaggaggcagaaatggagccagaagataagggacattaactgtgagagaagctgtgccgcggagtcgcttacagaacagtttctcattagatgagtgtttctcctgcagcactccaaaacccactctgcactgcagcacagtgaatgatatgcactcaccattagcttcgacacagggactgagggagacaggtggggagcagctgacaggcattagggtctttgctgacatctactaaccttgaagagtttgatgttcagtgcatacttattaacttaaaaaaatagcaaatttattgtaaagtgctccctttgtttcaaagtgtttgccaggcatccagactacacgtgtggatttgcagggagccactggagttggtgttacatttttatactttagcagcactgataggcaccctggaatcctcacttggtatccgagggctactaagactctttccttaggttctttcctctgagcaaacactgactggcatcctgctttccagtgcctgccagcctccagaagagccaggtgcctgactagtacatggggagctacagagccaaggtcaatgtgagtcaacatccactagaaatatccatgttgtgtagacctgtgcatacaacatgctaactggaaaagaggaaaaaagaaaagccacagtcctctccacaaaaatacctggtccaaacaagaaaaacaaaaagacaagcaaaactaaagaactgcagtcttctgatctttatttctgaagagctagcctttaacatatatgtttatatagtttaaatttcttactactgttagatcccaggaattcattaataatcatccttggctttccttttaaaggctattttgaaatggtcttttcactttcattcagtcatcaccccccaaaatgctctgcagcctctctgctctttgagaaagggcacaccatgcgctcggcaaccattcaaatgcaggaattaagcagcaatggctgcagtgtccttctcagttatggaggacatcgtctcattagggaacttttacagttcaaattaatttgcagaagttgccataaatgtttgcataatgacatagctttaagcactacatgattttaatctgctcacattataacaggaccaaatacacaagagcgtaatcaaatcatctgtaacttcttaattacagtttacctatttctgacatgcagcactgccatctcttccagcaccatcagggttttaatggccctctagaattaccactgagatacactatttgatccatggataaccggtaatgggaaaatgctccgaccctcaatgcagtaaatatttacttgcaggcaactgggttctcatctcttgatttgcttttgtaatcagcaataataaaatagcaggtagatggatgacagttgctcattctgagaaacttcactcttttcacttatgcatcacgaggaaataactaaaatacataccaagagaaaaataccttgccatcggatcatcaacaagtcttctatttacaaacttcaaaaaacacaaaacaacattcatgttttaaatgctttctacttgtggttcaagaagcactagatttagtaagaaactctacctatatacttagtttgaagttagtaacttcctgagatgctaaagacttacagcctgcgattatacaaggatttacacatgcttcctctggtgctttacttcccaaacctaaaaaagcaatgaaatagatgtaaggaaggagggatttaaaccttttaaaaaacttttgctgacttatattactgtaaagatttgtttgctcaatagtaatcattaaactacaaagtaattcaattttaaatggcaaaattgctttatttcagactaaataaattccttttcttgaagcctaa

SEQ ID NO: 33073 - DNA, 1998 bp, Homo sapiens
  source 1..1998: mol_type = unassigned DNA
ggggggctcgggctgggggcgcggcctgtgccggccgccccaccctccttgcataaaagccggagcccgcggggccggcgctctcagcccgtcggttcccgagcgccttcccggtgaccccgcagtgggtgtgtgaggggaggacggacagacccagacgccgccggaccaggaggacgctgacgaggcaccatgcgtgagatcgtgcacatccaggcgggccagtgcggcaaccagatcggcgccaagttttgggaggtcatcagtgatgagcatgggattgaccccactggcagttaccatggagacagtgatttgcagctggagagaatcaatgtttactacaatgaagccactggtaacaaatatgttcctcgggccatcctcgtggatctggagccaggcacgatggattcggttaggtctggaccattcggccagatcttcagaccagacaatttcgtgtttggccagagtggagccgggaataactgggccaagggccactacacagagggagccgagctggtcgactcggtcctggatgtggtgaggaaggagtcagagagctgtgactgtctccagggcttccagctgacccactctctggggggcggcacggggtccgggatgggcaccctgctcatcagcaagatccgggaagagtacccagaccgcatcatgaacaccttcagcgtcatgccctcacccaaggtgtcagacacggtggtggagccctacaacgccaccctctcggtccaccagctggtggaaaacacagatgaaacctactgcattgacaacgaggccctgtatgacatctgcttccgcaccctgaagctgaccacccccacctacggggacctcaaccacctggtgtcggccaccatgagcggggtcaccacctgcctgcgcttcccgggccagctgaacgcagacctgcgcaagctggcggtgaacatggtgcccttccctcgcctgcacttcttcatgcccggcttcgcgcccctgaccagccggggcagccagcagtaccgggcgctcacggtgcccgagctcacccagcagatgttcgactccaagaacatgatggccgcctgcgacccgcgccacggccgctacctgacggtggctgccatcttccggggccgcatgtccatgaaggaggtggacgagcagatgctcaacgtgcagaacaagaacagcagctacttcgtggagtggatccccaacaacgtgaagacggccgtgtgcgacatcccgccccgcggcctgaagatgtcggccaccttcatcggcaacagcacggccatccaggagctgttcaagcgcatctccgagcagttcacggccatgttccggcgcaaggccttcctgcactggtacacgggcgagggcatggacgagatggagttcaccgaggccgagagcaacatgaacgacctggtgtccgagtaccagcagtaccaggacgccacggccgacgaacaaggggagttcgaggaggaggagggcgaggacgaggcgtagatgcccccgcgagacgggttagggaaagcggaggaggaaagcgagggggtggggggcttcccgggacgataacctggcagtggaaggaaagaagcatggtctactttaggtgtgcgctgggtctctggtgctcttcactgttgcctgtcactttttttttccttttttgtaatattgatgacatcaatgtaacatttgagatatttctgaattactgttgtaatggctaaaatcacataaacgtttgtgtcggaatggtgtcctctctttctcttcctttttctctttattaacgatttaaatgtaactttctgaacacattgcattgaattcttcctttaacaaaaagcaaaggcgtaggtaaaagctcaaatgaatttattctttcggtatggtaaaattgaaccaatcacagttaagatgagagatcaacctgagttttaaaatacctttaataaatattagttg

SEQ ID NO: 33074 - DNA, 1769 bp, Homo sapiens
  source 1..1769: mol_type = unassigned DNA
gacatcagccgatgcgaagggcggggccgcggctataagagcgcgcggccgcggtccccgaccctcagcagccagcccggcccgcccgcgcccgtccgcagccgcccgccagacgcgcccagtatgagggagatcgtgcacatccaggccggccagtgcggcaaccagatcggggccaagttctgggaagtcatcagtgatgagcatggcatcgaccccagcggcaactacgtgggcgactcggacttgcagctggagcggatcagcgtctactacaacgaggcctcttctcacaagtacgtgcctcgagccattctggtggacctggaacccggaaccatggacagtgtccgctcaggggcctttggacatctcttcaggcctgacaatttcatctttggtcagagtggggccggcaacaactgggccaagggtcactacacggagggggcggagctggtggattcggtcctggatgtggtgcggaaggagtgtgaaaactgcgactgcctgcagggcttccagctgacccactcgctggggggcggcacgggctccggcatgggcacgttgctcatcagcaaggtgcgtgaggagtatcccgaccgcatcatgaacaccttcagcgtcgtgccctcacccaaggtgtcagacacggtggtggagccctacaacgccacgctgtccatccaccagctggtggagaacacggatgagacctactgcatcgacaacgaggcgctctacgacatctgcttccgcaccctcaagctggccacgcccacctacggggacctcaaccacctggtatcggccaccatgagcggagtcaccacctccttgcgcttcccgggccagctcaacgctgacctgcgcaagctggccgtcaacatggtgcccttcccgcgcctgcacttcttcatgcccggcttcgcccccctcacagcccggggcagccagcagtaccgggccctgaccgtgcccgagctcacccagcagatgttcgatgccaagaacatgatggccgcctgcgacccgcgccacggccgctacctgacggtggccaccgtgttccggggccgcatgtccatgaaggaggtggacgagcagatgctggccatccagagcaagaacagcagctacttcgtggagtggatccccaacaacgtgaaggtggccgtgtgtgacatcccgccccgcggcctcaagatgtcctccaccttcatcgggaacagcacggccatccaggagctgttcaagcgcatctccgagcagttcacggccatgttccggcgcaaggccttcctgcactggtacacgggcgagggcatggacgagatggagttcaccgaggccgagagcaacatgaacgacctggtgtccgagtaccagcagtaccaggacgccacggccgaggaagagggcgagatgtacgaagacgacgaggaggagtcggaggcccagggccccaagtgaagctgctcgcagctggagtgagaggcaggtggcggccggggccgaagccagcagtgtctaaacccccggagccatcttgctgccgacaccctgctttcccctcgccctagggctcccttgccgccctcctgcagtatttatggcctcgtcctccccacctaggccacgtgtgagctgctcctgtctctgtcttattgcagctccaggcctgacgttttacggttttgttttttactggtttgtgtttatattttcggggatacttaataaatctattgctgtcagataccctt

SEQ ID NO: 33075 - DNA, 1978 bp, Homo sapiens
  source 1..1978: mol_type = unassigned DNA
agaactgggagctgcttcctggcagggcccgcctctgctgggagaccggacggtgagtcagccttaagcccggcaccagacccctctgaggatggagcaggagctggctgccctgaggctgcaaaacttcttccctcgtggagacagggaggcacctcagacactcaccccggactcccttgaacagggacagggaggaaccccaggcagctagaccccagcagcagccacacgagcacactgtggggcagggaggggcatctcttgagaacaaaagatccatttctcgactttccaaactggagagcttcttgagagaaaagagagagacaggtacaggtccacgccacccacacacagccctgtgcacacagaccggacacaggcgtccacagttctgggaagtcatcagtgatgagcatggcatcgaccccagcggcaactacgtgggcgactcggacttgcagctggagcggatcagcgtctactacaacgaggcctcttctcacaagtacgtgcctcgagccattctggtggacctggaacccggaaccatggacagtgtccgctcaggggcctttggacatctcttcaggcctgacaatttcatctttggtcagagtggggccggcaacaactgggccaagggtcactacacggagggggcggagctggtggattcggtcctggatgtggtgcggaaggagtgtgaaaactgcgactgcctgcagggcttccagctgacccactcgctggggggcggcacgggctccggcatgggcacgttgctcatcagcaaggtgcgtgaggagtatcccgaccgcatcatgaacaccttcagcgtcgtgccctcacccaaggtgtcagacacggtggtggagccctacaacgccacgctgtccatccaccagctggtggagaacacggatgagacctactgcatcgacaacgaggcgctctacgacatctgcttccgcaccctcaagctggccacgcccacctacggggacctcaaccacctggtatcggccaccatgagcggagtcaccacctccttgcgcttcccgggccagctcaacgctgacctgcgcaagctggccgtcaacatggtgcccttcccgcgcctgcacttcttcatgcccggcttcgcccccctcacagcccggggcagccagcagtaccgggccctgaccgtgcccgagctcacccagcagatgttcgatgccaagaacatgatggccgcctgcgacccgcgccacggccgctacctgacggtggccaccgtgttccggggccgcatgtccatgaaggaggtggacgagcagatgctggccatccagagcaagaacagcagctacttcgtggagtggatccccaacaacgtgaaggtggccgtgtgtgacatcccgccccgcggcctcaagatgtcctccaccttcatcgggaacagcacggccatccaggagctgttcaagcgcatctccgagcagttcacggccatgttccggcgcaaggccttcctgcactggtacacgggcgagggcatggacgagatggagttcaccgaggccgagagcaacatgaacgacctggtgtccgagtaccagcagtaccaggacgccacggccgaggaagagggcgagatgtacgaagacgacgaggaggagtcggaggcccagggccccaagtgaagctgctcgcagctggagtgagaggcaggtggcggccggggccgaagccagcagtgtctaaacccccggagccatcttgctgccgacaccctgctttcccctcgccctagggctcccttgccgccctcctgcagtatttatggcctcgtcctccccacctaggccacgtgtgagctgctcctgtctctgtcttattgcagctccaggcctgacgttttacggttttgttttttactggtttgtgtttatattttcggggatacttaataaatctattgctgtcagat

SEQ ID NO: 33076 - DNA, 2670 bp, Homo sapiens
  source 1..2670: mol_type = unassigned DNA
gtacatgaccggcatcgactaatcagggccaggctcgatgaggctttgtctccctaccgcgcgcggggccgattctcccgcctcccagccccggcgcacgcgcgccccgcccagcctgctttccctccgcgccctcccctctcctttctccctctcagaaccttcctgccgtcgcgtttgcacctcgctgctccagcctctggggcgcattccaaccttccagcctgcgacctgcggagaaaaaaaattacttattttcttgccccatacataccttgaggcgagcaaaaaaattaaattttaaccatgagggaaatcgtgcacatccaggctggtcagtgtggcaaccagatcggtgccaagttctgggaggtgatcagtgatgaacatggcatcgaccccaccggcacctaccacggggacagcgacctgcagctggaccgcatctctgtgtactacaatgaagccacaggtggcaaatatgttcctcgtgccatcctggtggatctagaacctgggaccatggactctgttcgctcaggtccttttggccagatctttagaccagacaactttgtatttggtcagtctggggcaggtaacaactgggccaaaggccactacacagagggcgccgagctggttgattctgtcctggatgtggtacggaaggaggcagagagctgtgactgcctgcagggcttccagctgacccactcactgggcgggggcacaggctctggaatgggcactctccttatcagcaagatccgagaagaataccctgatcgcatcatgaataccttcagtgtggtgccttcacccaaagtgtctgacaccgtggtcgagccctacaatgccaccctctccgtccatcagttggtagagaatactgatgagacctattgcattgacaacgaggccctctatgatatctgcttccgcactctgaagctgaccacaccaacctacggggatctgaaccaccttgtctcagccaccatgagtggtgtcaccacctgcctccgtttccctggccagctcaatgctgacctccgcaagttggcagtcaacatggtccccttcccacgtctccatttctttatgcctggctttgcccctctcaccagccgtggaagccagcagtatcgagctctcacagtgccggaactcacccagcaggtcttcgatgccaagaacatgatggctgcctgtgacccccgccacggccgatacctcaccgtggctgctgtcttccgtggtcggatgtccatgaaggaggtcgatgagcagatgcttaacgtgcagaacaagaacagcagctactttgtggaatggatccccaacaatgtcaagacagccgtctgtgacatcccacctcgtggcctcaagatggcagtcaccttcattggcaatagcacagccatccaggagctcttcaagcgcatctcggagcagttcactgccatgttccgccggaaggccttcctccactggtacacaggcgagggcatggacgagatggagttcaccgaggctgagagcaacatgaacgacctcgtctctgagtatcagcagtaccaggatgccaccgcagaagaggaggaggatttcggtgaggaggccgaagaggaggcctaaggcagagcccccatcacctcaggcttctcagttcccttagccgtcttactcaactgcccctttcctctccctcagaatttgtgtttgctgcctctatcttgttttttgttttttcttctggggggggtctagaacagtgcctggcacatagtaggcgctcaataaatacttgtttgttgaatgtctcctctctctttccactctgggaaacctaggtttctgccattctgggtgaccctgtatttctttctggtgcccattccatttgtccagttaatacttcctcttaaaaatctccaagaagctgggtctccagatcccatttagaaccaaccaggtgctgaaaacacatgtagataatggccatcatcctaagcccaaagtagaaaatggtagaaggtagtgggtagaagtcactatataaggaaggggatgggattttccattctaaaagttttggagagggaaatccaggctattaaagtcactaaatttctaagtatgtccatttcccatctcagcttcaagggaggtgtcagcagtattatctccactttcaatctccctccaagctctactctggaggagtctgtcccactctgtcaagtggaatccttccctttccaactctacctccctcactcagctcctttcccctgatcagagaaagggatcaagggggttgggaggggggaaagagaccagccttggtccctaagcctccagaaacgtcttcttaatccccaccttttcttactcccaaaaaagaatgaacacccctgactctggagtggtgtatactgccacatcagtgtttgagtcagtccccagaggagaggggaaccctcctccatcttttttgcaacatctcatttcttccttttgctgttgcttcccccctcacacacttggttttgttctatcctacatttgagatttctattttatgttgaacttgctgctttttttcatattgaaaagatgacatcgccccaagagccaaaaataaatgggaattgaaaaaagctg

SEQ ID NO: 33077 - DNA, 2632 bp, Homo sapiens
  source 1..2632: mol_type = unassigned DNA
cgcgtgcgccgcagtcacgtggagggcggggggggtggtcgactgcggcggcagctctttcctcagacccccagccttttgtgcgccgcgcggtggggcggtgcccagcttgggggaaggagagcggcgcttatcgaagtgtggtcgacctccatccgcccaccgagcacttgggacccgctgcacatatccagagcagggaaagctgtggctttctcgggggagcgagtgtctaggggaagggtgtggcaggcccacgggatgccatgccctagaacaacggcctgagcgcttgtggaattaaaatgggagatgtggggccgagttctgggaggtgatcagtgatgaacatggcatcgaccccaccggcacctaccacggggacagcgacctgcagctggaccgcatctctgtgtactacaatgaagccacaggtggcaaatatgttcctcgtgccatcctggtggatctagaacctgggaccatggactctgttcgctcaggtccttttggccagatctttagaccagacaactttgtatttggtcagtctggggcaggtaacaactgggccaaaggccactacacagagggcgccgagctggttgattctgtcctggatgtggtacggaaggaggcagagagctgtgactgcctgcagggcttccagctgacccactcactgggcgggggcacaggctctggaatgggcactctccttatcagcaagatccgagaagaataccctgatcgcatcatgaataccttcagtgtggtgccttcacccaaagtgtctgacaccgtggtcgagccctacaatgccaccctctccgtccatcagttggtagagaatactgatgagacctattgcattgacaacgaggccctctatgatatctgcttccgcactctgaagctgaccacaccaacctacggggatctgaaccaccttgtctcagccaccatgagtggtgtcaccacctgcctccgtttccctggccagctcaatgctgacctccgcaagttggcagtcaacatggtccccttcccacgtctccatttctttatgcctggctttgcccctctcaccagccgtggaagccagcagtatcgagctctcacagtgccggaactcacccagcaggtcttcgatgccaagaacatgatggctgcctgtgacccccgccacggccgatacctcaccgtggctgctgtcttccgtggtcggatgtccatgaaggaggtcgatgagcagatgcttaacgtgcagaacaagaacagcagctactttgtggaatggatccccaacaatgtcaagacagccgtctgtgacatcccacctcgtggcctcaagatggcagtcaccttcattggcaatagcacagccatccaggagctcttcaagcgcatctcggagcagttcactgccatgttccgccggaaggccttcctccactggtacacaggcgagggcatggacgagatggagttcaccgaggctgagagcaacatgaacgacctcgtctctgagtatcagcagtaccaggatgccaccgcagaagaggaggaggatttcggtgaggaggccgaagaggaggcctaaggcagagcccccatcacctcaggcttctcagttcccttagccgtcttactcaactgcccctttcctctccctcagaatttgtgtttgctgcctctatcttgttttttgttttttcttctggggggggtctagaacagtgcctggcacatagtaggcgctcaataaatacttgtttgttgaatgtctcctctctctttccactctgggaaacctaggtttctgccattctgggtgaccctgtatttctttctggtgcccattccatttgtccagttaatacttcctcttaaaaatctccaagaagctgggtctccagatcccatttagaaccaaccaggtgctgaaaacacatgtagataatggccatcatcctaagcccaaagtagaaaatggtagaaggtagtgggtagaagtcactatataaggaaggggatgggattttccattctaaaagttttggagagggaaatccaggctattaaagtcactaaatttctaagtatgtccatttcccatctcagcttcaagggaggtgtcagcagtattatctccactttcaatctccctccaagctctactctggaggagtctgtcccactctgtcaagtggaatccttccctttccaactctacctccctcactcagctcctttcccctgatcagagaaagggatcaagggggttgggaggggggaaagagaccagccttggtccctaagcctccagaaacgtcttcttaatccccaccttttcttactcccaaaaaagaatgaacacccctgactctggagtggtgtatactgccacatcagtgtttgagtcagtccccagaggagaggggaaccctcctccatcttttttgcaacatctcatttcttccttttgctgttgcttcccccctcacacacttggttttgttctatcctacatttgagatttctattttatgttgaacttgctgctttttttcatattgaaaagatgacatcgccccaagagccaaaaataaatgggaattgaaaaaagctg

SEQ ID NO: 33078 - DNA, 2671 bp, Homo sapiens
  source 1..2671: mol_type = unassigned DNA
gtacatgaccggcatcgactaatcagggccaggctcgatgaggctttgtctccctaccgcgcgcggggccgattctcccgcctcccagccccggcgcacgcgcgccccgcccagcctgctttccctccgcgccctcccctctcctttctccctctcagaaccttcctgccgtcgcgtttgcacctcgctgctccagcctctggggcgcattccaaccttccagcctgcgacctgcggagaaaaaaaattacttattttcttgccccatacataccttgaggcgagcaaaaaaattaaattttaaccatgagggaaatcgtgcacatccaggctggtcagtgtggcaaccagatcggtgccaagttctgggaggtgatcagtgatgaacatggcatcgaccccaccggcacctaccacggggacagcgacctgcagctggaccgcatctctgtgtactacaatgaagccacaggtggcaaatatgttcctcgtgccatcctggtggatctagaacctgggaccatggactctgttcgctcaggtccttttggccagatctttagaccagacaactttgtatttggtcagtctggggcaggtaacaactgggccaaaggccactacacagagggcgccgagctggttgattctgtcctggatgtggtacggaaggaggcagagagctgtgactgcctgcagggcttccagctgacccactcactgggcgggggcacaggctctggaatgggcactctccttatcagcaagatccgagaagaataccctgatcgcatcatgaataccttcagtgtggtgccttcacccaaagtgtctgacaccgtggtcgagccctacaatgccaccctctccgtccatcagttggtagagaatactgatgagacctattgcattgacaacgaggccctctatgatatctgcttccgcactctgaagctgaccacaccaacctacggggatctgaaccaccttgtctcagccaccatgagtggtgtcaccacctgcctccgtttccctggccagctcaatgctgacctccgcaagttggcagtcaacatggtccccttcccacgtctccatttctttatgcctggctttgcccctctcaccagccgtggaagccagcagtatcgagctctcacagtgccggaactcacccagcaggtcttcgatgccaagaacatgatggctgcctgtgacccccgccacggccgatacctcaccgtggctgctgtcttccgtggtcggatgtccatgaaggaggtcgatgagcagatgcttaacgtgcagaacaagaacagcagctactttgtggaatggatccccaacaatgtcaagacagccgtctgtgacatcccacctcgtggcctcaagatggcagtcaccttcattggcaatagcacagccatccaggagctcttcaagcgcatctcggagcagttcactgccatgttccgccggaaggccttcctccactggtacacaggcgagggcatggacgagatggagttcaccgaggctgagagcaacatgaacgacctcgtctctgagtatcagcagtaccaggatgccaccgcagaagaggaggaggatttcggtgaggaggccgaagaggaggcctaaggcagagcccccatcacctcaggcttctcagttcccttagccgtcttactcaactgcccctttcctctccctcagaatttgtgtttgctgcctctatcttgttttttgttttttcttctgggggggggtctagaacagtgcctggcacatagtaggcgctcaataaatacttgtttgttgaatgtctcctctctctttccactctgggaaacctaggtttctgccattctgggtgaccctgtatttctttctggtgcccattccatttgtccagttaatacttcctcttaaaaatctccaagaagctgggtctccagatcccatttagaaccaaccaggtgctgaaaacacatgtagataatggccatcatcctaagcccaaagtagaaaatggtagaaggtagtgggtagaagtcactatataaggaaggggatgggattttccattctaaaagttttggagagggaaatccaggctattaaagtcactaaatttctaagtatgtccatttcccatctcagcttcaagggaggtgtcagcagtattatctccactttcaatctccctccaagctctactctggaggagtctgtcccactctgtcaagtggaatccttccctttccaactctacctccctcactcagctcctttcccctgatcagagaaagggatcaagggggttgggaggggggaaagagaccagccttggtccctaagcctccagaaacgtcttcttaatccccaccttttcttactcccaaaaaagaatgaacacccctgactctggagtggtgtatactgccacatcagtgtttgagtcagtccccagaggagaggggaaccctcctccatcttttttgcaacatctcatttcttccttttgctgttgcttcccccctcacacacttggttttgttctatcctacatttgagatttctattttatgttgaacttgctgctttttttcatattgaaaagatgacatcgccccaagagccaaaaataaatgggaattgaaaaaagctg

SEQ ID NO: 33079 - DNA, 2823 bp, Homo sapiens
  source 1..2823: mol_type = unassigned DNA
ggcgcttatcgaagtgtggtcgacctccatccgcccaccgagcacttgggacccgctgcacatatccagagcagggaaagctgtggctttctcgggggagcgagtgtctaggggaagggtgtggcaggcccacgggatgccatgccctagaacaacggcctgagcgcttgtggaattaaaatgggagatgtggggccgaggtgggcgaattgggatccctccaggtcaggggttcgagaccatcctgggcaacaaagcgagaccctcccccatgccacgtttctacaaaaaataaaagtaaaaaattagctgggcgtggtggcgcgcgtctgtggtcccagctactcgagaggctgagatgggaggatcggttgagcctgggagttccacgctgtagtcatccgtgattgcaccactgcactgcaggctgggcaacaggaagaccctgtcttaaaaattagaagaagctgggcgcggtggctcacccttgtaatcccagcactttgggaggccaagttctgggaggtgatcagtgatgaacatggcatcgaccccaccggcacctaccacggggacagcgacctgcagctggaccgcatctctgtgtactacaatgaagccacaggtggcaaatatgttcctcgtgccatcctggtggatctagaacctgggaccatggactctgttcgctcaggtccttttggccagatctttagaccagacaactttgtatttggtcagtctggggcaggtaacaactgggccaaaggccactacacagagggcgccgagctggttgattctgtcctggatgtggtacggaaggaggcagagagctgtgactgcctgcagggcttccagctgacccactcactgggcgggggcacaggctctggaatgggcactctccttatcagcaagatccgagaagaataccctgatcgcatcatgaataccttcagtgtggtgccttcacccaaagtgtctgacaccgtggtcgagccctacaatgccaccctctccgtccatcagttggtagagaatactgatgagacctattgcattgacaacgaggccctctatgatatctgcttccgcactctgaagctgaccacaccaacctacggggatctgaaccaccttgtctcagccaccatgagtggtgtcaccacctgcctccgtttccctggccagctcaatgctgacctccgcaagttggcagtcaacatggtccccttcccacgtctccatttctttatgcctggctttgcccctctcaccagccgtggaagccagcagtatcgagctctcacagtgccggaactcacccagcaggtcttcgatgccaagaacatgatggctgcctgtgacccccgccacggccgatacctcaccgtggctgctgtcttccgtggtcggatgtccatgaaggaggtcgatgagcagatgcttaacgtgcagaacaagaacagcagctactttgtggaatggatccccaacaatgtcaagacagccgtctgtgacatcccacctcgtggcctcaagatggcagtcaccttcattggcaatagcacagccatccaggagctcttcaagcgcatctcggagcagttcactgccatgttccgccggaaggccttcctccactggtacacaggcgagggcatggacgagatggagttcaccgaggctgagagcaacatgaacgacctcgtctctgagtatcagcagtaccaggatgccaccgcagaagaggaggaggatttcggtgaggaggccgaagaggaggcctaaggcagagcccccatcacctcaggcttctcagttcccttagccgtcttactcaactgcccctttcctctccctcagaatttgtgtttgctgcctctatcttgttttttgttttttcttctggggggggtctagaacagtgcctggcacatagtaggcgctcaataaatacttgtttgttgaatgtctcctctctctttccactctgggaaacctaggtttctgccattctgggtgaccctgtatttctttctggtgcccattccatttgtccagttaatacttcctcttaaaaatctccaagaagctgggtctccagatcccatttagaaccaaccaggtgctgaaaacacatgtagataatggccatcatcctaagcccaaagtagaaaatggtagaaggtagtgggtagaagtcactatataaggaaggggatgggattttccattctaaaagttttggagagggaaatccaggctattaaagtcactaaatttctaagtatgtccatttcccatctcagcttcaagggaggtgtcagcagtattatctccactttcaatctccctccaagctctactctggaggagtctgtcccactctgtcaagtggaatccttccctttccaactctacctccctcactcagctcctttcccctgatcagagaaagggatcaagggggttgggaggggggaaagagaccagccttggtccctaagcctccagaaacgtcttcttaatccccaccttttcttactcccaaaaaagaatgaacacccctgactctggagtggtgtatactgccacatcagtgtttgagtcagtccccagaggagaggggaaccctcctccatcttttttgcaacatctcatttcttccttttgctgttgcttcccccctcacacacttggttttgttctatcctacatttgagatttctattttatgttgaacttgctgctttttttcatattgaaaagatgacatcgccccaagagccaaaaataaatgggaattgaaaaaagctg

SEQ ID NO: 33080 - DNA, 2903 bp, Homo sapiens
  source 1..2903: mol_type = unassigned DNA
tggggcggtgcccagcttgggggaaggagagcggcgcttatcgaagtgtggtcgacctccatccgcccaccgagcacttgggacccgctgcacatatccagagcagggaaagctgtggctttctcgggggagcgagtgtctaggggaagggtgtggcaggcccacgggatgccatgccctagaacaacggcctgagcgcttgtggaattaaaatgggagatgtggggccgaggtgggcgaattgggatccctccaggtcaggggttcgagaccatcctgggcaacaaagcgagaccctcccccatgccacgtttctacaaaaaataaaagtaaaaaattagctgggcgtggtggcgcgcgtctgtggtcccagctactcgagaggctgagatgggaggatcggttgagcctgggagttccacgctgtagtcatccgtgattgcaccactgcactgcaggctgggcaacaggaagaccctgtcttaaaaattagaagaagctgggcgcggtggctcacccttgtaatcccagcactttgggaggccaaggtgggcggatcacgaggtcaagagatctagaccatcctggccaacatgttctgggaggtgatcagtgatgaacatggcatcgaccccaccggcacctaccacggggacagcgacctgcagctggaccgcatctctgtgtactacaatgaagccacaggtggcaaatatgttcctcgtgccatcctggtggatctagaacctgggaccatggactctgttcgctcaggtccttttggccagatctttagaccagacaactttgtatttggtcagtctggggcaggtaacaactgggccaaaggccactacacagagggcgccgagctggttgattctgtcctggatgtggtacggaaggaggcagagagctgtgactgcctgcagggcttccagctgacccactcactgggcgggggcacaggctctggaatgggcactctccttatcagcaagatccgagaagaataccctgatcgcatcatgaataccttcagtgtggtgccttcacccaaagtgtctgacaccgtggtcgagccctacaatgccaccctctccgtccatcagttggtagagaatactgatgagacctattgcattgacaacgaggccctctatgatatctgcttccgcactctgaagctgaccacaccaacctacggggatctgaaccaccttgtctcagccaccatgagtggtgtcaccacctgcctccgtttccctggccagctcaatgctgacctccgcaagttggcagtcaacatggtccccttcccacgtctccatttctttatgcctggctttgcccctctcaccagccgtggaagccagcagtatcgagctctcacagtgccggaactcacccagcaggtcttcgatgccaagaacatgatggctgcctgtgacccccgccacggccgatacctcaccgtggctgctgtcttccgtggtcggatgtccatgaaggaggtcgatgagcagatgcttaacgtgcagaacaagaacagcagctactttgtggaatggatccccaacaatgtcaagacagccgtctgtgacatcccacctcgtggcctcaagatggcagtcaccttcattggcaatagcacagccatccaggagctcttcaagcgcatctcggagcagttcactgccatgttccgccggaaggccttcctccactggtacacaggcgagggcatggacgagatggagttcaccgaggctgagagcaacatgaacgacctcgtctctgagtatcagcagtaccaggatgccaccgcagaagaggaggaggatttcggtgaggaggccgaagaggaggcctaaggcagagcccccatcacctcaggcttctcagttcccttagccgtcttactcaactgcccctttcctctccctcagaatttgtgtttgctgcctctatcttgttttttgttttttcttctggggggggtctagaacagtgcctggcacatagtaggcgctcaataaatacttgtttgttgaatgtctcctctctctttccactctgggaaacctaggtttctgccattctgggtgaccctgtatttctttctggtgcccattccatttgtccagttaatacttcctcttaaaaatctccaagaagctgggtctccagatcccatttagaaccaaccaggtgctgaaaacacatgtagataatggccatcatcctaagcccaaagtagaaaatggtagaaggtagtgggtagaagtcactatataaggaaggggatgggattttccattctaaaagttttggagagggaaatccaggctattaaagtcactaaatttctaagtatgtccatttcccatctcagcttcaagggaggtgtcagcagtattatctccactttcaatctccctccaagctctactctggaggagtctgtcccactctgtcaagtggaatccttccctttccaactctacctccctcactcagctcctttcccctgatcagagaaagggatcaagggggttgggaggggggaaagagaccagccttggtccctaagcctccagaaacgtcttcttaatccccaccttttcttactcccaaaaaagaatgaacacccctgactctggagtggtgtatactgccacatcagtgtttgagtcagtccccagaggagaggggaaccctcctccatcttttttgcaacatctcatttcttccttttgctgttgcttcccccctcacacacttggttttgttctatcctacatttgagatttctattttatgttgaacttgctgctttttttcatattgaaaagatgacatcgccccaagagccaaaaataaatgggaattgaaaaaagctg

SEQ ID NO: 33081 - DNA, 2824 bp, Homo sapiens
  source 1..2824: mol_type = unassigned DNA
ggcgcttatcgaagtgtggtcgacctccatccgcccaccgagcacttgggacccgctgcacatatccagagcagggaaagctgtggctttctcgggggagcgagtgtctaggggaagggtgtggcaggcccacgggatgccatgccctagaacaacggcctgagcgcttgtggaattaaaatgggagatgtggggccgaggtgggcgaattgggatccctccaggtcaggggttcgagaccatcctgggcaacaaagcgagaccctcccccatgccacgtttctacaaaaaataaaagtaaaaaattagctgggcgtggtggcgcgcgtctgtggtcccagctactcgagaggctgagatgggaggatcggttgagcctgggagttccacgctgtagtcatccgtgattgcaccactgcactgcaggctgggcaacaggaagaccctgtcttaaaaattagaagaagctgggcgcggtggctcacccttgtaatcccagcactttgggaggccaagttctgggaggtgatcagtgatgaacatggcatcgaccccaccggcacctaccacggggacagcgacctgcagctggaccgcatctctgtgtactacaatgaagccacaggtggcaaatatgttcctcgtgccatcctggtggatctagaacctgggaccatggactctgttcgctcaggtccttttggccagatctttagaccagacaactttgtatttggtcagtctggggcaggtaacaactgggccaaaggccactacacagagggcgccgagctggttgattctgtcctggatgtggtacggaaggaggcagagagctgtgactgcctgcagggcttccagctgacccactcactgggcgggggcacaggctctggaatgggcactctccttatcagcaagatccgagaagaataccctgatcgcatcatgaataccttcagtgtggtgccttcacccaaagtgtctgacaccgtggtcgagccctacaatgccaccctctccgtccatcagttggtagagaatactgatgagacctattgcattgacaacgaggccctctatgatatctgcttccgcactctgaagctgaccacaccaacctacggggatctgaaccaccttgtctcagccaccatgagtggtgtcaccacctgcctccgtttccctggccagctcaatgctgacctccgcaagttggcagtcaacatggtccccttcccacgtctccatttctttatgcctggctttgcccctctcaccagccgtggaagccagcagtatcgagctctcacagtgccggaactcacccagcaggtcttcgatgccaagaacatgatggctgcctgtgacccccgccacggccgatacctcaccgtggctgctgtcttccgtggtcggatgtccatgaaggaggtcgatgagcagatgcttaacgtgcagaacaagaacagcagctactttgtggaatggatccccaacaatgtcaagacagccgtctgtgacatcccacctcgtggcctcaagatggcagtcaccttcattggcaatagcacagccatccaggagctcttcaagcgcatctcggagcagttcactgccatgttccgccggaaggccttcctccactggtacacaggcgagggcatggacgagatggagttcaccgaggctgagagcaacatgaacgacctcgtctctgagtatcagcagtaccaggatgccaccgcagaagaggaggaggatttcggtgaggaggccgaagaggaggcctaaggcagagcccccatcacctcaggcttctcagttcccttagccgtcttactcaactgcccctttcctctccctcagaatttgtgtttgctgcctctatcttgttttttgttttttcttctgggggggggtctagaacagtgcctggcacatagtaggcgctcaataaatacttgtttgttgaatgtctcctctctctttccactctgggaaacctaggtttctgccattctgggtgaccctgtatttctttctggtgcccattccatttgtccagttaatacttcctcttaaaaatctccaagaagctgggtctccagatcccatttagaaccaaccaggtgctgaaaacacatgtagataatggccatcatcctaagcccaaagtagaaaatggtagaaggtagtgggtagaagtcactatataaggaaggggatgggattttccattctaaaagttttggagagggaaatccaggctattaaagtcactaaatttctaagtatgtccatttcccatctcagcttcaagggaggtgtcagcagtattatctccactttcaatctccctccaagctctactctggaggagtctgtcccactctgtcaagtggaatccttccctttccaactctacctccctcactcagctcctttcccctgatcagagaaagggatcaagggggttgggaggggggaaagagaccagccttggtccctaagcctccagaaacgtcttcttaatccccaccttttcttactcccaaaaaagaatgaacacccctgactctggagtggtgtatactgccacatcagtgtttgagtcagtccccagaggagaggggaaccctcctccatcttttttgcaacatctcatttcttccttttgctgttgcttcccccctcacacacttggttttgttctatcctacatttgagatttctattttatgttgaacttgctgctttttttcatattgaaaagatgacatcgccccaagagccaaaaataaatgggaattgaaaaaagctg

SEQ ID NO: 33082 - DNA, 2633 bp, Homo sapiens
  source 1..2633: mol_type = unassigned DNA
cgcgtgcgccgcagtcacgtggagggcggggggggtggtcgactgcggcggcagctctttcctcagacccccagccttttgtgcgccgcgcggtggggcggtgcccagcttgggggaaggagagcggcgcttatcgaagtgtggtcgacctccatccgcccaccgagcacttgggacccgctgcacatatccagagcagggaaagctgtggctttctcgggggagcgagtgtctaggggaagggtgtggcaggcccacgggatgccatgccctagaacaacggcctgagcgcttgtggaattaaaatgggagatgtggggccgagttctgggaggtgatcagtgatgaacatggcatcgaccccaccggcacctaccacggggacagcgacctgcagctggaccgcatctctgtgtactacaatgaagccacaggtggcaaatatgttcctcgtgccatcctggtggatctagaacctgggaccatggactctgttcgctcaggtccttttggccagatctttagaccagacaactttgtatttggtcagtctggggcaggtaacaactgggccaaaggccactacacagagggcgccgagctggttgattctgtcctggatgtggtacggaaggaggcagagagctgtgactgcctgcagggcttccagctgacccactcactgggcgggggcacaggctctggaatgggcactctccttatcagcaagatccgagaagaataccctgatcgcatcatgaataccttcagtgtggtgccttcacccaaagtgtctgacaccgtggtcgagccctacaatgccaccctctccgtccatcagttggtagagaatactgatgagacctattgcattgacaacgaggccctctatgatatctgcttccgcactctgaagctgaccacaccaacctacggggatctgaaccaccttgtctcagccaccatgagtggtgtcaccacctgcctccgtttccctggccagctcaatgctgacctccgcaagttggcagtcaacatggtccccttcccacgtctccatttctttatgcctggctttgcccctctcaccagccgtggaagccagcagtatcgagctctcacagtgccggaactcacccagcaggtcttcgatgccaagaacatgatggctgcctgtgacccccgccacggccgatacctcaccgtggctgctgtcttccgtggtcggatgtccatgaaggaggtcgatgagcagatgcttaacgtgcagaacaagaacagcagctactttgtggaatggatccccaacaatgtcaagacagccgtctgtgacatcccacctcgtggcctcaagatggcagtcaccttcattggcaatagcacagccatccaggagctcttcaagcgcatctcggagcagttcactgccatgttccgccggaaggccttcctccactggtacacaggcgagggcatggacgagatggagttcaccgaggctgagagcaacatgaacgacctcgtctctgagtatcagcagtaccaggatgccaccgcagaagaggaggaggatttcggtgaggaggccgaagaggaggcctaaggcagagcccccatcacctcaggcttctcagttcccttagccgtcttactcaactgcccctttcctctccctcagaatttgtgtttgctgcctctatcttgttttttgttttttcttctgggggggggtctagaacagtgcctggcacatagtaggcgctcaataaatacttgtttgttgaatgtctcctctctctttccactctgggaaacctaggtttctgccattctgggtgaccctgtatttctttctggtgcccattccatttgtccagttaatacttcctcttaaaaatctccaagaagctgggtctccagatcccatttagaaccaaccaggtgctgaaaacacatgtagataatggccatcatcctaagcccaaagtagaaaatggtagaaggtagtgggtagaagtcactatataaggaaggggatgggattttccattctaaaagttttggagagggaaatccaggctattaaagtcactaaatttctaagtatgtccatttcccatctcagcttcaagggaggtgtcagcagtattatctccactttcaatctccctccaagctctactctggaggagtctgtcccactctgtcaagtggaatccttccctttccaactctacctccctcactcagctcctttcccctgatcagagaaagggatcaagggggttgggaggggggaaagagaccagccttggtccctaagcctccagaaacgtcttcttaatccccaccttttcttactcccaaaaaagaatgaacacccctgactctggagtggtgtatactgccacatcagtgtttgagtcagtccccagaggagaggggaaccctcctccatcttttttgcaacatctcatttcttccttttgctgttgcttcccccctcacacacttggttttgttctatcctacatttgagatttctattttatgttgaacttgctgctttttttcatattgaaaagatgacatcgccccaagagccaaaaataaatgggaattgaaaaaagctg

SEQ ID NO: 33083 - DNA, 2904 bp, Homo sapiens
  source 1..2904: mol_type = unassigned DNA
tggggcggtgcccagcttgggggaaggagagcggcgcttatcgaagtgtggtcgacctccatccgcccaccgagcacttgggacccgctgcacatatccagagcagggaaagctgtggctttctcgggggagcgagtgtctaggggaagggtgtggcaggcccacgggatgccatgccctagaacaacggcctgagcgcttgtggaattaaaatgggagatgtggggccgaggtgggcgaattgggatccctccaggtcaggggttcgagaccatcctgggcaacaaagcgagaccctcccccatgccacgtttctacaaaaaataaaagtaaaaaattagctgggcgtggtggcgcgcgtctgtggtcccagctactcgagaggctgagatgggaggatcggttgagcctgggagttccacgctgtagtcatccgtgattgcaccactgcactgcaggctgggcaacaggaagaccctgtcttaaaaattagaagaagctgggcgcggtggctcacccttgtaatcccagcactttgggaggccaaggtgggcggatcacgaggtcaagagatctagaccatcctggccaacatgttctgggaggtgatcagtgatgaacatggcatcgaccccaccggcacctaccacggggacagcgacctgcagctggaccgcatctctgtgtactacaatgaagccacaggtggcaaatatgttcctcgtgccatcctggtggatctagaacctgggaccatggactctgttcgctcaggtccttttggccagatctttagaccagacaactttgtatttggtcagtctggggcaggtaacaactgggccaaaggccactacacagagggcgccgagctggttgattctgtcctggatgtggtacggaaggaggcagagagctgtgactgcctgcagggcttccagctgacccactcactgggcgggggcacaggctctggaatgggcactctccttatcagcaagatccgagaagaataccctgatcgcatcatgaataccttcagtgtggtgccttcacccaaagtgtctgacaccgtggtcgagccctacaatgccaccctctccgtccatcagttggtagagaatactgatgagacctattgcattgacaacgaggccctctatgatatctgcttccgcactctgaagctgaccacaccaacctacggggatctgaaccaccttgtctcagccaccatgagtggtgtcaccacctgcctccgtttccctggccagctcaatgctgacctccgcaagttggcagtcaacatggtccccttcccacgtctccatttctttatgcctggctttgcccctctcaccagccgtggaagccagcagtatcgagctctcacagtgccggaactcacccagcaggtcttcgatgccaagaacatgatggctgcctgtgacccccgccacggccgatacctcaccgtggctgctgtcttccgtggtcggatgtccatgaaggaggtcgatgagcagatgcttaacgtgcagaacaagaacagcagctactttgtggaatggatccccaacaatgtcaagacagccgtctgtgacatcccacctcgtggcctcaagatggcagtcaccttcattggcaatagcacagccatccaggagctcttcaagcgcatctcggagcagttcactgccatgttccgccggaaggccttcctccactggtacacaggcgagggcatggacgagatggagttcaccgaggctgagagcaacatgaacgacctcgtctctgagtatcagcagtaccaggatgccaccgcagaagaggaggaggatttcggtgaggaggccgaagaggaggcctaaggcagagcccccatcacctcaggcttctcagttcccttagccgtcttactcaactgcccctttcctctccctcagaatttgtgtttgctgcctctatcttgttttttgttttttcttctgggggggggtctagaacagtgcctggcacatagtaggcgctcaataaatacttgtttgttgaatgtctcctctctctttccactctgggaaacctaggtttctgccattctgggtgaccctgtatttctttctggtgcccattccatttgtccagttaatacttcctcttaaaaatctccaagaagctgggtctccagatcccatttagaaccaaccaggtgctgaaaacacatgtagataatggccatcatcctaagcccaaagtagaaaatggtagaaggtagtgggtagaagtcactatataaggaaggggatgggattttccattctaaaagttttggagagggaaatccaggctattaaagtcactaaatttctaagtatgtccatttcccatctcagcttcaagggaggtgtcagcagtattatctccactttcaatctccctccaagctctactctggaggagtctgtcccactctgtcaagtggaatccttccctttccaactctacctccctcactcagctcctttcccctgatcagagaaagggatcaagggggttgggaggggggaaagagaccagccttggtccctaagcctccagaaacgtcttcttaatccccaccttttcttactcccaaaaaagaatgaacacccctgactctggagtggtgtatactgccacatcagtgtttgagtcagtccccagaggagaggggaaccctcctccatcttttttgcaacatctcatttcttccttttgctgttgcttcccccctcacacacttggttttgttctatcctacatttgagatttctattttatgttgaacttgctgctttttttcatattgaaaagatgacatcgccccaagagccaaaaataaatgggaattgaaaaaagctg

SEQ ID NO: 33084 - DNA, 2903 bp, Homo sapiens; identical to SEQ ID NO: 33080
  source 1..2903: mol_type = unassigned DNA

SEQ ID NO: 33085 - DNA, 2632 bp, Homo sapiens; identical to SEQ ID NO: 33077
  source 1..2632: mol_type = unassigned DNA

SEQ ID NO: 33086 - DNA, 2903 bp, Homo sapiens; identical to SEQ ID NO: 33080
  source 1..2903: mol_type = unassigned DNA

SEQ ID NO: 33087 - DNA, 2670 bp, Homo sapiens; identical to SEQ ID NO: 33076
  source 1..2670: mol_type = unassigned DNA

SEQ ID NO: 33088 - DNA, 2903 bp, Homo sapiens
  source 1..2903: mol_type = unassigned DNA
tggggcggtgcccagcttgggggaaggagagcggcgcttatcgaagtgtggtcgacctccatccgcccaccgagcacttgggacccgctgcacatatccagagcagggaaagctgtggctttctcgggggagcgagtgtctaggggaagggtgtggcaggcccacgggatgccatgccctagaacaacggcctgagcgcttgtggaattaaaatgggagatgtggggccgaggtgggcgaattgggatccctccaggtcaggggttcgagaccatcctgggcaacaaagcgagaccctcccccatgccacgtttctacaaaaaataaaagtaaaaaattagctgggcgtggtggcgcgcgtctgtggtcccagctactcgagaggctgagatgggaggatcggttgagcctgggagttccacgctgtagtcatccgtgattgcaccactgcactgcaggctgggcaacaggaagaccctgtcttaaaaattagaagaagctgggcgcggtggctcacccttgtaatcccagcactttgggaggccaaggtgggcggatcacgaggtcaagagatctagaccatcctggccaacatgttctgggaggtgatcagtgatgaacatggcatcgaccccaccggcacctaccacggggacagcgacctgcagctggaccgcatctctgtgtactacaatgaagccacaggtggcaaatatgttcctcgtgccatcctggtggatctagaacctgggaccatggactctgttcgctcaggtccttttggccagatctttagaccagacaactttgtatttggtcagtctggggcaggtaacaactgggccaaaggccactacacagagggcgccgagctggttgattctgtcctggatgtggtacggaaggaggcagagagctgtgactgcctgcagggcttccagctgacccactcactgggcgggggcacaggctctggaatgggcactctccttatcagcaagatccgagaagaataccctgatcgcatcatgaataccttcagtgtggtgccttcacccaaagtgtctgacaccgtggtcgagccctacaatgccaccctctccgtccatcagttggtagagaatactgatgagacctattgcattgacaacgaggccctctatgatatctgcttccgcactctgaagctgaccacaccaacctacggggatctgaaccaccttgtctcagccaccatgagtggtgtcaccacctgcctccgtttccctggccagctcaatgctgacctccgcaagttggcagtcaacatggtccccttcccacgtctccatttctttatgcctggctttgcccctctcaccagccgtggaagccagcagtatcgagctctcacagtgccggaactcacccagcaggtcttcgatgccaagaacatgatggctgcctgtgacccccgccacggccgatacctcaccgtggctgctgtcttccgtggtcggatgtccatgaaggaggtcgatgagcagatgcttaacgtgcagaacaagaacagcagctactttgtggaatggatccccaacaatgtcaagacagccgtctgtgacatcccacctcgtggcctcaagatggcagtcaccttcattggcaatagcacagccatccaggagctcttcaagcgcatctcggagcagttcactgccatgttccgccggaaggccttcctccactggtacacaggcgagggcatggacgagatggagttcaccgaggctgagagcaacatgaacgacctcgtctctgagtatcagcagtaccaggatgccaccgcagaagaggaggaggatttcggtgaggaggccgaagaggaggcctaaggcagagcccccatcacctcaggcttctcagttcccttagccgtcttactcaactgcccctttcctctccctcagaatttgtgtttgctgcctctatcttgttttttgttttttcttctggggggggtctagaacagtgcctggcacatagtaggcgctcaataaatacttgtttgttgaatgtctcctctctctttccactctgggaaacctaggtttctgccattctgggtgaccctgtatttctttctggtgcccattccatttgtccagttaatacttcctcttaaaaatctccaagaagctgggtctccagatcccatttagaaccaaccaggtgctgaaaacacatgtagataatggccatcatcctaagcccaaagtagaaaatggtagaaggtagtgggtagaagtcactatataaggaaggggatgggattttccattctaaaagttttggagagggaaatccaggctattaaagtcactaaatttctaagtatgtccatttcccatctcagcttcaagggaggtgtcagcagtattatctccactttcaatctccctccaagctctactctggaggagtctgtcccactctgtcaagtggaatccttccctttccaactctacctccctcactcagctcctttcccctgatcagagaaagggatcaagggggttgggaggggggaaagagaccagccttggtccctaagcctccagaaacgtcttcttaatccccaccttttcttactcccaaaaaagaatgaacacccctgactctggaatggtgtatactgccacatcagtgtttgagtcagtccccagaggagaggggaaccctcctccatcttttttgcaacatctcatttcttccttttgctgttgcttcccccctcacacacttggttttgttctatcctacatttgagatttctattttgtgttgaacttgctgctttttttcatattgaaaagatgacatcgccccaagagccaaaaataaatgggaattgaaaaaagctg

SEQ ID NO: 33089 - DNA, 2823 bp, Homo sapiens; identical to SEQ ID NO: 33079
  source 1..2823: mol_type = unassigned DNA

SEQ ID NO: 33090 - DNA, 2670 bp, Homo sapiens; identical to SEQ ID NO: 33076
  source 1..2670: mol_type = unassigned DNA

SEQ ID NO: 33091 - DNA, 2670 bp, Homo sapiens; identical to SEQ ID NO: 33076
  source 1..2670: mol_type = unassigned DNA

SEQ ID NO: 33092 - DNA, 2670 bp, Homo sapiens
  source 1..2670: mol_type = unassigned DNA
gtacatgaccggcatcgactaatcagggccaggctcgatgaggctttgtctccctaccgcgcgcggggccgattctcccgcctcccagccccggcgcacgcgcgccccgcccagcctgctttccctccgcgccctcccctctcctttctccctctcagaaccttcctgccgtcgcgtttgcacctcgctgctccagcctctggggcgcattccaaccttccagcctgcgacctgcggagaaaaaaaattacttattttcttgccccatacataccttgaggcgagcaaaaaaattaaattttaaccatgagggaaatcgtgcacatccaggctggtcagtgtggcaaccagatcggtgccaagttctgggaggtgatcagtgatgaacatggcatcgaccccaccggcacctaccacggggacagcgacctgcagctggaccgcatctctgtgtactacaatgaagccacaggtggcaaatatgttcctcgtgccatcctggtggatctagaacctgggaccatggactctgttcgctcaggtccttttggccagatctttagaccagacaactttgtatttggtcagtctggggcaggtaacaactgggccaaaggccactacacagagggcgccgagctggttgattctgtcctggatgtggtacggaaggaggcagagagctgtgactgcctgcagggcttccagctgacccactcactgggcgggggcacaggctctggaatgggcactctccttatcagcaagatccgagaagaataccctgatcgcatcatgaataccttcagtgtggtgccttcacccaaagtgtctgacaccgtggtcgagccctacaatgccaccctctccgtccatcagttggtagagaatactgatgagacctattgcattgacaacgaggccctctatgatatctgcttccgcactctgaagctgaccacaccaacctacggggatctgaaccaccttgtctcagccaccatgagtggtgtcaccacctgcctccgtttccctggccagctcaatgctgacctccgcaagttggcagtcaacatggtccccttcccacgtctccatttctttatgcctggctttgcccctctcaccagccgtggaagccagcagtatcgagctctcacagtgccggaactcacccagcaggtcttcgatgccaagaacatgatggctgcctgtgacccccgccacggccgatacctcaccgtggctgctgtcttccgtggtcggatgtccatgaaggaggtcgatgagcagatgcttaacgtgcagaacaagaacagcagctactttgtggaatggatccccaacaatgtcaagacagccgtctgtgacatcccacctcgtggcctcaagatggcagtcaccttcattggcaatagcacagccatccaggagctcttcaagcgcatctcggagcagttcactgccatgttccgccggaaggccttcctccactggtacacaggcgagggcatggacgagatggagttcaccgaggctgagagcaacatgaacgacctcgtctctgagtatcagcagtaccaggatgccaccgcagaagaggaggaggatttcggtgaggaggccgaagaggaggcctaaggcagagcccccatcacctcaggcttctcagttcccttagccgtcttactcaactgcccctttcctctccctcagaatttgtgtttgctgcctctatcttgttttttgttttttcttctggggggggtctagaacagtgcctggcacatagtaggcgctcaataaatacttgtttgttgaatgtctcctctctctttccactctgggaaacctaggtttctgccattctgggtgaccctgtatttctttctggtgcccattccatttgtccagttaatacttcctcttaaaaatctccaagaagctgggtctccagatcccatttagaaccaaccaggtgctgaaaacacatgtagataatggccatcatcctaagcccaaagtagaaaatggtagaaggtagtgggtagaagtcactatataaggaaggggatgggattttccattctaaaagttttggagagggaaatccaggctattaaagtcactaaatttctaagtatgtccatttcccatctcagcttcaagggaggtgtcagcagtattatctccactttcaatctccctccaagctctactctggaggagtctgtcccactctgtcaagtggaatccttccctttccaactctacctccctcactcagctcctttcccctgatcagagaaagggatcaagggggttgggaggggggaaagagaccagccttggtccctaagcctccagaaacgtcttcttaatccccaccttttcttactcccaaaaaagaatgaacacccctgactctggaatggtgtatactgccacatcagtgtttgagtcagtccccagaggagaggggaaccctcctccatcttttttgcaacatctcatttcttccttttgctgttgcttcccccctcacacacttggttttgttctatcctacatttgagatttctattttgtgttgaacttgctgctttttttcatattgaaaagatgacatcgccccaagagccaaaaataaatgggaattgaaaaaagctg

SEQ ID NO: 33093 - DNA, 1339 bp, Homo sapiens
  source 1..1339: mol_type = unassigned DNA
ccctctcagaaccttcctgccgtcgcgtttgcacctcgctgctccagcctctggggcgcattccaaccttccagcctgcgacctgcggagaaaaaaaattacttattttcttgccccatacataccttgaggcgagcaaaaaaattaaattttaaccatgagggaaatcgtgcacatccaggctggtcagtgtggcaaccagatcggtgccaagttctgggaggtgatcagtgatgaacatggcatcgaccccaccggcacctaccacggggacagcgacctgcagctgacccactcactgggcgggggcacaggctctggaatgggcactctccttatcagcaagatccgagaagaataccctgatcgcatcatgaataccttcagtgtggtgccttcacccaaagtgtctgacaccgtggtcgagccctacaatgccaccctctccgtccatcagttggtagagaatactgatgagacctattgcattgacaacgaggccctctatgatatctgcttccgcactctgaagctgaccacaccaacctacggggatctgaaccaccttgtctcagccaccatgagtggtgtcaccacctgcctccgtttccctggccagctcaatgctgacctccgcaagttggcagtcaacatggtccccttcccacgtctccatttctttatgcctggctttgcccctctcaccagccgtggaagccagcagtatcgagctctcacagtgccggaactcacccagcaggtcttcgatgccaagaacatgatggctgcctgtgacccccgccacggccgatacctcaccgtggctgctgtcttccgtggtcggatgtccatgaaggaggtcgatgagcagatgcttaacgtgcagaacaagaacagcagctactttgtggaatggatccccaacaatgtcaagacagccgtctgtgacatcccacctcgtggcctcaagatggcagtcaccttcattggcaatagcacagccatccaggagctcttcaagcgcatctcggagcagttcactgccatgttccgccggaaggccttcctccactggtacacaggcgagggcatggacgagatggagttcaccgaggctgagagcaacatgaacgacctcgtctctgagtatcagcagtaccaggatgccaccgcagaagaggaggaggatttcggtgaggaggccgaagaggaggcctaaggcagagcccccatcacctcaggcttctcagttcccttagccgtcttactcaactgcccctttcctctccctcagaatttgtgtttgctgcctctatcttgttttttgttttttcttctg

SEQ ID NO: 33094 - DNA, 2903 bp, Homo sapiens; identical to SEQ ID NO: 33080
  source 1..2903: mol_type = unassigned DNA

SEQ ID NO: 33095 - DNA, 2823 bp, Homo sapiens; identical to SEQ ID NO: 33079
  source 1..2823: mol_type = unassigned DNA

SEQ ID NO: 33096 - DNA, 2903 bp, Homo sapiens; identical to SEQ ID NO: 33080
  source 1..2903: mol_type = unassigned DNA

SEQ ID NO: 33097 - DNA, 2903 bp, Homo sapiens; identical to SEQ ID NO: 33080
  source 1..2903: mol_type = unassigned DNA

SEQ ID NO: 33098 - DNA, 2632 bp, Homo sapiens; identical to SEQ ID NO: 33077
  source 1..2632: mol_type = unassigned DNA

SEQ ID NO: 33099 - DNA, 2670 bp, Homo sapiens; identical to SEQ ID NO: 33076
  source 1..2670: mol_type = unassigned DNA

SEQ ID NO: 33100 - DNA, 882 bp, Homo sapiens
  source 1..882: mol_type = unassigned DNA
agaaccttcctgccgtcgcgtttgcacctcgctgctccagcctctggggcgcattccaaccttccagcctgcgacctgcggagaaaaaaaattacttattttcttgccccatacataccttgaggcgagcaaaaaaattaaattttaaccatgagggaaatcgtgcacatccaggctggtcagtgtggcaaccagatcggtgccaagttctgggaggtgatcagtgatgaacatggcatcgaccccaccggcacctaccacggggacagcgacctgcagctggaccgcatctctgtgtactacaatgaagccacaggtggcaaatatgttcctcgtgccatcctggtggatctagaacctgggaccatggactctgttcgctcaggtccttttggccagatctttagaccagacaactttgtatttggtcagtctggggcaggtaacaactgggccaaaggccactacacagagggcgccgagctggttgattctgtcctggatgtggtacggaaggaggaggtcgatgagcagatgcttaacgtgcagaacaagaacagcagctactttgtggaatggatccccaacaatgtcaagacagccgtctgtgacatcccacctcgtggcctcaagatggcagtcaccttcattggcaatagcacagccatccaggagctcttcaagcgcatctcggagcagttcactgccatgttccgccggaaggccttcctccactggtacacaggcgagggcatggacgagatggagttcaccgaggctgagagcaacatgaacgacctcgtctctgagtatcagcagtaccaggatgccaccgcagaagaggaggaggatttcggtgaggaggccgaagaggaggcctaa

SEQ ID NO: 33101 - DNA, 2632 bp, Homo sapiens
  source 1..2632: mol_type = unassigned DNA
cgcgtgcgccgcagtcacgtggagggcggggggggtggtcgactgcggcggcagctctttcctcagacccccagccttttgtgcgccgcgcggtggggcggtgcccagcttgggggaaggagagcggcgcttatcgaagtgtggtcgacctccatccgcccaccgagcacttgggacccgctgcacatatccagagcagggaaagctgtggctttctcgggggagcgagtgtctaggggaagggtgtggcaggcccacgggatgccatgccctagaacaacggcctgagcgcttgtggaattaaaatgggagatgtggggccgagttctgggaggtgatcagtgatgaacatggcatcgaccccaccggcacctaccacggggacagcgacctgcagctggaccgcatctctgtgtactacaatgaagccacaggtggcaaatatgttcctcgtgccatcctggtggatctagaacctgggaccatggactctgttcgctcaggtccttttggccagatctttagaccagacaactttgtatttggtcagtctggggcaggtaacaactgggccaaaggccactacacagagggcgccgagctggttgattctgtcctggatgtggtacggaaggaggcagagagctgtgactgcctgcagggcttccagctgacccactcactgggcgggggcacaggctctggaatgggcactctccttatcagcaagatccgagaagaataccctgatcgcatcatgaataccttcagtgtggtgccttcacccaaagtgtctgacaccgtggtcgagccctacaatgccaccctctccgtccatcagttggtagagaatactgatgagacctattgcattgacaacgaggccctctatgatatctgcttccgcactctgaagctgaccacaccaacctacggggatctgaaccaccttgtctcagccaccatgagtggtgtcaccacctgcctccgtttccctggccagctcaatgctgacctccgcaagttggcagtcaacatggtccccttcccacgtctccatttctttatgcctggctttgcccctctcaccagccgtggaagccagcagtatcgagctctcacagtgccggaactcacccagcaggtcttcgatgccaagaacatgatggctgcctgtgacccccgccacggccgatacctcaccgtggctgctgtcttccgtggtcggatgtccatgaaggaggtcgatgagcagatgcttaacgtgcagaacaagaacagcagctactttgtggaatggatccccaacaatgtcaagacagccgtctgtgacatcccacctcgtggcctcaagatggcagtcaccttcattggcaatagcacagccatccaggagctcttcaagcgcatctcggagcagttcactgccatgttccgccggaaggccttcctccactggtacacaggcgagggcatggacgagatggagttcaccgaggctgagagcaacatgaacgacctcgtctctgagtatcagcagtaccaggatgccaccgcagaagaggaggaggatttcggtgaggaggccgaagaggaggcctaaggcagagcccccatcacctcaggcttctcagttcccttagccgtcttactcaactgcccctttcctctccctcagaatttgtgtttgctgcctctatcttgttttttgttttttcttctggggggggtctagaacagtgcctggcacatagtaggcgctcaataaatacttgtttgttgaatgtctcctctctctttccactctgggaaacctaggtttctgccattctgggtgaccctgtatttctttctggtgcccattccatttgtccagttaatacttcctcttaaaaatctccaagaagctgggtctccagatcccatttagaaccaaccaggtgctgaaaacacatgtagataatggccatcatcctaagcccaaagtagaaaatggtagaaggtagtgggtagaagtcactatataaggaaggggatgggattttccattctaaaagttttggagagggaaatccaggctattaaagtcactaaatttctaagtatgtccatttcccatctcagcttcaagggaggtgtcagcagtattatctccactttcaatctccctccaagctctactctggaggagtctgtcccactctgtcaagtggaatccttccctttccaactctacctccctcactcagctcctttcccctgatcagagaaagggatcaagggggttgggaggggggaaagagaccagccttggtccctaagcctccagaaacgtcttcttaatccccaccttttcttactcccaaaaaagaatgaacacccctgactctggaatggtgtatactgccacatcagtgtttgagtcagtccccagaggagaggggaaccctcctccatcttttttgcaacatctcatttcttccttttgctgttgcttcccccctcacacacttggttttgttctatcctacatttgagatttctattttgtgttgaacttgctgctttttttcatattgaaaagatgacatcgccccaagagccaaaaataaatgggaattgaaaaaagctg

SEQ ID NO: 33102 - DNA, 2632 bp, Homo sapiens; identical to SEQ ID NO: 33077
  source 1..2632: mol_type = unassigned DNA

SEQ ID NO: 33103 - DNA, 2670 bp, Homo sapiens; identical to SEQ ID NO: 33076
  source 1..2670: mol_type = unassigned DNA

SEQ ID NO: 33104 - DNA, 2632 bp, Homo sapiens; identical to SEQ ID NO: 33077
  source 1..2632: mol_type = unassigned DNA

SEQ ID NO: 33105 - DNA, 2823 bp, Homo sapiens; identical to SEQ ID NO: 33079
  source 1..2823: mol_type = unassigned DNA

SEQ ID NO: 33106 - DNA, 2823 bp, Homo sapiens; identical to SEQ ID NO: 33079
  source 1..2823: mol_type = unassigned DNA

SEQ ID NO: 33107 - DNA, 2823 bp, Homo sapiens
  source 1..2823: mol_type = unassigned DNA
ggcgcttatcgaagtgtggtcgacctccatccgcccaccgagcacttgggacccgctgcacatatccagagcagggaaagctgtggctttctcgggggagcgagtgtctaggggaagggtgtggcaggcccacgggatgccatgccctagaacaacggcctgagcgcttgtggaattaaaatgggagatgtggggccgaggtgggcgaattgggatccctccaggtcaggggttcgagaccatcctgggcaacaaagcgagaccctcccccatgccacgtttctacaaaaaataaaagtaaaaaattagctgggcgtggtggcgcgcgtctgtggtcccagctactcgagaggctgagatgggaggatcggttgagcctgggagttccacgctgtagtcatccgtgattgcaccactgcactgcaggctgggcaacaggaagaccctgtcttaaaaattagaagaagctgggcgcggtggctcacccttgtaatcccagcactttgggaggccaagttctgggaggtgatcagtgatgaacatggcatcgaccccaccggcacctaccacggggacagcgacctgcagctggaccgcatctctgtgtactacaatgaagccacaggtggcaaatatgttcctcgtgccatcctggtggatctagaacctgggaccatggactctgttcgctcaggtccttttggccagatctttagaccagacaactttgtatttggtcagtctggggcaggtaacaactgggccaaaggccactacacagagggcgccgagctggttgattctgtcctggatgtggtacggaaggaggcagagagctgtgactgcctgcagggcttccagctgacccactcactgggcgggggcacaggctctggaatgggcactctccttatcagcaagatccgagaagaataccctgatcgcatcatgaataccttcagtgtggtgccttcacccaaagtgtctgacaccgtggtcgagccctacaatgccaccctctccgtccatcagttggtagagaatactgatgagacctattgcattgacaacgaggccctctatgatatctgcttccgcactctgaagctgaccacaccaacctacggggatctgaaccaccttgtctcagccaccatgagtggtgtcaccacctgcctccgtttccctggccagctcaatgctgacctccgcaagttggcagtcaacatggtccccttcccacgtctccatttctttatgcctggctttgcccctctcaccagccgtggaagccagcagtatcgagctctcacagtgccggaactcacccagcaggtcttcgatgccaagaacatgatggctgcctgtgacccccgccacggccgatacctcaccgtggctgctgtcttccgtggtcggatgtccatgaaggaggtcgatgagcagatgcttaacgtgcagaacaagaacagcagctactttgtggaatggatccccaacaatgtcaagacagccgtctgtgacatcccacctcgtggcctcaagatggcagtcaccttcattggcaatagcacagccatccaggagctcttcaagcgcatctcggagcagttcactgccatgttccgccggaaggccttcctccactggtacacaggcgagggcatggacgagatggagttcaccgaggctgagagcaacatgaacgacctcgtctctgagtatcagcagtaccaggatgccaccgcagaagaggaggaggatttcggtgaggaggccgaagaggaggcctaaggcagagcccccatcacctcaggcttctcagttcccttagccgtcttactcaactgcccctttcctctccctcagaatttgtgtttgctgcctctatcttgttttttgttttttcttctggggggggtctagaacagtgcctggcacatagtaggcgctcaataaatacttgtttgttgaatgtctcctctctctttccactctgggaaacctaggtttctgccattctgggtgaccctgtatttctttctggtgcccattccatttgtccagttaatacttcctcttaaaaatctccaagaagctgggtctccagatcccatttagaaccaaccaggtgctgaaaacacatgtagataatggccatcatcctaagcccaaagtagaaaatggtagaaggtagtgggtagaagtcactatataaggaaggggatgggattttccattctaaaagttttggagagggaaatccaggctattaaagtcactaaatttctaagtatgtccatttcccatctcagcttcaagggaggtgtcagcagtattatctccactttcaatctccctccaagctctactctggaggagtctgtcccactctgtcaagtggaatccttccctttccaactctacctccctcactcagctcctttcccctgatcagagaaagggatcaagggggttgggaggggggaaagagaccagccttggtccctaagcctccagaaacgtcttcttaatccccaccttttcttactcccaaaaaagaatgaacacccctgactctggaatggtgtatactgccacatcagtgtttgagtcagtccccagaggagaggggaaccctcctccatcttttttgcaacatctcatttcttccttttgctgttgcttcccccctcacacacttggttttgttctatcctacatttgagatttctattttgtgttgaacttgctgctttttttcatattgaaaagatgacatcgccccaagagccaaaaataaatgggaattgaaaaaagctg

SEQ ID NO: 33108 - DNA, 2632 bp, Homo sapiens; identical to SEQ ID NO: 33077
  source 1..2632: mol_type = unassigned DNA

SEQ ID NO: 33109 - DNA, 2823 bp, Homo sapiens; identical to SEQ ID NO: 33079
  source 1..2823: mol_type = unassigned DNA

SEQ ID NO: 33110 - DNA, 624 bp, Homo sapiens
  source 1..624: mol_type = unassigned DNA
atgggcactctccttatcagcaagatccgagaagaataccctgatcgcatcatgaataccttcagtgtggtgccttcacccaaagtgtctgacaccgtggtcgagccctacaatgccaccctctccgtccatcagttggtagagaatactgatgagacctattgcattgacaacgaggccctctatgatatctgcttccgcactctgaagctgaccacaccaacctacggggatctgaaccaccttgtctcagccaccatgagtggtgtcaccacctgcctccgtttccctggccagctcaatgctgacctccgcaagttggcagtcaacatggtccccttcccacgtctccatttctttatgcctggctttgcccctctcaccagccgtggaagccagcagtatcgagctctcacagtgccggaactcacccagcaggtcttcgatgccaagaacatgatggctgcctgtgacccccgccacggccgatacctcaccgtggctgctgtcttccgtggtcggatgtccatgaaggaggtcgatgagcagatgcttaacgtgcagaacaagaacagcagctactttgtggaatggccccaacaatgtcaagacagccgtctgtga

SEQ ID NO: 33111 - DNA, 1395 bp, Homo sapiens
  source 1..1395: mol_type = unassigned DNA
agaaccttcctgccgtcgcgtttgcacctcgctgctccagcctctggggcgcattccaaccttccagcctgcgacctgcggagaaaaaaaattacttattttcttgccccatacataccttgaggcgagcaaaaaaattaaattttaaccatgagggaaatcgtgcacatccaggctggtcagtgtggcaaccagatcggtgccaagttctgggaggtgatcagtgatgaacatggcatcgaccccaccggcacctaccacggggacagcgacctgcagctggaccgcatctctgtgtactacaatgaagccacaggtggcaaatatgttcctcgtgccatcctggtggatctagaacctgggaccatggactctgttcgctcaggtccttttggccagatctttagaccagacaactttgtatttggtcagtctggggcaggtaacaactgcctgcagggcttccagctgacccactcactgggcgggggcacaggctctggaatgggcactctccttatcagcaagatccgagaagaataccctgatcgcatcatgaataccttcagtgtggtgccttcacccaaagtgtctgacaccgtggtcgagccctacaatgccaccctctccgtccatcagttggtagagaatactgatgagacctattgcattgacaacgaggccctctatgatatctgcttccgcactctgaagctgaccacaccaacctacggggatctgaaccaccttgtctcagccaccatgagtggtgtcaccacctgcctccgtttccctggccagctcaatgctgacctccgcaagttggcagtcaacatggtccccttcccacgtctccatttctttatgcctggctttgcccctctcaccagccgtggaagccagcagtatcgagctctcacagtgccggaactcacccagcaggtcttcgatgccaagaacatgatggctgcctgtgacccccgccacggccgatacctcaccgtggctgctgtcttccgtggtcggatgtccatgaaggaggtcgatgagcagatgcttaacgtgcagaacaagaacagcagctactttgtggaatggatccccaacaatgtcaagacagccgtctgtgacatcccacctcgtggcctcaagatggcagtcaccttcattggcaatagcacagccatccaggagctcttcaagcgcatctcggagcagttcactgccatgttccgccggaaggccttcctccactggtacacaggcgagggcatggacgagatggagttcaccgaggctgagagcaacatgaacgacctcgtctctgagtatcagcagtaccaggatgccaccgcagaagaggaggaggatttcggtgaggaggccgaagaggag

SEQ ID NO: 33112 - DNA, 1339 bp, Homo sapiens; identical to SEQ ID NO: 33093
  source 1..1339: mol_type = unassigned DNA

SEQ ID NO: 33113 - DNA, 1339 bp, Homo sapiens; identical to SEQ ID NO: 33093
  source 1..1339: mol_type = unassigned DNA

SEQ ID NO: 33114 - DNA, 1455 bp, Homo sapiens
  source 1..1455: mol_type = unassigned DNA
agaaccttcctgccgtcgcgtttgcacctcgctgctccagcctctggggcgcattccaaccttccagcctgcgacctgcggagaaaaaaaattacttattttcttgccccatacataccttgaggcgagcaaaaaaattaaattttaaccatgagggaaatcgtgcacatccaggctggtcagtgtggcaaccagatcggtgccaagttctgggaggtgatcagtgatgaacatggcatcgaccccaccggcacctaccacggggacagcgacctgcagctggaccgcatctctgtgtactacaatgaagccacaggtggcaaatatgttcctcgtgccatcctggtggatctagaacctgggaccatggactctgttcgctcaggtccttttggccagatctttagaccagacaactttgtatttggtcagtctggggcaggtaacaactgggccaaaggccactacacagagggcgccgagctggttgattctgtcctggatgtggtacggaaggaggcagagagctgtgactgcctgcagggcttccagctgacccactcactgggcgggggcacaggctctggaatgggcactctccttatcagcaagatccgagaagaataccctgatcgcatcatgaataccttcagtgtggtgccttcacccaaagtgtctgacaccgtggtcgagccctacaatgccaccctctccgtccatcagttggtagagaatactgatgagacctattgcattgacaacgaggccctctatgatatctgcttccgcactctgaagctgaccacaccaacctacggggatctgaaccaccttgtctcagccaccatgagtggtgtcaccacctgcctccgtttccctggccagctcaatgctgacctccgcaagttggcagtcaacatggtccccttcccacgtctccatttctttatgcctggctttgcccctctcaccagccgtggaagccagcagtatcgagctctcacagtgccggaactcacccagcaggtcttcgatgccaagaacatgatggctgcctgtgacccccgccacggccgatacctcaccgtggctgctgtcttccgtggtcggatgtccatgaaggaggtcgatgagcagatgcttaacgtgcagaacaagaacagcagctactttgtggaatggatccccaacaatgtcaagacagccgtctgtgacatcccacctcgtggcctcaagatggcagtcaccttcattggcaatagcacagccatccaggagctcttcaagcgcatctcggagcagttcactgccatgttccgccggaaggccttcctccactggtacacaggcgagggcatggacgagatggagttcaccgaggctgagagcaacatgaacgacctcgtctctgagtatcagcagtaccaggatgccaccgcagaaggggggggtcta

SEQ ID NO: 33115 - DNA, 1455 bp, Homo sapiens; identical to SEQ ID NO: 33114
  source 1..1455: mol_type = unassigned DNA

SEQ ID NO: 33116 - DNA, 1455 bp, Homo sapiens; identical to SEQ ID NO: 33114
  source 1..1455: mol_type = unassigned DNA

SEQ ID NO: 33117 - DNA, 1395 bp, Homo sapiens; identical to SEQ ID NO: 33111
  source 1..1395: mol_type = unassigned DNA

SEQ ID NO: 33118 - DNA, 1395 bp, Homo sapiens; identical to SEQ ID NO: 33111
  source 1..1395: mol_type = unassigned DNA

SEQ ID NO: 33119 - DNA, 1395 bp, Homo sapiens; identical to SEQ ID NO: 33111
  source 1..1395: mol_type = unassigned DNA

SEQ ID NO: 33120 - DNA, 1455 bp, Homo sapiens; identical to SEQ ID NO: 33114
  source 1..1455: mol_type = unassigned DNA

SEQ ID NO: 33121 - DNA, 1455 bp, Homo sapiens; identical to SEQ ID NO: 33114
  source 1..1455: mol_type = unassigned DNA

SEQ ID NO: 33122 - DNA, 1455 bp, Homo sapiens; identical to SEQ ID NO: 33114
  source 1..1455: mol_type = unassigned DNA

SEQ ID NO: 33123 - DNA, 1339 bp, Homo sapiens; identical to SEQ ID NO: 33093
  source 1..1339: mol_type = unassigned DNA

SEQ ID NO: 33124 - DNA, 1395 bp, Homo sapiens; identical to SEQ ID NO: 33111
  source 1..1395: mol_type = unassigned DNA

SEQ ID NO: 33125 - DNA, 1458 bp, Homo sapiens
  source 1..1458: mol_type = unassigned DNA
agaaccttcctgccgtcgcgtttgcacctcgctgctccagcctctggggcgcattccaaccttccagcctgcgacctgcggagaaaaaaaattacttattttcttgccccatacataccttgaggcgagcaaaaaaattaaattttaaccatgagggaaatcgtgcacatccaggctggtcagtgtggcaaccagatcggtgccaagttctgggaggtgatcagtgatgaacatggcatcgaccccaccggcacctaccacggggacagcgacctgcagctggaccgcatctctgtgtactacaatgaagccacaggtggcaaatatgttcctcgtgccatcctggtggatctagaacctgggaccatggactctgttcgctcaggtccttttggccagatctttagaccagacaactttgtatttggtcagtctggggcaggtaacaactgggccaaaggccactacacagagggcgccgagctggttgattctgtcctggatgtggtacggaaggaggcagagagctgtgactgcctgcagggcttccagctgacccactcactgggcgggggcacaggctctggaatgggcactctccttatcagcaagatccgagaagaataccctgatcgcatcatgaataccttcagtgtggtgccttcacccaaagtgtctgacaccgtggtcgagccctacaatgccaccctctccgtccatcagttggtagagaatactgatgagacctattgcattgacaacgaggccctctatgatatctgcttccgcactctgaagctgaccacaccaacctacggggatctgaaccaccttgtctcagccaccatgagtggtgtcaccacctgcctccgtttccctggccagctcaatgctgacctccgcaagttggcagtcaacatggtccccttcccacgtctccatttctttatgcctggctttgcccctctcaccagccgtggaagccagcagtatcgagctctcacagtgccggaactcacccagcaggtcttcgatgccaagaacatgatggctgcctgtgacccccgccacggccgatacctcaccgtggctgctgtcttccgtggtcggatgtccatgaaggaggtcgatgagcagatgcttaacgtgcagaacaagaacagcagctactttgtggaatggatccccaacaatgtcaagacagccgtctgtgacatcccacctcgtggcctcaagatggcagtcaccttcattggcaatagcacagccatccaggagctcttcaagcgcatctcggagcagttcactgccatgttccgccggaaggccttcctccactggtacacaggcgagggcatggacgagatggagttcaccgaggctgagagcaacatgaacgacctcgtctctgagtatcagcagtaccaggatgccaccgcagaagaggggggggtctag

SEQ ID NO: 33126 - DNA, 1339 bp, Homo sapiens; identical to SEQ ID NO: 33093
  source 1..1339: mol_type = unassigned DNA

SEQ ID NO: 33127 - DNA, 1339 bp, Homo sapiens; identical to SEQ ID NO: 33093
  source 1..1339: mol_type = unassigned DNA

SEQ ID NO: 33128 - DNA, 1339 bp, Homo sapiens; identical to SEQ ID NO: 33093
  source 1..1339: mol_type = unassigned DNA

SEQ ID NO: 33129 - DNA, 1395 bp, Homo sapiens; identical to SEQ ID NO: 33111
  source 1..1395: mol_type = unassigned DNA

SEQ ID NO: 33130 - DNA, 1395 bp, Homo sapiens; identical to SEQ ID NO: 33111
  source 1..1395: mol_type = unassigned DNA

SEQ ID NO: 33131 - DNA, 1339 bp, Homo sapiens; identical to SEQ ID NO: 33093
  source 1..1339: mol_type = unassigned DNA

SEQ ID NO: 33132 - DNA, 2472 bp, Homo sapiens
  source 1..2472: mol_type = unassigned DNA
agctggagcgttcggtggacagtgagcatgcgtaccatatctgaagttcgtaaattgaaattgaacatgcgtaattaatctttctgaataggaaaaaatatatacacaacaaaactctccgtttatggaacatgcgcatttgttctcagtaagtttttcgttttgaaagtgagcatgcgcatggtgagtaggttggtccgaagtttgaaccggacagaagcgctggtcggcgtctggcggttgtttttagaggtaatacacctagtttgtggctcagcatgtcaattgtaacagtgcaacttggtcagtgtggcaatcagattggttttgaagtttttgatgctttgcttagtgactcacacagttcccagggactctgctctatgagagagaatgaggcatatcaagcatcttgcaaagaaagattcttcagtgaggaggagaatggagttccaattgcccgggctgttcttgttgacatggaacccaaagttatcaatcaaatgctgtcaaaggctgcccagtctggccaatggaaatatggtcaacatgcatgcttctgtcaaaaacaaggttctggaaacaactgggcatatggttactctgttcatggacccaggcatgaagaatctataatgaacataatccggaaggaagtggagaaatgtgactctttcagtggttttttcatcataatgagtatggctgggggcacaggatcaggattaggagctttcgttacacagaatttagaagatcagtactcaaactcattgaaaatgaatcagattatttggccttatggaactggtgaggttattgttcaaaactacaactccattttgacactttctcacttgtaccgatcttcagacgccctccttcttcatgagaatgatgccatccataagatctgtgcaaaactgatgaatatcaagcagatctcctttagtgatatcaatcaagtcctcgcacatcagctgggaagtgtgttccagcctacttattctgcagaaagctcatttcactacagacgaaatccactaggagacttaatggagcatttagttccccatcctgaattcaagatgctgagtgttcgtaacattcctcacatgtctgagaattcattggcatacaccacatttacttgggctggcctcctcaagcatttgagacagatgctcatttctaatgcaaagatggaagaaggtattgataggcatgtatggcctcctttatcaggacttcctcctcttagtaaaatgtctctcaacaaggacctgcattttaacacttccattgctaacttggtcattcttcgtgggaaagatgtgcaaagtgcagatgtggagggatttaaagatccagctctgtatacttcctggttgaagcctgttaatgctttcaacgtgtggaaaacccagcgggcctttagcaaatatgagaagtctgcagtgttggtcagcaacagccagttcttagtaaaaccacttgatatgattgttgggaaggcatggaatatgtttgcttcaaaagcctacattcatcagtacacaaaatttggaatcgaagaagaggactttttagacagtttcacgtcattagagcaggttgttgccagttactgtaatctctgatcttgaacaatgggaaaagtataccttaaggcatttctggactaaaatattttcaatactattttctctgtaaagttttcaaagttctccatcctggctaacacggtgaaacaccgtctctaccagaaaatacaaaaaattagccaggcgcggtggcgggtgcctgtagtcccagctactcgggaggctgaggcaggagaatgacgtgaacccaggaggcggagcttgcagtgagccgagatcgcgccactgcactccagcctgggcgacagagcgagactccgtctcaaaaaaaaaaaaaaaaaaaaatgttttcaaagttccattctgttaaagtaaccacgtagaatgctgagtctattctgcatactatgcccacagaaaaggaagaaaactttttaaaatggagaatcgcatgttttcaatgaaaacattcacttggtatttcatttgtaagaaaaaaaaatggtgcttttataaagaactttggggaaacactttgctgaaatgttgggactctggaactagccaagaaaagagaatattctctttgtctacatgttcctaaatctttactccaaaacaactccaaaaacaactcacaaagcatgaaccaaactttcacagcataatttcaagctaaggaattgtaattctgtacttaatatattcatgtttgaaatgaatgctttgaaccacaggagggagatgttgtcaaatgctacagtgtgaacatgtattttgaatattctgtaacagggcaagtttccactctaagcagctatttaaaaataaatatgaggattttggtaataaatgcttatgcttaagt

SEQ ID NO: 33133 - DNA, 2307 bp, Homo sapiens
  source 1..2307: mol_type = unassigned DNA
agctggagcgttcggtggacagtgagcatgcgtaccatatctgaagttcgtaaattgaaattgaacatgcgtaattaatctttctgaataggaaaaaatatatacacaacaaaactctccgtttatggaacatgcgcatttgttctcagtaagtttttcgttttgaaagtgagcatgcgcatggtgagtaggttggtccgaagtttgaaccggacagaagcgctggtcggcgtctggcggttgtttttagaggtaatacacctagtttgtggctcagcatgtcaattgtaacagtgcaacttggtcagtgtggcaatcagattggttttgaagtttttgatgctttgcttagtgactcacacagttcccagggactctgctctatgagagagaatgaggcatatcaagcatcttgcaaagaaagattcttcagtgaggaggagaatggagttccaattgcccgggctgttcttgttgacatggaacccaaagttatcaatcaaatgctgtcaaaggctgcccagtctggccaatggaaatatggtcaacatgcatgcttctgtcaaaaacaaggttctggaaacaactgggcatatggttactctgttcatggacccaggcatgaagaatctataatgaacataatccggaaggaagtggagaaatgtgactctttcagtggttttttcatcataatgagtatggctgggggcacaggatcaggattaggagctttcgttacacagaatttagaagatcagtactcaaactcattgaaaatgaatcagattatttggccttatggaactggtgaggttattgttcaaaactacaactccattttgacactttctcacttgtaccgatcttcagacgccctccttcttcatgagaatgatgccatccataagatctgtgcaaaactgatgaatatcaagcagatctcctttagtgatatcaatcaagtcctcgcacatcagctgggaagtgtgttccagcctacttattctgcagaaagctcatttcactacagacgaaatccactaggtattgataggcatgtatggcctcctttatcaggacttcctcctcttagtaaaatgtctctcaacaaggacctgcattttaacacttccattgctaacttggtcattcttcgtgggaaagatgtgcaaagtgcagatgtggagggatttaaagatccagctctgtatacttcctggttgaagcctgttaatgctttcaacgtgtggaaaacccagcgggcctttagcaaatatgagaagtctgcagtgttggtcagcaacagccagttcttagtaaaaccacttgatatgattgttgggaaggcatggaatatgtttgcttcaaaagcctacattcatcagtacacaaaatttggaatcgaagaagaggactttttagacagtttcacgtcattagagcaggttgttgccagttactgtaatctctgatcttgaacaatgggaaaagtataccttaaggcatttctggactaaaatattttcaatactattttctctgtaaagttttcaaagttctccatcctggctaacacggtgaaacaccgtctctaccagaaaatacaaaaaattagccaggcgcggtggcgggtgcctgtagtcccagctactcgggaggctgaggcaggagaatgacgtgaacccaggaggcggagcttgcagtgagccgagatcgcgccactgcactccagcctgggcgacagagcgagactccgtctcaaaaaaaaaaaaaaaaaaaaatgttttcaaagttccattctgttaaagtaaccacgtagaatgctgagtctattctgcatactatgcccacagaaaaggaagaaaactttttaaaatggagaatcgcatgttttcaatgaaaacattcacttggtatttcatttgtaagaaaaaaaaatggtgcttttataaagaactttggggaaacactttgctgaaatgttgggactctggaactagccaagaaaagagaatattctctttgtctacatgttcctaaatctttactccaaaacaactccaaaaacaactcacaaagcatgaaccaaactttcacagcataatttcaagctaaggaattgtaattctgtacttaatatattcatgtttgaaatgaatgctttgaaccacaggagggagatgttgtcaaatgctacagtgtgaacatgtattttgaatattctgtaacagggcaagtttccactctaagcagctatttaaaaataaatatgaggattttggtaataaatgcttatgcttaagt

SEQ ID NO: 33134 - DNA, 1710 bp, Homo sapiens
  source 1..1710: mol_type = unassigned DNA
agctggagcgttcggtggacagtgagcatgcgtaccatatctgaagttcgtaaattgaaattgaacatgcgtaattaatctttctgaataggaaaaaatatatacacaacaaaactctccgtttatggaacatgcgcatttgttctcagtaagtttttcgttttgaaagtgagcatgcgcatggtgagtaggttggtccgaagtttgaaccggacagaagcgctggtcggcgtctggcggttgtttttagaggtaatacacctagtttgtggctcagcatgtcaattgtaacagtgcaacttggtcagtgtggcaatcagattggttttgaagtttttgatgctttgcttagtgactcacacagttcccagggactctgctctatgagagagaatgaggcatatcaagcatcttgcaaagaaagattcttcagtgaggaggagaatggaggtattgataggcatgtatggcctcctttatcaggacttcctcctcttagtaaaatgtctctcaacaaggacctgcattttaacacttccattgctaacttggtcattcttcgtgggaaagatgtgcaaagtgcagatgtggagggatttaaagatccagctctgtatacttcctggttgaagcctgttaatgctttcaacgtgtggaaaacccagcgggcctttagcaaatatgagaagtctgcagtgttggtcagcaacagccagttcttagtaaaaccacttgatatgattgttgggaaggcatggaatatgtttgcttcaaaagcctacattcatcagtacacaaaatttggaatcgaagaagaggactttttagacagtttcacgtcattagagcaggttgttgccagttactgtaatctctgatcttgaacaatgggaaaagtataccttaaggcatttctggactaaaatattttcaatactattttctctgtaaagttttcaaagttctccatcctggctaacacggtgaaacaccgtctctaccagaaaatacaaaaaattagccaggcgcggtggcgggtgcctgtagtcccagctactcgggaggctgaggcaggagaatgacgtgaacccaggaggcggagcttgcagtgagccgagatcgcgccactgcactccagcctgggcgacagagcgagactccgtctcaaaaaaaaaaaaaaaaaaaaatgttttcaaagttccattctgttaaagtaaccacgtagaatgctgagtctattctgcatactatgcccacagaaaaggaagaaaactttttaaaatggagaatcgcatgttttcaatgaaaacattcacttggtatttcatttgtaagaaaaaaaaatggtgcttttataaagaactttggggaaacactttgctgaaatgttgggactctggaactagccaagaaaagagaatattctctttgtctacatgttcctaaatctttactccaaaacaactccaaaaacaactcacaaagcatgaaccaaactttcacagcataatttcaagctaaggaattgtaattctgtacttaatatattcatgtttgaaatgaatgctttgaaccacaggagggagatgttgtcaaatgctacagtgtgaacatgtattttgaatattctgtaacagggcaagtttccactctaagcagctatttaaaaataaatatgaggattttggtaataaatgcttatgcttaagt

SEQ ID NO: 33135 - DNA, 1154 bp, Homo sapiens
  source 1..1154: mol_type = unassigned DNA
catgtcaattgtaacagtgcaacttggtcagtgtggcaatcagattggttttgaagtttttgatgctttgcttagtgactcacacagttcccagggactctgctctatgagagagaatgaggcatatcaagcatcttgcaaagaaagattcttcagtgaggaggagaatggagttccaattgcccgggctgttcttgttgacatggaacccaaagttatcaatcaaatgctgtcaaaggctgcccagtctggccaatggaaatatggtcaacatgcatgcttctgtcaaaaacaaggttctggaaacaactgggcatatggttactctgttcatggacccaggcatgaagaatctataatgaacataatccggaaggaagtggagaaatgtgactctttcagtggttttttcatcataatgagtatggctgggggcacaggatcaggattaggagctttcgttacacagaatttagaagatcagtactcaaactcattgaaaatgaatcagattatttggccttatggaactggtgaggttattgttcaaaactacaactccattttgacactttctcacttgtaccgatcttcagacgccctccttcttcatgagaatgatgccatccataagatctgtgcaaaactgatgaatatcaagcagatctcctttagtgatatcaatcaagtcctcgcacatcagctgggaagtgtgttccagcctacttattctgcagaaagctcatttcactacagacgaaatccactagagggatttaaagatccagctctgtatacttcctggttgaagcctgttaatgctttcaacgtgtggaaaacccagcgggcctttagcaaatatgagaagtctgcagtgttggtcagcaacagccagttcttagtaaaaccacttgatatgattgttgggaaggcatggaatatgtttgcttcaaaagcctacattcatcagtacacaaaatttggaatcgaagaagaggactttttagacagtttcacgtcattagagcaggttgttgccagttactgtaatctctgatcttgaacaatgggaaaagtataccttaaggcatttctggactaaaatattttcaatactattttctctgtaaagttttcaaagttctccatcctgg

SEQ ID NO: 33136 - DNA, 1680 bp, Homo sapiens
  source 1..1680: mol_type = unassigned DNA
atctttctgaataggaaaaaatatatacacaacaaaactctccgtttatggaacatgcgcatttgttctcagtaagtttttcgttttgaaagtgagcatgcgcatggtgagtaggttggtccgaagtttgaaccggacagaagcgctggtcggcgtctggcggttgtttttagaggtaatacacctagtttgtggctcagcatgtcaattgtaacagtgcaacttggtcagtgtggcaatcagattggttttgaagtttttgatgctttgcttagtgactcacacagttcccagggactctgctctatgagagagaatgaggcatatcaagcatcttgcaaagaaagattcttcagtgaggaggagaatggagttccaattgcccgggctgttcttgttgacatggaacccaaagttatcaatcaaatgctgtcaaaggctgcccagtctggccaatggaaatatggtcaacatgcatgcttctgtcaaaaacaaggttctggaaacaactgggcatatggttactctgttcatggacccaggcatgaagaatctataatgaacataatccggaaggaagtggagaaatgtgactctttcagtggttttttcatcataatgagtatggctgggggcacaggatcaggattaggagctttcgttacacagaatttagaagatcagtactcaaactcattgaaaatgaatcagattatttggccttatggaactggtgaggttattgttcaaaactacaactccattttgacactttctcacttgtaccgatcttcagacgccctccttcttcatgagaatgatgccatccataagatctgtgcaaaactgatgaatatcaagcagatctcctttagtgatatcaatcaagtcctcgcacatcagctgggaagtgtgttccagcctacttattctgcagaaagctcatttcactacagacgaaatccactaggagacttaatggagcatttagttccccatcctgaattcaagatgctgagtgttcgtaacattcctcacatgtctgagaattcattggcatacaccacatttacttgggctggcctcctcaagcatttgagacagatgctcatttctaatgcaaagatggaagaaggtattgataggcatgtatggcctcctttatcaggacttcctcctcttagtaaaatgtctctcaacaaggacctgcattttaacacttccattgctaacttggtcattcttcgtgggaaagatgtgcaaagtgcagatgtgggtaagaaattcagagcctacattcatcagtacacaaaatttggaatcgaagaagaggactttttagacagtttcacgtcattagagcaggttgttgccagttactgtaatctctgatcttgaacaatgggaaaagtataccttaaggcatttctggactaaaatattttcaatactattttctctgtaaagttttcaaagttctccatcctggctaacacggtgaaacaccgtctctaccagaaaatacaaaaaattagccaggcgcggtggcgggtgcctgtagtcccagctactcgggaggctgaggcaggagaatgacgtgaacccaggaggcggagcttgcagtgagccgagatcgcgccactgcactccagcctgggcgacagagcgagactccgtctc

SEQ ID NO: 33137 - DNA, 1027 bp, Homo sapiens
  source 1..1027: mol_type = unassigned DNA
gaagttcgtaaattgaaattgaacatgcgtaattaatctttctgaataggaaaaaatatatacacaacaaaactctccgtttatggaacatgcgcatttgttctcagtaagtttttcgttttgaaagtgagcatgcgcatggtgagtaggttggtccgaagtttgaaccggacagaagcgctggtcggcgtctggcggttattgttcaaaactacaactccattttgacactttctcacttgtaccgatcttcagacgccctccttcttcatgagaatgatgccatccataagatctgtgcaaaactgatgaatatcaagcagatctcctttagtgatatcaatcaagtcctcgcacatcagctgggaagtgtgttccagcctacttattctgcagaaagctcatttcactacagacgaaatccactaggagacttaatggagcatttagttccccatcctgaattcaagatgctgagtgttcgtaacattcctcacatgtctgagaattcattggcatacaccacatttacttgggctggcctcctcaagcatttgagacagatgctcatttctaatgcaaagatggaagaaggtattgataggcatgtatggcctcctttatcaggacttcctcctcttagtaaaatgtctctcaacaaggacctgcattttaacacttccattgctaacttggtcattcttcgtgggaaagatgtgcaaagtgcagatgtggagggatttaaagatccagctctgtatacttcctggttgaagcctgttaatgctttcaacgtgtggaaaacccagcgggcctttagcaaatatgagaagtctgcagtgttggtcagcaacagccagttcttagtaaaaccacttgatatgattgttgggaaggcatggaatatgtttgcttcaaaagcctacattcatcagtacacaaaatttggaatcgaagaagaggactttttagacagtttcacgtcattagagcaggttgttgccagttactgtaatctctgatcttg

SEQ ID NO: 33138 - DNA, 1577 bp, Homo sapiens
  source 1..1577: mol_type = unassigned DNA
attgtcagctggagcgttcggtggacagtgagcatgcgtaccatatctgaagttcgtaaattgaaattgaacatgcgtaattaatctttctgaataggaaaaaatatatacacaacaaaactctccgtttatggaacatgcgcatttgttctcagtaagtttttcgttttgaaagtgagcatgcgcatggtgagtaggttggtccgaagtttgaaccggacagaagcgctggtcggcgtctggcggttgtttttagaggtaatacacctagtttgtggctcagcatgtcaattgtaacagtgcaacttggtcagtgtggcaatcagattggttttgaagtttttgatgctttgcttagtgactcacacagttcccagggactctgctctatgagagagaatgaggcatatcaagcatcttgcaaagaaagattcttcagtgaggaggagaatggagttccaattgcccgggctgttcttgttgacatggaacccaaagttatcaatcaaatgctgtcaaaggctgcccagtctggccaatggaaatatggtcaacatgcatgcttctgtcaaaaacaaggttctggaaacaactgggcatatggtagagacaaggattcagcatgttacccagactggtctggaactcctggcctccagtgatccacctgcctcggcctcccaaagtgctgagattacagttactctgttcatggacccaggcatgaagaatctataatgaacataatccggaaggaagtggagaaatgtgactctttcagtggttttttcatcataatgagtatggctgggggcacaggatcaggattaggagctttcgttacacagaatttagaagatcagtactcaaactcattgaaaatgaatcagattatttggccttatggaactggtgaggttattgttcaaaactacaactccattttgacactttctcacttgtaccgatcttcagacgccctccttcttcatgagaatgatgccatccataagatctgtgcaaaactgatgaatatcaagcagatctcctttagtgatatcaatcaagtcctcgcacatcagctgggaagtgtgttccagcctacttattctgcagaaagctcatttcactacagacgaaatccactaggtattgataggcatgtatggcctcctttatcaggacttcctcctcttagtaaaatgtctctcaacaaggacctgcattttaacacttccattgctaacttggtcattcttcgtgggaaagatgtgcaaagtgcagatgtggagggatttaaagatccagctctgtatacttcctggttgaagcctgttaatgctttcaacgtgtggaaaacccagcgggcctttagcaaatatgagaagtctgcagtgttggtcagcaacagccagttcttagtaaaaccacttgatatgattgttgggaaggcatggaatatgtttgcttcaaaagcctacattcatcagtacacaaaatttggaatcgaagaagaggactttttagacagtttcacgtcattagagcaggttgttgccagttactgtaatctctga

SEQ ID NO: 33139 - DNA, 726 bp, Homo sapiens
  source 1..726: mol_type = unassigned DNA
agcggccgcgggctagcaagctcccggagccggcggcgcaccaccatgacccagtcggtggtcgtacaggtcggccagtgcggaaaccagatcggctgctgcttctgggacctggcactaagggagcacgccgcggtcaaccagaaaggaatttatgatgaggcaataagcagcttctttagaaatgtggacaccagagtggttggtgatggtggaagtatttccaagggaaaaatatgttctttaaaagcacgagcagtcttgattgatatggaagaaggggtagtgaatgaaattctgcagggaccactgagagatgtatttgatacgaaacagctcatcactgatatttctggctcaggaaataattgggccgtgggtcacaaagttttcggcagtctttaccaagaccagattttagagaaattcagaaagtcggcagagcactgtgattgcttgcagtgtttctttataatacattccatgggaggaggtaaaatttttcactcatttgcctgtaacagtgttaaaggataagtgggaattcattttgcaaacgtaagtcttgtttttagacctgtgcttgataaagatagaactattcggagggtgtgtagtttgagtatataaacatacacctttttatcttaaaattttgtggaattatgtcactattttcttttcttttctttttttttttttttaatgtaagccctcttaagagtc

SEQ ID NO: 33140 - DNA, 2050 bp, Homo sapiens
  source 1..2050: mol_type = unassigned DNA
atggaatcagaccaaaggaaagtggttggtgatggtggaagtatttccaagggaaaaatatgttctttaaaagcacgagcagtcttgattgatatggaagaaggggtagtgaatgaaattctgcagggaccactgagagatgtatttgatacgaaacagctcatcactgatatttctggctcaggaaataattgggccgtgggtcacaaagttttcggcagtctttaccaagaccagattttagagaaattcagaaagtcggcagagcactgtgattgcttgcagtgtttctttataatacattccatgggaggaggaacaggatctggacttggcacatttcttttaaaggtgcttgaagacgaattcccagaagtatacagatttgtgacttccatttatccttctggtgaggatgatgtcataacctcaccttataatagcatcttggcaatgaaggaacttaatgagcatgcagactgtgtattgcccattgacaatcaatctttatttgacatcattagcaaaatcgacctcatggtgaattctggaaagttgggtacaactgtgaagccaaagagtctggttacttcaagttctggggctttaaaaaagcagcataagaagccctttgatgcaatgaataacattgtggcaaatttgctcctcaacctaacgagctctgcaagatttgaagggtcccttaatatggaccttaatgaaatcagcatgaatttagttccttttcctcaacttcattatctcgtgtcaagcctaacacctctgtatacactgacagatgttaacattcctcctagaagattggatcagatgttttcagatgcctttagtaaagatcaccagctgcttcgggcagaccccaaacacagtctttacctcgcctgtgcactcatggttagaggaaatgtacaaatttcagatcttcgtagaaatattgaaagattaaaaccatctctacaatttgtctcctggaatcaagaaggctggaagaccagcctgtgttccgtacctcctgtgggccattctcattcgttattagctttagcaaataacacatgtgtgaagcccaccttcatggaactgaaagagagattcatgaggctctacaagaaaaaggctcaccttcatcactatctacaagttgaagggatggaagaaagctgtttcacagaagctgtgtcatctttatcagcactcatacaggaatatgaccaactggacgccacaaaaaacatgcctgtgcaggatttacccagactaagcatagctatgtgaaaaagaaaccctcaaaaatactttcttaatttcacattgttttttctgacctttctgtttcaacatttttgtaatttggaaactccagttttttcatattatcgggaaatatttttgtctaaaagagtgatttctgtttaatcgcaatttgttggtaataccaatgtgtgaaattagtgaaatcttagtaccttaacttcaaacatttctcttcagaaaagttcccttttctaaaattgagataacatagttcttgaatattttgctgtatttatagcctcatatttaggcatttatgcactgatgtgtcttcaataaaaatcttgtacagatatatttttataattatttataatttatattttgatattctatttaagttatcctgattctttaaaagtagttattgggagtagaagaacacaatataaatatttccgtgtaatagccaccaacttttcaggcataggttttattacaactgttaaggaggttttgcttcttctttagataacaacttgtttgcccaaaagaatcctaatttgtacacttaacatgtatttgtattaaactttttaaataattgctttcttatcaaaccaattgattttataataaatgtctatatttttcaacagtgctacttgttattgttctgcatgacatttatgcaaatgaacagaatgttactaagcttgatatcttccaaactttgcaataaatggctataattgttccggttactataatcttc

SEQ ID NO: 33141 - DNA, 2142 bp, Homo sapiens
  source 1..2142: mol_type = unassigned DNA
ctctagcagagcgccgttgctgggggaatgcagaagcggccgcgggctagcaagctcccggagccggcggcgcaccaccatgacccagtcggtggtcgtacaggtcggccagtgcggaaaccagatcggctgctgcttctgggacctggcactaagggagcacgccgcggtcaaccagaaaggaatttatgatgaggcaataagcagcttctttagaaatgtggacaccagagtggttggtgatggtggaagtatttccaagggaaaaatatgttctttaaaagcacgagcagtcttgattgatatggaagaaggggtagtgaatgaaattctgcagggaccactgagagatgtatttgatacgaaacagctcatcactgatatttctggctcaggaaataattgggccgtgggtcacaaagttttcggcagtctttaccaagaccagattttagagaaattcagaaagtcggcagagcactgtgattgcttgcagtgtttctttataatacattccatgggaggaggaacaggatctggacttggcacatttcttttaaaggtgcttgaagacgaattcccagaagtatacagatttgtgacttccatttatccttctggtgaggatgatgtcataacctcaccttataatagcatcttggcaatgaaggaacttaatgagcatgcagactgtgtattgcccattgacaatcaatctttatttgacatcattagcaaaatcgacctcatggtgaattctggaaagttgggtacaactgtgaagccaaagagtctggttacttcaagttctggggctttaaaaaagcagcataagaagccctttgatgcaatgaataacattgtggcaaatttgctcctcaacctaacgagctctgcaagatttgaagggtcccttaatatggaccttaatgaaatcagcatgaatttagttccttttcctcaacttcattatctcgtgtcaagcctaacacctctgtatacactgacagatgttaacattcctcctagaagattggatcagatgttttcagatgcctttagtaaagatcaccagctgcttcgggcagaccccaaacacagtctttacctcgcctgtgcactcatggttagaggaaatgtacaaatttcagatcttcgtagaaatattgaaagattaaaaccatctctacaatttgtctcctggaatcaagaaggctggaagaccagcctgtgttccgtacctcctgtgggccattctcattcgttattagctttagcaaataacacatgtgtgaagcccaccttcatggaactgaaagagagattcatgaggctctacaagaaaaaggctcaccttcatcactatctacaagttgaagggatggaagaaagctgtttcacagaagctgtgtcatctttatcagcactcatacaggaatatgaccaactggacgccacaaaaaacatgcctgtgcaggatttacccagactaagcatagctatgtgaaaaagaaaccctcaaaaatactttcttaatttcacattgttttttctgacctttctgtttcaacatttttgtaatttggaaactccagttttttcatattatcgggaaatatttttgtctaaaagagtgatttctgtttaatcgcaatttgttggtaataccaatgtgtgaaattagtgaaatcttagtaccttaacttcaaacatttctcttcagaaaagttcccttttctaaaattgagataacatagttcttgaatattttgctgtatttatagcctcatatttaggcatttatgcactgatgtgtcttcaataaaaatcttgtacagatatatttttataattatttataatttatattttgatattctatttaagttatcctgattctttaaaagtagttattgggagtagaagaacacaatataaatatttccgtgtaatagccaccaacttttcaggcataggttttattacaactgttaaggaggttttgcttcttctttagataacaacttgtttgcccaaaagaatcctaatttgtacacttaacatgtatttgtattaaactttttaaataattgctttcttatcaaaccaattgattttataataaatgtctatatttttcaa

SEQ ID NO: 33142 - DNA, 625 bp, Homo sapiens
  source 1..625: mol_type = unassigned DNA
ggtgaccatggaatcagaccaaaggaaagtggttggtgatggtggaagtatttccaagggaaaaatatgttctttaaaagcacgagcagtcttgattgatatggaagaaggggtagtgaatgaaattctgcagggaccactgagagatgtatttgatacgaaacagctcatcactgatatttctggctcaggaaataattgggccgtgggtcacaaagttttcggcagtctttaccaagaccagattttagagaaattcagaaagtcggcagagcactgtgattgcttgcagtgtttctttataatacattccatgggaggaggaacaggatctggacttggcacatttcttttaaaggtgcttgaagacgaattcccagaagtatacagatttgtgacttccatttatccttctggtgaggatgatgtcataacctcaccttataatagcatcttggcaatgaaggaacttaatgagcatgcagactgtgtattgcccattgacaatcaatctttatttgacatcattagcaaaatcgacctcatggtgaattctggaaagttgggtacaactgtgaagccaaagagtctggttacttcaagttctggggctttaaaaaagcag

SEQ ID NO: 33143 - DNA, 1949 bp, Homo sapiens
  source 1..1949: mol_type = unassigned DNA
acaacatccggggccgtggcccgacaagtcacaataacagcaactgcgcagatgcgcgattcggcgggggaggtggcttcgcaccacagcgcgcttgcgcgcaggcccaagcaggcgcccacccagaggggagggaggacgccgtaccccgccctcactgaggcgcggagccggatccggaggcgccgagccgcatccggagccgcgcacgcgcaatctgcatgaacgaaggccagtgcttaaagacgtgccattcattgccagaactcgattctcattggagcggaggaagttcgtgggtggagctggttgtttggcgcctgcgtcttgcggcgagcgggctggcgtgcggcgccgttgcgggcgggagcggctgcaacgccggtgcctgaggagcgatgccgagggaaatcatcaccctacagttgggccagtgcggcaatcagattgggttcgagttctggaaacagctgtgcgccgagcatggtatcagccccgagggcatcgtggaggagttcgccaccgagggcactgaccgcaaggacgtctttttctaccaggcagacgatgagcactacatcccccgggccgtgctgctggacttggaaccccgggtgatccactccatcctcaactccccctatgccaagctctacaacccagagaacatctacctgtcggaacatggaggaggagctggcaacaactgggccagcggattctcccagggagaaaagatccatgaggacatttttgacatcatagaccgggaggcagatggtagtgacagtctagagggctttgtgctgtgtcactccattgctggggggacaggctctggactgggttcctacctcttagaacggctgaatgacaggtatcctaagaagctggtgcagacatactcagtgtttcccaaccaggacgagatgagcgatgtggtggtccagccttacaattcactcctcacactcaagaggctgacgcagaatgcagactgtgtggtggtgctggacaacacagccctgaaccggattgccacagaccgcctgcacatccagaacccatccttctcccagatcaaccagctggtgtctaccatcatgtcagccagcaccaccaccctgcgctaccctggctacatgaacaatgacctcatcggcctcatcgcctcgctcattcccaccccacggctccacttcctcatgaccggctacacccctctcactacggaccagtcagtggccagcgtgaggaagaccacggtcctggatgtcatgaggcggctgctgcagcccaagaacgtgatggtgtccacaggccgagaccgccagaccaaccactgctacatcgccatcctcaacatcatccagggagaggtggaccccacccaggtccacaagagcttgcagaggatccgggaacgcaagttggccaacttcatcccgtggggccccgccagcatccaggtggccctgtcgaggaagtctccctacctgccctcggcccaccgggtcagcgggctcatgatggccaaccacaccagcatctcctcgctcttcgagagaacctgtcgccagtatgacaagctgcgtaagcgggaggccttcctggagcagttccgcaaggaggacatgttcaaggacaactttgatgagatggacacatccagggagattgtgcagcagctcatcgatgagtaccatgcggccacacggccagactacatctcctggggcacccaggagcagtgagtcccccaggacagggaccctcatctgccttactggttggcccaagccctgcctgactgaccaccccctcagagcacagatcagggacctcacgcatctctttctcatatacatggactctctgttggcctgcaaacacatttacttctcctcttatgagactatttatctttaataaagcactggatataaatc

SEQ ID NO: 33144 - DNA, 1815 bp, Homo sapiens
  source 1..1815: mol_type = unassigned DNA
aggagcgggcgtggcctgactctgcgcctgtgcggaattccagctgcgactgctgagggagaaaatgatgcccaggttgggctccccggcccaccggccgaggagaggcctgcgctgcacacgcgcagaccgagcatccgcgtcaagaggcgaagagagcgcgcgctccccacgtcctgcgctcctggctgccgggcattcgtctcagccgtgactctcgccaggccggggctggcgcgcccacgtctgaagagcgatgccccgggagatcatcaccctgcagctgggccagtgcggcaaccagattgggttcgagttctggaaacagctgtgcgccgagcatggtatcagccccgagggcatcgtggaggaattcgccaccgagggcactgaccgcaaggacgtctttttctaccaggcagacgatgagcactacatcccccgggccgtgctgctggacttggaaccccgggtgatccactccatcctcaactccccctatgccaagctctacaacccagagaacatctacctgtcggaacatggaggaggagctggcaacaactgggccagcggattctcccagggtgagaaaattcatgaagacatctttgacatcatagaccgagaagcagatggaagtgacagtttggagggcttcgtgctgtgtcactccatcgctgggggtacgggttctggcctgggctcctacctcctggagcgactgaatgacaggtaccccaagaagctagtgcagacttattcagtgtttccctaccaggacgagatgagcgacgtagtggttcagccctacaattcactcctgacactcaagaggctgacgcagaacgcagattgtgtggtggtgctggacaacacagccctgaaccggattgccacagaccgcctgcacatccagaacccgtccttctcccagatcaaccagctggtgtccaccatcatgtcggccagcaccaccaccctgcgctaccccggctacatgaacaatgacctcatcggcctcatcgcctcgctcattcccaccccacggctccacttcctcatgaccggctacaccccgctcactacagaccagtcagtggccagcgtgaggaagaccacggtcctggatgtcatgaggcggctgctgcagcccaagaacgtgatggtgtccacaggccgagaccgccagaccaaccactgctacatcgccatcctcaacatcatccagggagaggtggaccccacccaggtccacaagagcctgcagaggatccgggaacggaagttggccaacttcatcccgtggggccccgccagcatccaggtggccctgtcgaggaagtctccctacctgccctcggcccaccgggtcagcgggctcatgatggccaaccacaccagcatctcctcgctctttgaaagttcctgccagcagtttgacaagctgcggaagcgggatgccttcctcgagcagttccgtaaggaggacatgttcaaggacaactttgatgagatggacaggtctagggaggttgttcaggagctcattgatgagtaccatgcggccacccagccagactacatttcctggggcacccaggagcagtgatttccctccccactactccttctccttctagatggtaaccacagcctcgaccatgcctgctccctctgacccagcttcacctcatggacaacccttcttggttcatctccagcccgtgagctggtcctgcttcctcccttccatgccctaacttttaatatgcttgttcagctctaataaagtaataaagcttggttgtcagt

SEQ ID NO: 33145 - DNA, 3067 bp, Homo sapiens
  source 1..3067: mol_type = unassigned DNA
ccgggcgggagtagctggtggaccccgttgagctgccgaacttccgggactcccccgcgaccccttcccagcttcccgtccgctccgccgcagcgattgtctcggtgggttgattcggcacaaaccgcccgacccaggggccggtgcgcgtgtggaaggggaagcactcccctcgtggtcgcctggaggtgcgctggaggagggggtgacataaccagggactcgaggtccgccgtgggaatgatccacgaactgctcttggctctgagcgggtaccctgggtccattttcacctggaacaagcggagtggcctgcaggtatcgcaggacttccctttcctccaccccagtgagaccagtgtcctgaatcgactctgccggctcggcacagactatattcgcttcactgagttcattgaacagtacacgggccatgtgcaacagcaggatcaccatccatctcaacagggccaaggtgggttacatggaatctacctgcgggccttctgcacagggctggattctgttttgcagccttatcgccaagcactgcttgatttggaacaagagttcctgggtgatccccatctctccatatcacatgtcaactacttcctagaccagttccagcttctttttccctctgtgatggttgtagtagaacaaattaaaagtcaaaagattcatggttgtcaaatcctggaaacagtctacaaacacagctgtggggggttgcctcctgttcgaagtgcactggaaaaaatcctggccgtttgtcatggggtcatgtataaacagctctcagcctggatgctccatggactcctcttggaccagcatgaagaattctttatcaaacaggggccatcttctggtaatgtcagtgcccagccagaagaggacgaggaggatctgggcattgggggactgacaggaaaacaactgagagaactgcaggacttgcgcctgattgaggaagagaacatgctggcaccatctctgaagcagttttccctacgagtggagattttgccatcctacattccagtgagggttgctgaaaaaatcctatttgttggagaatctgtccagatgtttgagaatcaaaatgtgaacctgactagaaaaggatccattttgaaaaaccaggaagacacttttgctgcagagctgcaccgtctcaagcagcagccactcttcagcttggtggactttgaacaggtggtggatcgcattcgcagcactgtggctgagcatctctggaagttgatggtagaagaatccgatttactgggtcagctgaagatcattaaagacttttaccttctgggacgtggagaactgtttcaggccttcattgacacagctcaacacatgttgaaaacaccacccactgcagtaactgagcatgatgtgaatgtggcctttcaacagtcagcacacaaggtattgctagatgatgacaaccttctccctctgttgcacttgacaatcgagtatcacggaaaggagcacaaagatgctactcaggcaagagaagggccttctcgggaaacttctccccgggaagcccctgcatctggctgggcagccctaggtctttcctacaaagtacagtggccactacatattctcttcaccccagctgtcctggaaaagtacaatgttgtttttaagtacttactgagtgtgcgccgggtgcaagctgagctgcagcactgctgggccctacaaatgcagcgcaagcacctcaagtcgaaccagactgatgcaatcaagtggcgcctaagaaatcacatggcatttttggtggataatcttcagtactatctccaggtagatgtgttggagtctcagttctcccagctgcttcatcagatcaattctacccgagactttgaaagcatccgattggctcatgaccacttcctgagcaatttgctggctcaatcctttatcctattgaaacctgtgtttcactgcctgaatgaaatcctagatctctgtcacagtttttgttcgctggtcagtcagaacctaggcccactggatgagcgtggagccgcccagctgagcattctcgtgaagggctttagccgccagtcttcactcctgttcaagattctctccagtgttcggaatcatcagatcaactcagatttggctcaactactgttacgactagattataacaaatactatacccaggctggtggaactctgggcagtttcgggatgtgaaaatttctggctcataaattgaaataacagccacgttcccaaggttgtaacagaagattcaaaacatcccattctagccacacacaaataaatatctgcggcttagtgataggactctaccttttctcctagaagcagttactgaacatccaggagtacaactccttcccatcattcccatgtggaagggtctctcccatcaaggagaacatgtggcatctctgatcctttacattgagaacatttgttggatatgttcatttattcaatagtcatttattgagcacctactacgtaccttggtactgttcaagctgtgggagatacagcggtaaacaaacaatatagagcagaaagttaaatattttatggttcatatgtgaaaaagtaattatgtttataaatagactaactgctggatgttaccaccaagtaagaaagcaacaggtaagataggctttctctctccctataccaagtaatttatacctacacagattgggcaattctagctaatgaaaatatacttaaaagtatttcttaggccgggcatggtggctcacacctgtaatcccagcactttgggaggccgaggcgggcggatcacctgaagtcaggagtttgagaccagcctgaccaacatgatgaaacctcgattctactaaaaatacaaaaattagccaggtgtggtggcatgtgcctgtaatcccagctactcaggaggctgagacaggagaattgcttgaacctgggaagcagacgctgcagtgagctgagattgtgccattgcattccagcccgggcaacaagagcgaaattccgtctc

SEQ ID NO: 33146 - DNA, 1927 bp, Homo sapiens
  source 1..1927: mol_type = unassigned DNA
atggaatctacctgcgggccttctgcacagggctggattctgttttgcagccttatcgccaagcactgcttgatttggaacaagagttcctgggtgatccccatctctccatatcacatgtcaactacttcctagaccagttccagcttctttttccctctgtgatggttgtagtagaacaaattaaaagtcaaaagattcatggttgtcaaatcctggaaacagtctacaaacacagctgtggggggttgcctcctgttcgaagtgcactggaaaaaatcctggccgtttgtcatggggtcatgtataaacagctctcagcctggatgctccatggactcctcttggaccagcatgaagaattctttatcaaacaggggccatcttctggtaatgtcagtgcccagccagaagaggacgaggaggatctgggcattgggggactgacaggaaaacaactgagagaactgcaggacttgcgcctgattgaggaagagaacatgctggcaccatctctgaagcagttttccctacgagtggagattttgccatcctacattccagtgagggttgctgaaaaaatcctatttgttggagaatctgtccagatgtttgagaatcaaaatgtgaacctgactagaaaaggatccattttgaaaaaccaggaagacacttttgctgcagagctgcaccgtctcaagcagcagccactcttcagcttggtggactttgaacaggtggtggatcgcattcgcagcactgtggctgagcatctctggaagttgatggtagaagaatccgatttactgggtcagctgaagatcattaaagacttttaccttctgggacgtggagaactgtttcaggccttcattgacacagctcaacacatgttgaaaacaccacccactgcagtaactgagcatgatgtgaatgtggcctttcaacagtcagcacacaaggtattgctagatgatgacaaccttctccctctgttgcacttgacaatcgagtatcacggaaaggagcacaaagcagatgctactcaggcaagagaagggccttctcgggaaacttctccccgggaagcccctgcatctggctgggcagccctaggtctttcctacaaagtacagtggccactacatattctcttcaccccagctgtcctggaaaaaaatagacaattttaaaaaccaaacagaatgggactgtcttctgcaagcctacctacaaacaggtacaatgttgtttttaagtacttactgagtgtgcgccgggtgcaagctgagctgcagcactgctgggccctacaaatgcagcgcaagcacctcaagtcgaaccagactgatgcaatcaagtggcgcctaagaaatcacatggcatttttggtggataatcttcagtactatctccaggtagatgtgttggagtctcagttctcccagctgcttcatcagatcaattctacccgagactttgaaagcatccgattggctcatgaccacttcctgagcaatttgctggctcaatcctttatcctattgaaacctgtgtttcactgcctgaatgaaatcctagatctctgtcacagtttttgttcgctggtcagtcagaacctaggcccactggatgagcgtggagccgcccagctgagcattctcgtgaagggctttagccgccagtcttcactcctgttcaagattctctccagtgttcggaatcatcagatcaactcagatttggctcaactactgttacgactagattataacaaatactatacccaggctggtggaactctgggcagtttcgggatgtgaaaatttctggctcataaattgaaataacagccacgttcccaaggttgtaacagaagattcaaaacatcccattctagccacacacaaataaatatctgcggctt

SEQ ID NO: 33147 - DNA, 3849 bp, Homo sapiens
  source 1..3849: mol_type = unassigned DNA
gaagtcgcccggcgcgggagcgcgaactctcgcgagaatgccgccagctccggaggcgactgcggcaggagcccgagctctcgcgcgacaggcaccaattcgttagacgcgcgctgcaggagcgcggaacatggcgcggcacgggccaccgtggagtcggttggacgcgcagcaggagcgcgacgtgcgggagctcgtccggggtgtcgccggcctccaggacgaggcagaccccaacttccagctcgccctaaacttcgcctggtccaacttcagatttcatcgtttcttggatgtcaacagccacaaaatagaaaaaacaatcgaaggaatttatgaaaaatttgtcattcattctgatctaagcaaagctgctagttggaagagattaacggaggaatttctaaatgcaccacttcccagtataaaggaaataaagacagatgcacattattccatactgtcacttcttctgtgtctgtcagactctccttcaaacagcagttatgtggagacaccaagaaataaagaagtggaaaagaaagatgatttcgactggggaaaatacttgatggaagatgaagaaatggacattggtccgtacatggacacaccaaattggtctgaagaaagtgaagaggaaaatgatcaacagcccttaagcagagaggactctggaattcaggtagacaggacaccgttagaagaacaagatcaaaacagaaaactggatccttgtatcagttggaaagatgagccagatgaccgaagctggctggaacatcatgtggtccatcagtactggacagccaggccctcccagtttcctcatagtttacatttgcactctaatttagctgctgtctgggaccaacacttgtacagcagtgatccattgtatgttccagatgacagggttttggttactgagactcaggttattcgggaaaccctatggttactttcaggagtgaaaaagctctttatatttcagttgatagatgggaaggtaactgtgagaaacaatattatagtaactcatttaacacatagctgtttacgatctgtgctggaacaaatagcagcatatggccaggttgtgtttcgactccaggagttcattgatgaagtcatgggacacagttctgagagcatgctgcctggaagtgggtctgttcctaagaagtcaactgaagctccctttagaacctaccaggctttcatgtgggccctgtacaaatatttcattagtttcaaagaggaacttgcagaaattgagaagtgcatcatcaataatgatactacaataactcttgcaatagtggtggacaagttggcacctcgattgtctcagctcaaggttctgcacaaagtgtttagtactggagtagcagaagttccacctgatactcgaaatgtcgtccgggcctctcacctgcttaacaccctgtacaaggccattcttgaatatgacaatgttggagaagcctctgagcaaaccgtctccctccttttctctctctgggtggaaacggtgcggccttacctgcagacggtggacgagtggatcgtgcacgggcacctgtgggatggcgccagggagttcatcatccagagaaacaaaaatgttccagttaatcacagagacttctggtatgcaacttacacgttatatagcgtatcagaaaagacagaaaatgaagaaaaaatgagtgataacgctagtgcgagttccggcagtgaccaggggccctccagcaggcagcacaccatggtgtccttcctcaaacctgtcctgaagcagatcataatggctggcaagtcgatgcagctgctgaagaacctgcagtgtgcggagagcaccacctgccaggcaggagccagagatgcagaaagaaaaagtttatacactctctttctggaatctgtacagtcccgtcttcgacatggagaagattccactccacaggttcttactgagcaacaggcaaccaaggagaacctgatgaagatgcagtccattgctgaaagccatcttgaactggatgatgttcatgatccactgcttgccattaactttgcaaggatgtatttggagcagagtgactttcacgagaagtttgctggtggtgatgtatgtgtggatagatcatcggaatctgtgacatgccagacttttgaattaacgctgagatcctgcctctatcctcatattgacaagcagtatctagattgctgtggaaatctcatgcaaactctaaaaaaagattacaggttggtagaatacttgcaagctatgaggaattttttcttaatggaaggaggagataccatgtatgacttctacacgtcaatttttgataaaataagagaaaaggaaacatggcagaatgtgtcttttcttaatgtccaactccaagaagcagtaggacagcgttatcctgaagatagttcacgtctatctatatcttttgaaaatgttgacacagctaagaagaagctgcctgttcatatcttagatggtctgaccctcagctacaaggtcccatggcccgtggacattgttataagtttggaatgtcaaaaaatttataatcaagtgtttcttctcttattgcaaataaagtgggcaaaatatagtctggatgttttactttttggtgaactggttagtactgcagaaaaaccacgacttaaagaaggccttatacatgaacaagacacagttgctcagttcggaccacaaaaagaaccagtaagacagcagattcatcgcatgttcctcttaagagtgaagctcatgcatttcgtgaacagcttgcacaactacatcatgaccaggattctacacagtacagggctggagtttcaacatcaagtcgaggaagccaaggatttagatcaattgattaaaattcactataggtatctgtcaaccatccatgaccggtgtctgctgagagaaaaggtcagctttgtgaaagaagctatcatgaaggtgttgaacttggctctcatgtttgcagacggttggcaggcaggcctgggcacttggcgaatggaatctatagagaaaatggaatctgattttaaaaactgccatatgtttcttgtaaccattttaaacaaagccgtctgtagaggatcctttccccatttggaatctctagcgttgtcactcatggctggcatggaacaaagttaaatgtcttcagcgtaataaatatctccgactttgtcatcatacatgtacatttccaccatgtgcagctgaaaagtgaaaatatttttattttggtttatttgtaaaacttgtccacagtcagcctggcacagtcgctcatgcctctaatcccagcacgatgggaggccaagacaggcagatcacttgagcccaggagtttgaggccagcctgggcaacatggtgaaacccggtgtctaccaaaaatacaaaatgtatccagacatggtggtgtgtacctgtagtcccagctactcaggaggcaaagatgggaggattacttgagcccaggaggtcaaggctacagtgagccatgattgcactactgcagtgcaacctgggtgacagagtgagaccctgactcagaaagaaccacttgcccacagtccagacagatggattgtaggtgggttttctggagattagtagatactgtatagagttgtatacataaaattgtgtcagtagtacaaagtgtatataggctgtttactcttacatttcctactgtaagatacagatttatggtactgatacctttaaattatatcatattttgaaaatgtaattactgatattcaaaataaattaaaggacttaaaatcat

SEQ ID NO: 33148 - DNA, 3341 bp, Homo sapiens
  source 1..3341: mol_type = unassigned DNA
gttagacgcgcgctgcaggagcgcggaacatggcgcggcacgggccaccgtggagtcggttggacgcgcagcaggagcgcgacgtgcgggagctcgtccggggtgtcgccggcctccaggacgaggcagaccccaacttccagctcgccctaaacttcgcctggtccaacttcagatttcatcgtttcttggatgtcaacagccacaaaatagaaaaaacaatcgaaggaatttatgaaaaatttgtcattcattctgatctaagcaaagctgctagttggaagagattaacggaggaatttctaaatgcaccacttcccagtataaaggaaataaagacagatgcacattattccatactgtcacttcttctgtgtctgtcagactctccttcaaacagcagttatgtggagacaccaagaaataaagaagtggaaaagaaagatgatttcgactggggaaaatacttgatggaagatgaagaaatggacattggtccgtacatggacacaccaaattggtctgaagaaagtgaagaggaaaatgatcaacagcccttaagcagagaggactctggaattcaggtagacaggacaccgttagaagaacaagatcaaaacagaaaactggatccttgtatcagttggaaagatgagccagatgaccgaagctggctggaacatcatgtggtccatcagtactggacagccaggccctcccagtttcctcatagtttacatttgcactctaatttagctgctgtctgggaccaacacttgtacagcagtgatccattgtatgttccagatgacagggttttggttactgagactcaggttattcgggaaaccctatggttactttcaggagtgaaaaagctctttatatttcagttgatagatgggaaggtaactgtgagaaacaatattatagtaactcatttaacacatagctgtttacgatctgtgctggaacaaatagcagcatatggccaggttgtgtttcgactccaggagttcattgatgaagtcatgggacacagttctgagagcatgctgcctggaagtgggtctgttcctaagaagtcaactgaagctccctttagaacctaccaggctttcatgtgggccctgtacaaatatttcattagtttcaaagaggaacttgcagaaattgagaagtgcatcatcaataatgatactacaataactcttgcaatagtggtggacaagttggcacctcgattgtctcagctcaaggttctgcacaaagtgtttagtactggagtagcagaagttccacctgatactcgaaatgtcgtccgggcctctcacctgcttaacaccctgtacaaggccattcttgaatatgacaatgttggagaagcctctgagcaaaccgtctccctccttttctctctctgggtggaaacggtgcggccttacctgcagacggtggacgagtggatcgtgcacgggcacctgtgggatggcgccagggagttcatcatccagagaaacaaaaatgttccagttaatcacagagacttctggtatgcaacttacacgttatatagcgtatcagaaaagacagaaaatgaagaaaaaatgagtgataacgctagtgcgagttccggcagtgaccaggggccctccagcaggcagcacaccatggtgtccttcctcaaacctgtcctgaagcagatcataatggctggcaagtcgatgcagctgctgaagaacctgcagtgtgcggagagcaccacctgccaggcaggagccagagatgcagaaagaaaaagtttatacactctctttctggaatctgtacagtcccgtcttcgacatggagaagattccactccacaggttcttactgagcaacaggcaaccaaggagaacctgatgaagatgcagtccattgctgaaagccatcttgaactggatgatgttcatgatccactgcttgccattaactttgcaaggatgtatttggagcagagtgactttcacgagaagtttgctggtggtgatgtatgtgtggatagatcatcggaatctgtgacatgccagacttttgaattaacgctgagatcctgcctctatcctcatattgacaagcagtatctagattgctgtggaaatctcatgcaaactctaaaaaaagattacaggttggtagaatacttgcaagctatgaggaattttttcttaatggaaggaggagataccatgtatgacttctacacgtcaatttttgataaaataagagaaaaggaaacatggcagaatgtgtcttttcttaatgtccaactccaagaagcagtaggacagcgttatcctgaagatagttcacgtctatctatatcttttgaaaatgttgacacagctaagaagaagctgcctgttcatatcttagatggtctgaccctcagctacaaggtcccatggcccgtggacattgttataagtttggaatgtcaaaaaatttataatcaagtgtttcttctcttattgcaaataaagtgggcaaaatatagtctggatgttttactttttggtgaactggttagtactgcagaaaaaccacgacttaaagaaggccttatacatgaacaagacacagttgctcagttcggaccacaaaaagaaccagtaagacagcagattcatcgcatgttcctcttaagagtgaagctcatgcatttcgtgaacagcttgcacaactacatcatgaccaggattctacacagtacagggctggagtttcaacatcaagtcgaggaagccaaggatttagatcaattgattaaaattcactataggtatctgtcaaccatccatgaccggtgtctgctgagagaaaaggtcagctttgtgaaagaagctatcatgaaggtgttgaacttggctctcatgtttgcagacggttggcaggcaggcctgggcacttggcgaatggaatctatagagaaaatggaatctgattttaaaaactgccatatgtttcttgtaaccattttaaacaaagccgtctgtagaggatcctttccccattgtgagtatatcatgttaaaatatttctacctctgtatttccttgtaactaagtgtatgtgtcattgttttgttactgatcccatgaagaattagaaattctcaccattttcaaaactgaaaagtcccttagcagttgtcccatgctttgaattgctttttaagcattacggtgaggtgagtgtaagcctgaggatcttactttctggtataccatttattacaacagatttctaaaactcctattaaataaagttgatggcagaatagatttctgtcacacttc

SEQ ID NO: 33149 - DNA, 1754 bp, Homo sapiens
  source 1..1754: mol_type = unassigned DNA
gtcttaatgactagaattcaggttccaaggagaagcccacaaggctaagggtattggatataacggaaagtggaagctatacctgacttccagagaatgtggaccggatataagatcttaatcttctcttatcttactacagaaatctggatggagaagcagtatttatctcaaagagaagtggacctagaggcttatttcactaggaatcacaccgttttgcaaggtactcgattcaaaagagccattttccaagggcaatactgtagaaattttggctgttgtgaagacagagatgatggctgtgtcactgagttctatgcggcgaatgcgttgtgctactgtgataaattctgtgacagagaaaattctgattgctgtcctgactacaagtccttttgccgtgaagagaaagaatggcctcctcacacacagccttggtatccagaaggttgcttcaaagatggtcaacattatgaagagggatcagtaattaaagaaaactgcaactcctgcacatgctcaggacagcaatggaaatgttcccagcatgtatgccttgttcgttcagaattaattgaacaggtcaataaaggagactatggatggacagcacagaattacagccaattttggggaatgactttagaagatggttttaaatttcgccttggcactttgccacctagtcccatgctcctgagcatgaatgaaatgacagcttctttacctgcaacaactgatcttccagagttttttgttgcttcttataaatggcctggatggactcatggcccattggatcaaaaaaattgtgctgcatcctgggcattttccactgcaagtgtggctgctgaccgaatagcaattcagtctaagggtcgatacacggccaatctatcccctcagaatttgatctcttgctgtgccaagaaccgtcatggatgcaatagtggaagcatcgatagggcttggtggtacctgagaaaacgtggactggtatcccacgcatgctacccacttttcaaagaccaaaatgctaccaacaatggatgtgccatggcaagcaggtctgatgggcgaggaaaacggcatgccacgaagccatgtcccaacaacgtagaaaaatctaacaggatctatcaatgttctcctccatacagagtctcttccaacgaaactgagataatgaaagaaatcatgcaaaatggaccagttcaagccataatgcaagtccgtgaagatttcttccattataagacagggatatacagacatgttaccagcacaaataaagaatcagaaaaatatcgaaagcttcagacacatgcagtcaaactcactggatggggcacactgagaggagcacaagggcagaaagaaaaattttggattgctgccaattcctggggaaagtcatggggagagaatggctatttcaggattcttcgaggagtaaatgagtccgacattgaaaagttgattatcgcagcttggggccaactgacgagttctgatgaaccataacatatcattaaatttccataaggtcatgcctttaagtaaccccctaaattgaagtttagcaatatgacattcttggtgacagtggaatctttgtctcttcaccgtgttaacataatctatctattttcttattttcccctctggtctatgcttctgcttccttcatattactgagcattaacaacaccaataaaggacagcagagtccctaaatgtctttaaagttc

SEQ ID NO: 33150 - DNA, 1381 bp, Homo sapiens
  source 1..1381: mol_type = unassigned DNA
gaagtatactcattcaagtaaaggatcagtttcagggttcaggctgaagtgtcttaatgactagaattcaggttccaaggagaagcccacaaggctaagggtattggatataacggaaagtggaagctatacctgacttccagagaatgtggaccggatataagatcttaatcttctcttatcttactacagaaatctggatggagaagcagtatttatctcaaagagaagtggacctagaggcttatttcactaggaatcacaccgttttgcaaggtactcgattcaaaagagccattttccaagggcaatactgtagaaattttggctgttgtgaagacagagatgatggctgtgtcactgagttctatgcggcgaatgcgttgtgctactgtgataaattctgtgacagagaaaattctgattgctgtcctgactacaagtccttttgccgtgaagagaaagaatggcctcctcacacacagccttggtatccagaaggcagatggacagcacagaattacagccaattttggggaatgactttagaagatggttttaaatttcgccttggcactttgccacctagtcccatgctcctgagcatgaatgaaatgacaagactggtatcccacgcatgctacccacttttcaaagaccaaaatgctaccaacaatggatgtgccatggcaagcaggtctgatgggcgaggaaaacggcatgccacgaagccatgtcccaacaacgtagaaaaatctaacaggatctatcaatgttctcctccatacagagtctcttccaacgaaactgagataatgaaagaaatcatgcaaaatggaccagttcaagccataatgcaagtccgtgaagatttcttccattataagacagggatatacagacatgttaccagcacaaataaagaatcagaaaaatatcgaaagcttcagacacatgcagtcaaactcactggatggggcacactgagaggagcacaagggcagaaagaaaaattttggattgctgccaattcctggggaaagtcatggggagagaatggctatttcaggattcttcgaggagtaaatgagtccgacattgaaaagttgattatcgcagcttggggccaactgacgagttctgatgaaccataacatatcattaaatttccataaggtcatgcctttaagtaaccccctaaattgaagtttagcaatatgacattcttggtgacagtggaatctttgtctcttcaccgtgttaacataatctatctattttcttattttcccctctggtctatgcttctgcttccttcatattactgagcattaacaacaccaataaaggacagcagagtccctaaatgtctttaaagttc

SEQ ID NO: 33151 - DNA, 692 bp, Homo sapiens
  source 1..692: mol_type = unassigned DNA
taatcttctcttatcttactacagaaatctggatggagaagcagtatttatctcaaagagaagtggacctagaggcttatttcactaggaatcacaccgttttgcaaggtactcgattcaaaagagccattttccaagggcaatactgtagaaattttggctgttgtgaagacagagatgatggctgtgtcactgagttctatgcggcgaatgcgttgtgctactgtgataaattctgtgacagagaaaattctgattgctgtcctgactacaagtccttttgccgtgaagagaaagaatggcctcctcacacacagccttggtatccagaaggttgcttcaaagatggtcaacattatgaagagggatcagtaattaaagaaaactgcaactcctgcacatgctcaggacagcaatggaaatgttcccagcatgtatgccttgttcgttcagaattaattgaacaggtcaataaaggagactatggatggacagcacagaattacagccaattttggggaatgactttagaagatggttttaaatttcgccttggcactttgccacctagtcccatgctcctgagcatgaatgaaatgacagtaagtgttccttctgattcacgtatgtgcatgtatttgtaaaagtgtgtttgtgtgtgcattaaaagcaattataaatcactaaaataa

SEQ ID NO: 33152 - DNA, 1045 bp, Homo sapiens
  source 1..1045: mol_type = unassigned DNA
atgtggaccggatataagatcttaatcttctcttatcttactacagaaatctggatggagaagcagtatttatctcaaagagaagtggacctagaggcttatttcactaggaatcacaccgttttgcaaggtactcgattcaaaagagccattttccaagggcaatactgtagaaattttggctgttgtgaagacagagatgatggctgtgtcactgagttctatgcggcgaatgcgttgtgctactgtgataaattctgtgacagagaaaattctgattgctgtcctgactacaagtccttttgccgtgaagagaaagaatggcctcctcacacacagccttggtatccagaagatggacagcacagaattacagccaattttggggaatgactttagaagatggttttaaatttcgccttggcactttgccacctagtcccatgctcctgagcatgaatgaaatgacaactggtatcccacgcatgctacccacttttcaaagaccaaaatgctaccaacaatggatgtgccatggcaagcaggtctgatgggcgaggaaaacggcatgccacgaagccatgtcccaacaacgtagaaaaatctaacaggatctatcaatgttctcctccatacagagtctcttccaacgaaactgagataatgaaagaaatcatgcaaaatggaccagttcaagccataatgcaagtccgtgaagatttcttccattataagacagggatatacagacatgttaccagcacaaataaagaatcagaaaaatatcgaaagcttcagacacatgcagtcaaactcactggatggggcacactgagaggagcacaagggcagaaagaaaaattttggattgctgccaattcctggggaaagtcatggggagagaatggctatttcaggattcttcgaggagtaaatgagtccgacattgaaaagttgattatcgcagcttggggccaactgacgagttctgatgaaccataacatatcattaaatttccataaggtcatgcctttaagtaacccc

SEQ ID NO: 33153 - DNA, 782 bp, Homo sapiens
  source 1..782: mol_type = unassigned DNA
ggtaggtaaatggagtacagatgggaaatcaaaccagtgtgtgactgggcatgatttagagcaactgttattgatatgacagatcctagcaggcaacctcatgagagcctggatgttcgtttcaatgcaggcagaaatctggatggagaagcagtatttatctcaaagagaagtggacctagaggcttatttcactaggaatcacaccgttttgcaaggtactcgattcaaaagagccattttccaagggcaatactgtagaaattttggctgttgtgaagacagagatgatggctgtgtcactgagttctatgcggcgaatgcgttgtgctactgtgataaattctgtgacagagaaaattctgattgctgtcctgactacaagtccttttgccgtgaagagaaagaatggcctcctcacacacagccttggtatccagaaggttgcttcaaagatggtcaacattatgaagagggatcagtaattaaagaaaactgcaactcctgcacatgctcaggacagcaatggaaatgttcccagcatgtatgccttgttcgttcagaattaattgaacaggtcaataaaggagactatggatggacagcacagaattacagccaattttggggaatgactttagaagatggttttaaatttcgccttggcactttgccacctagtcccatgctcctgagcatgaatgaaatgacagaatgattgaatgggctggcaagatggccgatcaagaacagctctggttggcagctcccagcgagaccaa

SEQ ID NO: 33154 - DNA, 4510 bp, Homo sapiens
  source 1..4510: mol_type = unassigned DNA
gctgaggccaggagggcgcactggggattggaggcgagggaagtgcagggcgcatcccaggcggcagggctcccagcatcggcagtcgccatcaccgccagaccgcagagacaggttcggatccgcggtcctcttgcctctttccaggcctcgatgagtgttaaatcgccatttaatgtgatgtcaagaaataatttggaagcacctccttgtaagatgacagagccatttaattttgagaaaaatgaaaacaagcttccaccacatgagtctttaagaagtcctggaacacttcctaaccaccctaatttcaggctgaaaagctcagagaatggaaataaaaagaacaattttttgctttgtgagcaaaccaaacaatatttggctagtcaggaagacaattcagtttcttcaaacccgaatggcatcaacggagaagtagttggctccaaaggagacaggaaaaaattgccagcaggaaactcagtgtcaccaccaagtgctgaaagtaattcaccacccaaagaagtgaatattaagcctggaaataatgtacgtcctgcaaaatcaaaaaaactaaacaagttggtcgagaattccttgtccataagtaatccagggctcttcacctccttaggacctcctcttcggtccacaacttgccatcgctgtggcctatttggatcgctgaggtgctctcagtgcaagcagacctactattgctccacagcatgtcaaagaagagactggtctgcacacagcatcgtgtgcaggcctgttcagccaaatttccacaaacttgaaaataaatcatctattgaaacaaaggatgtggaggtaaacaataagagtgactgtccacttggagttactaaggaaatagccatttgggctgagagaataatgttttctgatttgagaagtctacaactcaagaaaaccatggaaataaagggtacggttaccgaattcaaacacccaggggacttctacgtgcagttatattcttcagaagttttagaatacatgaaccaactctctgccagcttaaaagaaacatatgcaaatgtgcatgaaaaagactatattcctgttaagggggaagtttgtattgccaagtacactgttgatcagacctggaacagagcaatcatacaaaacgttgatgtgcagcaaaagaaggcacatgtcttatatattgattatggaaatgaagaaataattccattaaacagaatttaccacctcaacaggaacattgacttgtttcctccttgtgccataaagtgctttgtagccaatgttatcccagcagaagggaattggagcagtgattgtatcaaagctactaaaccactgttaatggagcagtactgctccataaagattgtcgacatcttggaagaggaagtggttacctttgctgtagaagttgagctgccaaattcaggaaaacttttagaccatgtgcttatagaaatgggatatggcttgaaacccagtggacaagattctaagaaggaaaatgcagatcaaagtgatcctgaagatgttggaaaaatgacaactgaaaacaacattgtcgtagacaaaagtgacctaatcccaaaagtgttaactttgaatgtaggtgatgagttttgtggtgtggttgcccacattcaaacaccagaagacttcttttgtcaacaactgcaaagtggccgaaagcttgctgaacttcaggcatcccttagcaagtactgtgatcagttgcctccacgctctgatttttatccagccattggtgatatatgttgtgctcagttctcagaggatgatcagtggtaccgtgcctctgttttggcttacgcttctgaagaatctgtactggtcggatatgtagattatggaaactttgaaatccttagtttgatgagactttgtcccataatcccaaagttgttggaattgccaatgcaagctataaagtgtgtactagcaggagtaaagccatcattaggaatttggactccagaagctatttgtctcatgaaaaaacttgtacagaacaaaataatcacagtgaaagtggtggacaagttggaaaacagttccctggtggagcttattgataaatccgagacgcctcatgtcagtgttagcaaagttctcctagatgcaggctttgctgtgggagaacagagtatggtgacagataaacccagtgacgtgaaagaaaccagtgttcccttgggtgtggaaggaaaagtaaatccattggagtggacatgggttgaacttggtgttgaccaaacagtagatgttgtggtctgtgtgatatatagtcctggagaattttattgccatgtgcttaaagaggatgctttaaagaaactcaatgatttgaacaagtcattagcagaacactgccagcagaagttacctaatggtttcaaggcagagataggacaaccttgttgtgctttttttgcaggtgatggtagttggtatcgtgctttagtcaaggaaatcttaccaaatggacatgttaaagtacattttgtggattatggaaacatcgaagaagttactgcagatgaactccgaatgatatcatcaacatttttaaaccttccctttcagggaatacggtgccagttagcagatatacagtctagaaacaaacattggtctgaagaagccataacaagattccagatgtgtgttgctgggataaaattgcaagccagagtggttgaagtcactgaaaatgggataggagttgaactcaccgatctctccacttgttatcccagaataattagtgatgttctgattgatgaacatctggttttaaaatctgcttcaccacataaagacttaccaaatgacagacttgttaataaacatgagcttcaagttcatgtacagggacttcaagctacctcttcagctgagcaatggaagacgatagaattgccagtggataaaactatacaagcaaatgtattagaaatcataagcccaaacttgttttatgctctaccaaaagggatgccagaaaatcaggaaaagctgtgcatgttgacagctgaattattagaatactgcaatgctccgaaaagtcgaccaccctatagaccaagaattggagacgcatgctgtgccaaatacacaagtgatgatttttggtatcgtgcagttgttctggggacatcagacactgatgtggaagtgctctatgcagactatggaaacattgaaaccctgcctctttgcagagtgcaaccaatcacctctagccacctggcgcttcctttccaaattattagatgttcacttgaaggattaatggaattgaatggaagctcttctcaattaataataatgctattaaaaaatttcatgttgaatcagaatgtaatgctttctgtgaaaggaattacaaagaatgtccatacagtgtcagttgagaaatgttctgagaatgggactgtcgatgtagctgataagctagtgacatttggtctggcaaaaaacatcacacctcaaaggcagagtgctttaaatacagaaaagatgtataggatgaattgctgctgcacagagttacagaaacaagttgaaaaacatgaacatattcttctcttcctcttaaacaattcaaccaatcaaaataaatttattgaaatgaaaaaactgttaaaaaaaacagcatctcttggaggtaaacccttatgagacaggaaacagcaaaggctagctttaggagagaaagtacagcacctggtgtttttatttatgagaaccttttctttgtccactttctctgtaatgaccttctatccctccgtttttgcctgcctgccattctcctattaggttggtggtttttattttcctctaagttccttccaccaaataaatattacgtaaaaaattcataccaaatcaatgagaatactggcaaggaatacatagggactttctgctatatatgtaactttttattacttaaaggtaccgaaggaaggccaggtgcagtggctcacgcccagcactttgggaggctgaggtgggaggatcccttgaggccaggagttcaaggttacagtgagctatgatagtgccactgcactccagcctgggtgacagattttgtcttaaaaaaaaaaaaaaaaaagttgatatgagttttattttctgtccgtttgaaatattttgtaatattccctgcattctctgtcgtctgcctcttccacataatgtcctttgctttcatgtttgttatcttctttttctgttcactcagaggtcatcaatttctttctctccgtccttaattggattatttttcttttggcctttgggcacagagtctgacctctggaccactctaactggagaaggaactttatgttccctctcctgctgtgtccacaaccttagaaatctgtagctagatttttgttgttatagatagaatttactgtttctgaaacccaaatacagttatcagtttaaggtt

SEQ ID NO: 33155 - DNA, 4062 bp, Homo sapiens
  source 1..4062: mol_type = unassigned DNA
ggtgtgggaggattctctgagtttggaaatagcgcttccaggcatcactccttcaaatgcaaacgttcaccttctctctaagagaaacttgcatgtggattcagtgccttcgtttgactaaaaattacgatacaaacaatattaacatttactagacttttttttccctactttcctcctataggaaaggaagatgtgctagggcatttacttagatgtgggtcagctggcgctagtttgtttaaggagttcctgctgtgtgccagtagcttttccgggccctagggtccttgctataaatacgttagccctgctgggcttctgaactaagggagctaaatgcttccagcttccttagtgaggcagcacggtgctgtatgcttaaatccaaggccgtggagtctgacctgcgtttttatctaaactgtgtaaggtgctggccctgggtggtttggcctcgatgagtgttaaatcgccatttaatgtgatgtcaagaaataatttggaagcacctccttgtaagatgacagagccatttaattttgagaaaaatgaaaacaagcttccaccacatgagtctttaagaagtcctggaacacttcctaaccaccctaatttcaggctgaaaagctcagagaatggaaataaaaagaacaattttttgctttgtgagcaaaccaaacaatatttggctagtcaggaagacaattcagtttcttcaaacccgaatggcatcaacggagaagtagttggctccaaaggagacaggaaaaaattgccagcaggaaactcagtgtcaccaccaagtgctgaaagtaattcaccacccaaagaagtgaatattaagcctggaaataatgtacgtcctgcaaaatcaaaaaaactaaacaagttggtcgagaattccttgtccataagtaatccagggctcttcacctccttaggacctcctcttcggtccacaacttgccatcgctgtggcctatttggatcgctgaggtgctctcagtgcaagcagacctactattgctccacagcatgtcaaagaagagactggtctgcacacagcatcgtgtgcaggcctgttcagccaaatttccacaaacttgaaaataaatcatctattgaaacaaaggatgtggaggtaaacaataagagtgactgtccacttggagttactaaggaaatagccatttgggctgagagaataatgttttctgatttgagaagtctacaactcaagaaaaccatggaaataaagggtacggttaccgaattcaaacacccaggggacttctacgtgcagttatattcttcagaagttttagaatacatgaaccaactctctgccagcttaaaagaaacatatgcaaatgtgcatgaaaaagactatattcctgttaagggggaagtttgtattgccaagtacactgttgatcagacctggaacagagcaatcatacaaaacgttgatgtgcagcaaaagaaggcacatgtcttatatattgattatggaaatgaagaaataattccattaaacagaatttaccacctcaacaggaacattgacttgtttcctccttgtgccataaagtgctttgtagccaatgttatcccagcagaagggaattggagcagtgattgtatcaaagctactaaaccactgttaatggagcagtactgctccataaagattgtcgacatcttggaagaggaagtggttacctttgctgtagaagttgagctgccaaattcaggaaaacttttagaccatgtgcttatagaaatgggatatggcttgaaacccagtggacaagattctaagaaggaaaatgcagatcaaagtgatcctgaagatgttggaaaaatgacaactgaaaacaacattgtcgtagacaaaagtgacctaatcccaaaagtgttaactttgaatgtaggtgatgagttttgtggtgtggttgcccacattcaaacaccagaagacttcttttgtcaacaactgcaaagtggccgaaagcttgctgaacttcaggcatcccttagcaagtactgtgatcagttgcctccacgctctgatttttatccagccattggtgatatatgttgtgctcagttctcagaggatgatcagtggtaccgtgcctctgttttggcttacgcttctgaagaatctgtactggtcggatatgtagattatggaaactttgaaatccttagtttgatgagactttgtcccataatcccaaagttgttggaattgccaatgcaagctataaagtgtgtactagcaggagtaaagccatcattaggaatttggactccagaagctatttgtctcatgaaaaaacttgtacagaacaaaataatcacagtgaaagtggtggacaagttggaaaacagttccctggtggagcttattgataaatccgagacgcctcatgtcagtgttagcaaagttctcctagatgcaggctttgctgtgggagaacagagtatggtgacagataaacccagtgacgtgaaagaaaccagtgttcccttgggtgtggaaggaaaagtaaatccattggagtggacatgggttgaacttggtgttgaccaaacagtagatgttgtggtctgtgtgatatatagtcctggagaattttattgccatgtgcttaaagaggatgctttaaagaaactcaatgatttgaacaagtcattagcagaacactgccagcagaagttacctaatggtttcaaggcagagataggacaaccttgttgtgctttttttgcaggtgatggtagttggtatcgtgctttagtcaaggaaatcttaccaaatggacatgttaaagtacattttgtggattatggaaacatcgaagaagttactgcagatgaactccgaatgatatcatcaacatttttaaaccttccctttcagggaatacggtgccagttagcagatatacagtctagaaacaaacattggtctgaagaagccataacaagattccagatgtgtgttgctgggataaaattgcaagccagagtggttgaagtcactgaaaatgggataggagttgaactcaccgatctctccacttgttatcccagaataattagtgatgttctgattgatgaacatctggttttaaaatctgcttcaccacataaagacttaccaaatgacagacttgttaataaacatgagcttcaagttcatgtacagggacttcaagctacctcttcagctgagcaatggaagacgatagaattgccagtggataaaactatacaagcaaatgtattagaaatcataagcccaaacttgttttatgctctaccaaaagggatgccagaaaatcaggaaaagctgtgcatgttgacagctgaattattagaatactgcaatgctccgaaaagtcgaccaccctatagaccaagaattggagacgcatgctgtgccaaatacacaagtgatgatttttggtatcgtgcagttgttctggggacatcagacactgatgtggaagtgctctatgcagactatggaaacattgaaaccctgcctctttgcagagtgcaaccaatcacctctagccacctggcgcttcctttccaaattattagatgttcacttgaagaaaagatgtataggatgaattgctgctgcacagagttacagaaacaagttgaaaaacatgaacatattcttctcttcctcttaaacaattcaaccaatcaaaataaatttattgaaatgaaaaaactgttaaaaagttaagtaagttaaatcgtatgttttcgcctcttctgtgatcaccaataggacatcttcaggcatattggcaggatagagctaatggagtgaaacctattgtaaggctgtactttcgtgatttaatgacctgaggtttggtcataatgcttctgctgtttttgtaggtttatctgatcgttttcctttgctactgctaatggaactgaacccccaggggtattccagttgtaatagcctttccttactgttgtttggttctgtgaatgcctatgttattgatatgtggaggg

SEQ ID NO: 33156 - DNA, 4168 bp, Homo sapiens
  source 1..4168: mol_type = unassigned DNA
gctgaggccaggagggcgcactggggattggaggcgagggaagtgcagggcgcatcccaggcggcagggctcccagcatcggcagtcgccatcaccgccagaccgcagagacaggttcggatccgcggtcctcttgcctctttccaggcctcgatgagtgttaaatcgccatttaatgtgatgtcaagaaataatttggaagcacctccttgtaagatgacagagccatttaattttgagaaaaatgaaaacaagcttccaccacatgagtctttaagaagtcctggaacacttcctaaccaccctaatttcaggctgaaaagctcagagaatggaaataaaaagaacaattttttgctttgtgagcaaaccaaacaatatttggctagtcaggaagacaattcagtttcttcaaacccgaatggcatcaacggagaagtagttggctccaaaggagacaggaaaaaattgccagcaggaaactcagtgtcaccaccaagtgctgaaagtaattcaccacccaaagaagtgaatattaagcctggaaataatgtacgtcctgcaaaatcaaaaaaactaaacaagttggtcgagaattccttgtccataagtaatccagggctcttcacctccttaggacctcctcttcggtccacaacttgccatcgctgtggcctatttggatcgctgaggtgctctcagtgcaagcagacctactattgctccacagcatgtcaaagaagagactggtctgcacacagcatcgtgtgcaggcctgttcagccaaatttccacaaacttgaaaataaatcatctattgaaacaaaggatgtggaggtaaacaataagagtgactgtccacttggagttactaaggaaatagccatttgggctgagagaataatgttttctgatttgagaagtctacaactcaagaaaaccatggaaataaagggtacggttaccgaattcaaacacccaggggacttctacgtgcagttatattcttcagaagttttagaatacatgaaccaactctctgccagcttaaaagaaacatatgcaaatgtgcatgaaaaagactatattcctgttaagggggaagtttgtattgccaagtacactgttgatcagacctggaacagagcaatcatacaaaacgttgatgtgcagcaaaagaaggcacatgtcttatatattgattatggaaatgaagaaataattccattaaacagaatttaccacctcaacaggaacattgacttgtttcctccttgtgccataaagtgctttgtagccaatgttatcccagcagaagggaattggagcagtgattgtatcaaagctactaaaccactgttaatggagcagtactgctccataaagattgtcgacatcttggaagaggaagtggttacctttgctgtagaagttgagctgccaaattcaggaaaacttttagaccatgtgcttatagaaatgggatatggcttgaaacccagtggacaagattctaagaaggaaaatgcagatcaaagtgatcctgaagatgttggaaaaatgacaactgaaaacaacattgtcgtagacaaaagtgacctaatcccaaaagtgttaactttgaatgtaggtgatgagttttgtggtgtggttgcccacattcaaacaccagaagacttcttttgtcaacaactgcaaagtggccgaaagcttgctgaacttcaggcatcccttagcaagtactgtgatcagttgcctccacgctctgatttttatccagccattggtgatatatgttgtgctcagttctcaggagtaaagccatcattaggaatttggactccagaagctatttgtctcatgaaaaaacttgtacagaacaaaataatcacagtgaaagtggtggacaagttggaaaacagttccctggtggagcttattgataaatccgagacgcctcatgtcagtgttagcaaagttctcctagatgcaggctttgctgtgggagaacagagtatggtgacagataaacccagtgacgtgaaagaaaccagtgttcccttgggtgtggaaggaaaagtaaatccattggagtggacatgggttgaacttggtgttgaccaaacagtagatgttgtggtctgtgtgatatatagtcctggagaattttattgccatgtgcttaaagaggatgctttaaagaaactcaatgatttgaacaagtcattagcagaacactgccagcagaagttacctaatggtttcaaggcagagataggacaaccttgttgtgctttttttgcagatatacagtctagaaacaaacattggtctgaagaagccataacaagattccagatgtgtgttgctgggataaaattgcaagccagagtggttgaagtcactgaaaatgggataggagttgaactcaccgatctctccacttgttatcccagaataattagtgatgttctgattgatgaacatctggttttaaaatctgcttcaccacataaagacttaccaaatgacagacttgttaataaacatgagcttcaagttcatgtacagggacttcaagctacctcttcagctgagcaatggaagacgatagaattgccagtggataaaactatacaagcaaatgtattagaaatcataagcccaaacttgttttatgctctaccaaaagggatgccagaaaatcaggaaaagctgtgcatgttgacagctgaattattagaatactgcaatgctccgaaaagtcgaccaccctatagaccaagaattggagacgcatgctgtgccaaatacacaagtgatgatttttggtatcgtgcagttgttctggggacatcagacactgatgtggaagtgctctatgcagactatggaaacattgaaaccctgcctctttgcagagtgcaaccaatcacctctagccacctggcgcttcctttccaaattattagatgttcacttgaaggattaatggaattgaatggaagctcttctcaattaataataatgctattaaaaaatttcatgttgaatcagaatgtaatgctttctgtgaaaggaattacaaagaatgtccatacagtgtcagttgagaaatgttctgagaatgggactgtcgatgtagctgataagctagtgacatttggtctggcaaaaaacatcacacctcaaaggcagagtgctttaaatacagaaaagatgtataggatgaattgctgctgcacagagttacagaaacaagttgaaaaacatgaacatattcttctcttcctcttaaacaattcaaccaatcaaaataaatttattgaaatgaaaaaactgttaaaaaaaacagcatctcttggaggtaaacccttatgagacaggaaacagcaaaggctagctttaggagagaaagtacagcacctggtgtttttatttatgagaaccttttctttgtccactttctctgtaatgaccttctatccctccgtttttgcctgcctgccattctcctattaggttggtggtttttattttcctctaagttccttccaccaaataaatattacgtaaaaaattcataccaaatcaatgagaatactggcaaggaatacatagggactttctgctatatatgtaactttttattacttaaaggtaccgaaggaaggccaggtgcagtggctcacgcccagcactttgggaggctgaggtgggaggatcccttgaggccaggagttcaaggttacagtgagctatgatagtgccactgcactccagcctgggtgacagattttgtcttaaaaaaaaaaaaaaaaaagttgatatgagttttattttctgtccgtttgaaatattttgtaatattccctgcattctctgtcgtctgcctcttccacataatgtcctttgctttcatgtttgttatcttctttttctgttcactcagaggtcatcaatttctttctctccgtccttaattggattatttttcttttggcctttgggcacagagtctgacctctggaccactctaactggagaaggaactttatgttccctctcctgctgtgtccacaaccttagaaatctgtagctagatttttgttgttatagatagaatttactgtttctgaaacccaaatacagttatcagtttaaggtt

SEQ ID NO: 33157 - DNA, 3705 bp, Homo sapiens
  source 1..3705: mol_type = unassigned DNA
gctgaggccaggagggcgcactggggattggaggcgagggaagtgcagggcgcatcccaggcggcagggctcccagcatcggcagtcgccatcaccgccagaccgcagagacaggttcggatccgcggtcctcttgcctctttccaggcctcgatgagtgttaaatcgccatttaatgtgatgtcaagaaataatttggaagcacctccttgtaagatgacagagccatttaattttgagaaaaatgaaaacaagcttccaccacatgagtctttaagaagtcctggaacacttcctaaccaccctaatttcaggctgaaaagctcagagaatggaaataaaaagaacaattttttgctttgtgagcaaaccaaacaatatttggctagtcaggaagacaattcagtttcttcaaacccgaatggcatcaacggagaagtagttggctccaaaggagacaggaaaaaattgccagcaggaaactcagtgtcaccaccaagtgctgaaagtaattcaccacccaaagaagtgaatattaagcctggaaataatgtacgtcctgcaaaatcaaaaaaactaaacaagttggtcgagaattccttgtccataagtaatccagggctcttcacctccttaggacctcctcttcggtccacaacttgccatcgctgtggcctatttggatcgctgaggtgctctcagtgcaagcagacctactattgctccacagcatgtcaaagaagagactggtctgcacacagcatcgtgtgcaggcctgttcagccaaatttccacaaacttgaaaataaatcatctattgaaacaaaggatgtggaggtaaacaataagagtgactgtccacttggagttactaaggaaatagccatttgggctgagagaataatgttttctgatttgagaagtctacaactcaagaaaaccatggaaataaagggtacggttaccgaattcaaacacccaggggacttctacgtgcagttatattcttcagaagttttagaatacatgaaccaactctctgccagcttaaaagaaacatatgcaaatgtgcatgaaaaagactatattcctgttaagggggaagtttgtattgccaagtacactgttgatcagacctggaacagagcaatcatacaaaacgttgatgtgcagcaaaagaaggcacatgtcttatatattgattatggaaatgaagaaataattccattaaacagaatttaccacctcaacaggaacattgacttgtttcctccttgtgccataaagtgctttgtagccaatgttatcccagcagaagggaattggagcagtgattgtatcaaagctactaaaccactgttaatggagcagtactgctccataaagattgtcgacatcttggaagaggaagtggttacctttgctgtagaagttgagctgccaaattcaggaaaacttttagaccatgtgcttatagaaatgggatatggcttgaaacccagtggacaagattctaagaaggaaaatgcagatcaaagtgatcctgaagatgttggaaaaatgacaactgaaaacaacattgtcgtagacaaaagtgacctaatcccaaaagtgttaactttgaatgtaggtgatgagttttgtggtgtggttgcccacattcaaacaccagaagacttcttttgtcaacaactgcaaagtggccgaaagcttgctgaacttcaggcatcccttagcaagtactgtgatcagttgcctccacgctctgatttttatccagccattggtgatatatgttgtgctcagttctcagaggatgatcagtggtaccgtgcctctgttttggcttacgcttctgaagaatctgtactggtcggatatgtagattatggaaactttgaaatccttagtttgatgagactttgtcccataatcccaaagttgttggaattgccaatgcaagctataaagtgtgtactagcaggagtaaagccatcattaggaatttggactccagaagctatttgtctcatgaaaaaacttgtacagaacaaaataatcacagtgaaagtggtggacaagttggaaaacagttccctggtggagcttattgataaatccgagacgcctcatgtcagtgttagcaaagttctcctagatgcaggctttgctgtgggagaacagagtatggtgacagataaacccagtgacgtgaaagaaaccagtgttcccttgggtgtggaaggaaaagtaaatccattggagtggacatgggttgaacttggtgttgaccaaacagtagatgttgtggtctgtgtgatatatagtcctggagaattttattgccatgtgcttaaagaggatgctttaaagaaactcaatgatttgaacaagtcattagcagaacactgccagcagaagttacctaatggtttcaaggcagagataggacaaccttgttgtgctttttttgcaggtgatggtagttggtatcgtgctttagtcaaggaaatcttaccaaatggacatgttaaagtacattttgtggattatggaaacatcgaagaagttactgcagatgaactccgaatgatatcatcaacatttttaaaccttccctttcagggaatacggtgccagttagcagatatacagtctagaaacaaacattggtctgaagaagccataacaagattccagatgtgtgttgctgggataaaattgcaagccagagtggttgaagtcactgaaaatgggataggagttgaactcaccgatctctccacttgttatcccagaataattagtgatgttctgattgatgaacatctggttttaaaatctgcttcaccacataaagacttaccaaatgacagacttgttaataaacatgagcttcaagttcatgtacagggacttcaagctacctcttcagctgagcaatggaagacgatagaattgccagtggataaaactatacaagcaaatgtattagaaatcataagcccaaacttgttttatgctctaccaaaagggatgccagaaaatcaggaaaagctgtgcatgttgacagctgaattattagaatactgcaatgctccgaaaagtcgaccaccctatagaccaagaattggagacgcatgctgtgccaaatacacaagtgatgatttttggtatcgtgcagttgttctggggacatcagacactgatgtggaagtgctctatgcagactatggaaacattgaaaccctgcctctttgcagagtgcaaccaatcacctctagccacctggcgcttcctttccaaattattagatgttcacttgaagaaaagatgtataggatgaattgctgctgcacagagttacagaaacaagttgaaaaacatgaacatattcttctcttcctcttaaacaattcaaccaatcaaaataaatttattgaaatgaaaaaactgttaaaaaaaacagcatctcttggaggtaaacccttatgagacaggaaacagcaaaggctagctttaggagagaaagtacagcacctggtgtttttatttatgagaaccttttctttgtccactttctctgtaatgaccttctatccctccgtttttgcctgcctgccattctcctattaggttggtggtttttattttcctctaagttccttccaccaaataaatattacgtaaaaaattcataccaaa

SEQ ID NO: 33158 - DNA, 3967 bp, Homo sapiens
  source 1..3967: mol_type = unassigned DNA
gctgaggccaggagggcgcactggggattggaggcgagggaagtgcagggcgcatcccaggcggcagggctcccagcatcggcagtcgccatcaccgccagaccgcagagacaggttcggatccgcggtcctcttgcctctttccaggcctcgatgagtgttaaatcgccatttaatgtgatgtcaagaaataatttggaagcacctccttgtaagatgacagagccatttaattttgagaaaaatgaaaacaagcttccaccacatgagtctttaagaagtcctggaacacttcctaaccaccctaatttcaggctgaaaagctcagagaatggaaataaaaagaacaattttttgctttgtgagcaaaccaaacaatatttggctagtcaggaagacaattcagtttcttcaaacccgaatggcatcaacggagaagtagttggctccaaaggagacaggaaaaaattgccagcaggaaactcagtgtcaccaccaagtgctgaaagtaattcaccacccaaagaagtgaatattaagcctggaaataatgtacgtcctgcaaaatcaaaaaaactaaacaagttggtcgagaattccttgtccataagtaatccagggctcttcacctccttaggacctcctcttcggtccacaacttgccatcgctgtggcctatttggatcgctgaggtgctctcagtgcaagcagacctactattgctccacagcatgtcaaagaagagactggtctgcacacagcatcgtgtgcaggcctgttcagccaaatttccacaaacttgaaaataaatcatctattgaaacaaaggatgtggaggtaaacaataagagtgactgtccacttggagttactaaggaaatagccatttgggctgagagaataatgttttctgatttgagaagtctacaactcaagaaaaccatggaaataaagggtacggttaccgaattcaaacacccaggggacttctacgtgcagttatattcttcagaagttttagaatacatgaaccaactctctgccagcttaaaagaaacatatgcaaatgtgcatgaaaaagactatattcctgttaagggggaagtttgtattgccaagtacactgttgatcaggccataaagtgctttgtagccaatgttatcccagcagaagggaattggagcagtgattgtatcaaagctactaaaccactgttaatggagcagtactgctccataaagattgtcgacatcttggaagaggaagtggttacctttgctgtagaagttgagctgccaaattcaggaaaacttttagaccatgtgcttatagaaatgggatatggcttgaaacccagtggacaagattctaagaaggaaaatgcagatcaaagtgatcctgaagatgttggaaaaatgacaactgaaaacaacattgtcgtagacaaaagtgacctaatcccaaaagtgttaactttgaatgtaggtgatgagttttgtggtgtggttgcccacattcaaacaccagaagacttcttttgtcaacaactgcaaagtggccgaaagcttgctgaacttcaggcatcccttagcaagtactgtgatcagttgcctccacgctctgatttttatccagccattggtgatatatgttgtgctcagttctcaggagtaaagccatcattaggaatttggactccagaagctatttgtctcatgaaaaaacttgtacagaacaaaataatcacagtgaaagtggtggacaagttggaaaacagttccctggtggagcttattgataaatccgagacgcctcatgtcagtgttagcaaagttctcctagatgcaggctttgctgtgggagaacagagtatggtgacagataaacccagtgacgtgaaagaaaccagtgttcccttgggtgtggaaggaaaagtaaatccattggagtggacatgggttgaacttggtgttgaccaaacagtagatgttgtggtctgtgtgatatatagtcctggagaattttattgccatgtgcttaaagaggatgctttaaagaaactcaatgatttgaacaagtcattagcagaacactgccagcagaagttacctaatggtttcaaggcagagataggacaaccttgttgtgctttttttgcaggtgatggtagttggtatcgtgctttagtcaaggaaatcttaccaaatggacatgttaaagtacattttgtggattatggaaacatcgaagaagttactgcagatgaactccgaatgatatcatcaacatttttaaaccttccctttcagggaatacggtgccagttagcagatatacagtctagaaacaaacattggtctgaagaagccataacaagattccagatgtgtgttgctgggataaaattgcaagccagagtggttgaagtcactgaaaatgggataggagttgaactcaccgatctctccacttgttatcccagaataattagtgatgttctgattgatgaacatctggttttaaaatctgcttcaccacataaagacttaccaaatgacagacttgttaataaacatgagcttcaagttcatgtacagggacttcaagctacctcttcagctgagcaatggaagacgatagaattgccagtggataaaactatacaagcaaatgtattagaaatcataagcccaaacttgttttatgctctaccaaaagggatgccagaaaatcaggaaaagctgtgcatgttgacagctgaattattagaatactgcaatgctccgaaaagtcgaccaccctatagaccaagaattggagacgcatgctgtgccaaatacacaagtgatgatttttggtatcgtgcagttgttctggggacatcagacactgatgtggaagtgctctatgcagactatggaaacattgaaaccctgcctctttgcagagtgcaaccaatcacctctagccacctggcgcttcctttccaaattattagatgttcacttgaagaaaagatgtataggatgaattgctgctgcacagagttacagaaacaagttgaaaaacatgaacatattcttctcttcctcttaaacaattcaaccaatcaaaataaatttattgaaatgaaaaaactgttaaaaaaaacagcatctcttggaggtaaacccttatgagacaggaaacagcaaaggctagctttaggagagaaagtacagcacctggtgtttttatttatgagaaccttttctttgtccactttctctgtaatgaccttctatccctccgtttttgcctgcctgccattctcctattaggttggtggtttttattttcctctaagttccttccaccaaataaatattacgtaaaaaattcataccaaatcaatgagaatactggcaaggaatacatagggactttctgctatatatgtaactttttattacttaaaggtaccgaaggaaggccaggtgcagtggctcacgcccagcactttgggaggctgaggtgggaggatcccttgaggccaggagttcaaggttacagtgagctatgatagtgccactgcactccagcctgggtgacagattttgtcttaaaaaaaaaaaaaaaaaagttgatatgagttttattttctgtccgtttgaaatattttgtaatattccctgcattctctgtcgtctgcctcttccacataatgtcctttgctttcatgtttgttatcttctttttctgttcactcagaggtcatcaatttctttctctccgtccttaattggattatttttcttttggcctttgggcacagagtctgacctctggaccactctaactggagaaggaactttatgttccctctcctgctgtgtccacaaccttagaaatctgtagctagatttttgttgttatagatagaatttactgtttctgaaacccaaatacagttatcagtttaaggtt

SEQ ID NO: 33159 - DNA, 3019 bp, Homo sapiens
  source 1..3019: mol_type = unassigned DNA
acccaccctgcgccccagccctctacagcgcgggcgaagggcatcggcggggaagcggctgtggttgccagatctggcagtacagagccaaggtggcagggccgcgctaggacacggatggtcccagggggagggcaacaggaaaaacaagcactgacacaactgccccatttccccatgtcccctaaaagcaggttttcttgggctgaccagggcattttcactgtggtgtccgactggggcaactcgatctgcccgcggggactcaaaaaagcttgagctgcattttttctttgcgtccgggcggaccaaaaggcgaggtgaagggaacgagtgtttataagaaagtaaacttttgtgcagaatgggctggggacacctctgagttttgctgcccgcaacgtgacctttttagcgcggtcctggacgcgttccctcgcagccaacccgtcagtctcctcaggccttatcctgccctctctgaggtggccgcctgtgggcgctgcaaacgccacacttttgctctacgaagaacctcctcgcgactttccaaggtatctttcagatgaaggcattgaagcttgcacaagctctccagacaaagtcaatgtaaatgacatcatcctgattgctctcaatatctgagaacaattggcaagaaattcctccccagtgacatcaatagtggaaaggtagaaaagctcgaaggtccatgtgttttgcaaattcaaaaaattcgcaatgttgctgcaccaaaggataatgaagaatctcaggctgcaccaaggatgctgcgattacagatgactgatggtcatataagttgcacagcagtagaatttagttatatgtcaaaaataagcctgaacacaccacctggaactaaagttaagctctcaggcattgttgacataaaaaatggattcctgctcttgaatgactctaacaccacagttcttggtggtgaagtggaacaccttattgagaaatgggagttacagagaagcttatcaaaacacaatagaagcaatattggaactgaaggtggaccaccgccttttgtgccttttggacagaagtgtgtatctcatgtccaagtggatagcagagaacttgatcgaagaaaaacattgcaagttacaatgcctgtcaaacctacaaatgataatgatgaatttgaaaagcaaaggacggctgctattgctgaagttgcaaagagcaaggaaaccaagacatttggaggaggtggtggtggtgctagaagtaatctcaatatgaatgctgctggtaaccgaaatagggaagttttacagaaagaaaagtcaaccaaatcagagggaaaacatgaaggtgtctatagagaactggttgatgagaaagctctgaagcacataacggaaatgggcttcagtaaggaagcatcgaggcaagctcttatggataatggcaacaacttagaagcagcactgaacgtacttcttacaagcaataaacagaaacctgttatgggtcctcctctgagaggtagaggaaaaggcagggggcgaataagatctgaagatgaagaggacctgggaaatgcaaggccatcagcaccaagcacattatttgatttcttggaatctaaaatgggaactttgaatgtggaagaacctaaatcacagccacagcagcttcatcagggacaatacagatcatcaaatactgagcaaaatggagtaaaagataataatcatctgagacatcctcctcgaaatgataccaggcagccaagaaatgaaaaaccgcctcgttttcaaagagactcccaaaattcaaagtcagttttagaaggcagtggattacctagaaatagaggttctgaaagaccaagtacttcttcagtatctgaagtatgggctgaagacagaatcaaatgtgatagaccgtattctagatatgacagaactaaagatacttcatatcctttaggttctcagcatagtgatggtgcttttaaaaaaagagataactctatgcaaagcagatcaggaaaaggtccctcctttgcagaggcaaaagaaaatccacttcctcaaggatctgtagattataataatcaaaaacgtggaaaaagagaaagccaaacatctattcctgattatttttatgacaggaaatcacaaacaataaataatgaagctttcagtggtataaaaattgaaaaacattttaatgtaaatactgattatcagaatccagttcgaagtaatagtttcattggtgttccaaatggagaagtagaaatgccactgaaaggaagacgaataggacctattaagccagcaggacctgtcacagctgtaccctgtgatgataaaatattttacaatagtgggcccaaacgaagatctgggccaattaagccagaaaaaatactagaatcatctattcctatggagtatgcaaaaatgtggaaacctggagatgaatgttttgcactttattgggaagacaacaagttttaccgggcagaagttgaagccctccattcttcgggtatgacagcagttgttaaattcattgactacggaaactatgaagaggtgctactgagcaatatcaagcccattcaaacagaggcatgggaggaagaaggcacctacgatcaaactctggagttccgtaggggaggtgatggccagccaagacgatccactcggccaacccaacagttttaccaaccaccccgggctcggaactaataggaaaagtagactctttgtgaagaaacgagccagtgactgaaacaccctggtggaaacctgttgacagaccttccactttctcttcagaataagtagctgtggtggatattattatttgaagaaagaaaaaacagattttagggtggaaaaaacagtcaactcacacaaagaatggaaaaaaatactgagttaaattaagcaaataccttttacaagtgaaaggaagaatttttcttctgccgtcaataaaaccattgtgctattattgtttt

SEQ ID NO: 33160 - DNA, 2528 bp, Homo sapiens
  source 1..2528: mol_type = unassigned DNA
gccgcctgtgggcgctgcaaacgccacacttttgctctacgaagaacctcctcgcgactttccaagaggtatctttcagatgaaggcattgaagcttgcacaagctctccagacaaagtcaatgtaaatgacatcatcctgattgctctcaatacagatctgagaacaattggcaagaaattcctccccagtgacatcaatagtggaaaggtagaaaagctcgaaggtccatgtgttttgcaaattcaaaaaattcgcaatgttgctgcaccaaaggataatgaagaatctcaggctgcaccaaggatgctgcgattacagatgactgatggtcatataagttgcacagcagtagaatttagttatatgtcaaaaataagcctgaacacaccacctggaactaaagttaagctctcaggcattgttgacataaaaaatggattcctgctcttgaatgactctaacaccacagttcttggtggtgaagtggaacaccttattgagaaatgggagttacagagaagcttatcaaaacacaatagaagcaatattggaactgaaggtggaccaccgccttttgtgccttttggacagaagtgtgtatctcatgtccaagtggatagcagagaacttgatcgaagaaaaacattgcaagttacaatgcctgtcaaacctacaaatgataatgatgaatttgaaaagcaaaggacggctgctattgctgaagttgcaaagagcaaggaaaccaagacatttggaggaggtggtggtggtgctagaagtaatctcaatatgaatgctgctggtaaccgaaatagggaagttttacagaaagaaaagtcaaccaaatcagagggaaaacatgaaggtgtctatagagaactggttgatgagaaagctctgaagcacataacggaaatgggcttcagtaaggaagcatcgaggcaagctcttatggataatggcaacaacttagaagcagcactgaacgtacttcttacaagcaataaacagaaacctgttatgggtcctcctctgagaggtagaggaaaaggcagggggcgaataagatctgaagatgaagaggacctgggaaatgcaaggccatcagcaccaagcacattatttgatttcttggaatctaaaatgggaactttgaatgtggaagaacctaaatcacagccacagcagcttcatcagggacaatacagatcatcaaatactgagcaaaatggagtaaaagataataatcatctgagacatcctcctcgaaatgataccaggcagccaagaaatgaaaaaccgcctcgttttcaaagagactcccaaaattcaaagtcagttttagaaggcagtggattacctagaaatagaggttctgaaagaccaagtacttcttcagtatctgaagtatgggctgaagacagaatcaaatgtgatagaccgtattctagatatgacagaactaaagatacttcatatcctttaggttctcagcatagtgatggtgcttttaaaaaaagagataactctatgcaaagcagatcaggaaaaggtccctcctttgcagaggcaaaagaaaatccacttcctcaaggatctgtagattataataatcaaaaacgtggaaaaagagaaagccaaacatctattcctgattatttttatgacaggaaatcacaaacaataaataatgaagctttcagtggtataaaaattgaaaaacattttaatgtaaatactgattatcagaatccagttcgaagtaatagtttcattggtgttccaaatggagaagtagaaatgccactgaaaggaagacgaataggacctattaagccagcaggacctgtcacagctgtaccctgtgatgataaaatattttacaatagtgggcccaaacgaagatctgggccaattaagccagaaaaaatactagaatcatctattcctatggagtatgcaaaaatgtggaaacctggagatgaatgttttgcactttattgggaagacaacaagttttaccgggcagaagttgaagccctccattcttcgggtatgacagcagttgttaaattcattgactacggaaactatgaagaggtgctactgagcaatatcaagcccattcaaacagaggcatgggaggaagaaggcacctacgatcaaactctggagttccgtaggggaggtgatggccagccaagacgatccactcggccaacccaacagttttaccaaccaccccgggctcggaactaataggaaaagactctttgtgaagaaacgagccagtgactgaaacaccctggtggaaacctgttgacagaccttccactttctcttcagaataagtagctgtggtggatattattatttgaagaaagaaaaaacagattttagggtggaaaaaacagtcaactcacacaaagaatggaaaaaaatactgagttaaattaagcaaataccttttacaagtgaaaggaagaatttttcttctgccgtcaataaaaccattgtgctattat

SEQ ID NO: 33161 - DNA, 660 bp, Homo sapiens
  source 1..660: mol_type = unassigned DNA
tatatgccaagtgacttctgaacacgacgtgaagacagtatctttcagatgaaggcattgaagcttgcacaagctctccagacaaagtcaatgtaaatgacatcatcctgattgctctcaatatctgagaacaattggcaagaaattcctccccagtgacatcaatagtggaaaggtagaaaagctcgaaggtccatgtgttttgcaaattcaaaaaattcgcaatgttgctgcaccaaaggataatgaagaatctcaggctgcaccaaggatgctgcgattacagatgactgatggtcatataagttgcacagcagtagaatttagttatatgtcaaaaataagcctgaacacaccacctggaactaaagttaagctctcaggcattgttgacataaaaaatggattcctgctcttgaatgactctaacaccacagttcttggtggtgaagtggaacaccttattgagaaatgggagttacagagaagcttatcaaaacacaatagaagcaatattggaactgaaggtggaccaccgccttttgtgccttttggacagaagtgtgtatctcatgtccaagtggatagcagagaacttgatcgaagaaaaacattgcaagttacaatgcctgtcaaacctacaaatgataatgatgaatt

SEQ ID NO: 33162 - DNA, 2484 bp, Homo sapiens
  source 1..2484: mol_type = unassigned DNA
gaacctcctcgcgactttccaaggtatctttcagatgaaggcattgaagcttgcacaagctctccagacaaagtcaatgtaaatgacatcatcctgattgctctcaatatctgagaacaattggcaagaaattcctccccagtgacatcaatagtggaaaggtagaaaagctcgaaggtccatgtgttttgcaaattcaaaaaattcgcaatgttgctgcaccaaaggataatgaagaatctcaggctgcaccaaggatgctgcgattacagatgactgatggtcatataagttgcacagcagtagaatttagttatatgtcaaaaataagcctgaacacaccacctggaactaaagttaagctctcaggcattgttgacataaaaaatggattcctgctcttgaatgactctaacaccacagttcttggtggtgaagtggaacaccttattgagaaatgggagttacagagaagcttatcaaaacacaatagaagcaatattggaactgaaggtggaccaccgccttttgtgccttttggacagaagtgtgtatctcatgtccaagtggatagcagagaacttgatcgaagaaaaacattgcaagttacaatgcctgtcaaacctacaaatgataatgatgaatttgaaaagcaaaggacggctgctattgctgaagttgcaaagagcaaggaaaccaagacatttggaggaggtggtggtggtgctagaagtaatctcaatatgaatgctgctggtaaccgaaatagggaagttttacagaaagaaaagtcaaccaaatcagagggaaaacatgaaggtgtctatagagaactggttgatgagaaagctctgaagcacataacggaaatgggcttcagtaaggaagcatcgaggcaagctcttatggataatggcaacaacttagaagcagcactgaacgtacttcttacaagcaataaacagaaacctgttatgggtcctcctctgagaggtagaggaaaaggcagggggcgaataagatctgaagatgaagaggacctgggaaatgcaaggccatcagcaccaagcacattatttgatttcttggaatctaaaatgggaactttgaatgtggaagaacctaaatcacagccacagcagcttcatcagggacaatacagatcatcaaatactgagcaaaatggagtaaaagataataatcatctgagacatcctcctcgaaatgataccaggcagccaagaaatgaaaaaccgcctcgttttcaaagagactcccaaaattcaaagtcagttttagaaggcagtggattacctagaaatagaggttctgaaagaccaagtacttcttcagtatctgaagtatgggctgaagacagaatcaaatgtgatagaccgtattctagatatgacagaactaaagatacttcatatcctttaggttctcagcatagtgatggtgcttttaaaaaaagagataactctatgcaaagcagatcaggaaaaggtccctcctttgcagaggcaaaagaaaatccacttcctcaaggatctgtagattataataatcaaaaacgtggaaaaagagaaagccaaacatctattcctgattatttttatgacaggaaatcacaaacaataaataatgaagctttcagtggtataaaaattgaaaaacattttaatgtaaatactgattatcagaatccagttcgaagtaatagtttcattggtgttccaaatggagaagtagaaatgccactgaaaggaagacgaataggacctattaagccagcaggacctgtcacagctgtaccctgtgatgataaaatattttacaatagtgggcccaaacgaagatctgggccaattaagccagaaaaaatactagaatcatctattcctatggagtatgcaaaaatgtggaaacctggagatgaatgttttgcactttattgggaagacaacaagttttaccgggcagaagttgaagccctccattcttcgggtatgacagcagttgttaaattcattgactacggaaactatgaagaggtgctactgagcaatatcaagcccattcaaacagaggcatgggaggaagaaggcacctacgatcaaactctggagttccgtaggggaggtgatggccagccaagacgatccactcggccaacccaacagttttaccaaccaccccgggctcggaactaataggaaaagactctttgtgaagaaacgagccagtgactgaaacaccctggtggaaacctgttgacagaccttccactttctcttcagaataagtagctgtggtggatattattatttgaagaaagaaaaaacagattttagggtggaaaaaacagtcaactcacacaaagaatggaaaaaaatactgagttaaattaagcaaataccttttacaagtgaaaggaagaatttttcttctgccgtcaataaaaccattgtgctattattgttt

SEQ ID NO: 33163 - DNA, 2579 bp, Homo sapiens
  source 1..2579: mol_type = unassigned DNA
ggggtctcaagtaggaggcctccccatcacccccaccccagccccccaccacccccggcctaagcagctaccatggcccaggtggccggcgcggcgttgtcccaggcgggttggtatctttcagatgaaggcattgaagcttgcacaagctctccagacaaagtcaatgtaaatgacatcatcctgattgctctcaatacagatctgagaacaattggcaagaaattcctccccagtgacatcaatagtggaaaggtagaaaagctcgaaggtccatgtgttttgcaaattcaaaaaattcgcaatgttgctgcaccaaaggataatgaagaatctcaggctgcaccaaggatgctgcgattacagatgactgatggtcatataagttgcacagcagtagaatttagttatatgtcaaaaataagcctgaacacaccacctggaactaaagttaagctctcaggcattgttgacataaaaaatggattcctgctcttgaatgactctaacaccacagttcttggtggtgaagtggaacaccttattgagaaatgggagttacagagaagcttatcaaaacacaatagaagcaatattggaactgaaggtggaccaccgccttttgtgccttttggacagaagtgtgtatctcatgtccaagtggatagcagagaacttgatcgaagaaaaacattgcaagttacaatgcctgtcaaacctacaaatgataatgatgaatttgaaaagcaaaggacggctgctattgctgaagttgcaaagagcaaggaaaccaagacatttggaggaggtggtggtggtgctagaagtaatctcaatatgaatgctgctggtaaccgaaatagggaagttttacagaaagaaaagtcaaccaaatcagagggaaaacatgaaggtgtctatagagaactggttgatgagaaagctctgaagcacataacggaaatgggcttcagtaaggaagcatcgaggcaagctcttatggataatggcaacaacttagaagcagcactgaacgtacttcttacaagcaataaacagaaacctgttatgggtcctcctctgagaggtagaggaaaaggcagggggcgaataagatctgaagatgaagaggacctgggaaatgcaaggccatcagcaccaagcacattatttgatttcttggaatctaaaatgggaactttgaatgtggaagaacctaaatcacagccacagcagcttcatcagggacaatacagatcatcaaatactgagcaaaatggagtaaaagataataatcatctgagacatcctcctcgaaatgataccaggcagccaagaaatgaaaaaccgcctcgttttcaaagagactcccaaaattcaaagtcagttttagaaggcagtggattacctagaaatagaggttctgaaagaccaagtacttcttcagtatctgaagtatgggctgaagacagaatcaaatgtgatagaccgtattctagatatgacagaactaaagatacttcatatcctttaggttctcagcatagtgatggtgcttttaaaaaaagagataactctatgcaaagcagatcaggaaaaggtccctcctttgcagaggcaaaagaaaatccacttcctcaaggatctgtagattataataatcaaaaacgtggaaaaagagaaagccaaacatctattcctgattatttttatgacaggaaatcacaaacaataaataatgaagctttcagtggtataaaaattgaaaaacattttaatgtaaatactgattatcagaatccagttcgaagtaatagtttcattggtgttccaaatggagaagtagaaatgccactgaaaggaagacgaataggacctattaagccagcaggacctgtcacagctgtaccctgtgatgataaaatattttacaatagtgggcccaaacgaagatctgggccaattaagccagaaaaaatactagaatcatctattcctatggagtatgcaaaaatgtggaaacctggagatgaatgttttgcactttattgggaagacaacaagttttaccgggcagaagttgaagccctccattcttcgggtatgacagcagttgttaaattcattgactacggaaactatgaagaggtgctactgagcaatatcaagcccattcaaacagaggcatgggaggaagaaggcacctacgatcaaactctggagttccgtaggggaggtgatggccagccaagacgatccactcggccaacccaacagttttaccaaccaccccgggctcggaactaataggaaaagactctttgtgaagaaacgagccagtgactgaaacaccctggtggaaacctgttgacagaccttccactttctcttcagaataagtagctgtggtggatattattatttgaagaaagaaaaaacagattttagggtggaaaaaacagtcaactcacacaaagaatggaaaaaaatactgagttaaattaagcaaataccttttacaagtgaaaggaagaatttttcttctgccgtcaataaaaccattgtgctattattgtttt

SEQ ID NO: 33164 - DNA, 3834 bp, Homo sapiens
  source 1..3834: mol_type = unassigned DNA
ggcgacggtttcccttcccacgcgcggacgccggcgtgggccgacgcggccggagcgcccgcgcgtgcgcagagccgaggccaggctgccctcgaagcggggcggggcgaagcggggcggggccgagcagggcggggcgggggcttgaggtgattcccaagccgcggggcggctccggtggtgcggggaaaccgaaagtgggcggcggccgcggcggggcccctggcggagacggcggcaggagctgggcccagagacgcggggacgggccgtgggcccccggaacgaggcaaagatgctggaaggagatctggtttcaaagatgctacgagctgttctgcagtctcataagaatggagtagcattaccccggctccaaggagagtacagatccttgactggagactggatccccttcaaacagctaggtttccctacactagaagcctatctgagaagtgtgccagcagtggtcaggatagagactagtagatctggagagattacctgctatgccatggcctgcacagaaactgcaagaattgctcagcttgtggctcgtcaaaggagttctaaaaggaaaaccgggcgtcaagttaattgtcagatgagagtgaagaaaaccatgccattttttctagaaggaaaaccaaaagcaaccctcagacaaccaggatttgcttcaaatttttctgttggcaaaaaacctaatccagcaccgttaagagacaaaggaaactctgttggagttaagcctgatgctgaaatgtctccttatatgctacacacaactcttggaaatgaagcattcaaagacattccagtgcaaaggcatgtgaccatgtccaccaacaacaggtttagcccaaaggcgtcccttcaaccacctttgcagatgcatctctcaagaacctctactaaggaaatgagtgataatttaaatcagactgttgaaaaacccaatgtcaagcctcctgcctcttacacttataaaatggatgaggttcaaaatcgcataaaggaaatactaaacaagcataacaatggcatttggatatctaagcttccacatttttacaaagagttatataaagaagaccttaatcaaggaattttacaacagtttgaacactggcctcatatttgcacggtggagaaaccttgcagtggtggccaagatttacttctttatccagctaagagaaagcagcttttgagaagtgaactggatactgagaaagtacctctatccccactacctggtcccaaacaaacaccaccgttgaaagggtgtccaacagttatggcaggagactttaaagaaaaagtggcagacctgctggtgaaatacacaagtggcctttgggccagtgcacttccgaaagcatttgaggaaatgtacaaagtgaaattccctgaggatgccttaaaaaatcttgcctcactttctgatgtatgcagcatagactacatttctggaaatccccagaaggccattctctatgctaaacttccattgcccactgacaaaatccaaaaggatgcagggcaagcacatggtgataatgatatcaaggctatggttgaacaagagtatttgcaggtagaagaaagcattgctgaaagtgctaatacctttatggaggacataacagttcctcctttaatgattccaactgaagcatcaccatctgtattggtggttgaactgagcaacacaaatgaagtggttatcaggtatgtgggcaaagactattctgctgctcaggaattaatggaagatgagatgaaggaatattacagtaagaatcctaagatcacaccagtccaggctgtgaatgttgggcagttgctggccgtaaatgccgaggaggacgcctggttacgggcacaggtcatctcaacagaagagaacaaaataaaggtatgctatgttgactatggttttagtgaaaatgttgaaaaaagcaaagcatacaaattaaacccgaagttttgttcactctcatttcaagctacaaaatgtaagcttgcaggcttggaagtcctaagcgatgaccctgatctagtgaaggtggttgaatctttaacttgtggaaagatctttgcagtggaaatacttgacaaagctgacattccacttgttgttctgtacgatacctcaggagaagatgatatcaatatcaatgccacctgcttgaaggctatatgtgacaagtcactagaggttcacctgcaggttgacgccatgtacacaaatgtcaaagtaactaatatttgctctgatgggacactctactgccaggtgccttgtaagggtctgaacaagctcagtgaccttctacgtaagatagaggactacttccattgcaagcacatgacctctgagtgctttgtttcattacccttctgtgggaaaatctgcctcttccattgcaaaggaaaatggttacgagtagagatcacaaatgttcacagcagccgggctcttgatgttcagttcctggactctggcactgtgacatctgtaaaagtgtcagagctcagggaaattccacctcggtttctacaagaaatgattgcaataccacctcaggccattaagtgctgtttagcagatcttccacaatctattggcatgtggacaccagatgcagtgctgtggttaagagattctgttttgaattgctcggactgtagcattaaggttacaaaagtggatgaaaccagagggatcgcacatgtttatttatttacccctaagaacttccctgaccctcatcgcagtattaatcgccagattacaaatgcagacttgtggaagcatcagaaggatgtgtttttgagtgccatatccagtggagctgactctcccaacagcaaaaatggcaacatgcccatgtcgggcaacactggagagaatttcagaaagaacctcacagatgtcatcaaaaagtccatggtggaccatacgagcgctttctccacagaggaactgccacctcctgtccacttatcaaagccaggggaacacatggatgtgtatgtgcctgtggcctgtcacccaggctacttcgtcatccagccttggcaggagatacataagttggaagttctgatggaagagatgattctatattacagcgtgtctgaagagcgccacatagcagtggagaaagaccaagtgtatgctgcaaaagtggaaaataagtggcacagggtgcttttaaaaggaatcctgaccaatggactggtatctgtgtatgagctggattatggcaaacacgaattagtcaacataagaaaagtacagcccctagtggacatgttccgaaagctgcccttccaagcagtcacagctcaacttgcaggagtgaagtgcaaccagtggtctgaggaggcttctatggtgtttcgaaatcatgtggagaagaaacctctggtggcactggtgcagacagtcattgaaaatgctaacccttgggaccggaaagtagtggtctacttagtggacacatcgttgccagacaccgatacctggattcatgattttatgtcagagtatctgatagagctttcaaaagttaattaatgactgcctctgaaaccttgacaactaattcagattttttagcaataacaaaatgtagtaggcttaaaaaaaatcttaactctgctacatggctctgactgctgtgggggattgaaaagaatatgcttatgtttgatgaaagatatttaacaagttttgttttaacagagttgacttttcaaagaaaattgtacttgaattattactataatattagaataaaaatgtttatcaatataaaa

SEQ ID NO: 33165 - DNA, 3473 bp, Homo sapiens
  source 1..3473: mol_type = unassigned DNA
ttgaggtgattcccaagccgcggggcggctccggtggtgcggggaaaccgaaagtgggcggcggccgcggcggggcccctggcggagacggcggcaggagctgggcccagagacgcggggacgggccgtgggcccccggaacgagattacctgctatgccatggcctgcacagaaactgcaagaattgctcagcttgtggctcgtcaaaggagttctaaaaggaaaaccgggcgtcaagttaattgtcagatgagagtgaagaaaaccatgccattttttctagaaggaaaaccaaaagcaaccctcagacaaccaggatttgcttcaaatttttctgttggcaaaaaacctaatccagcaccgttaagagacaaaggaaactctgttggagttaagcctgatgctgaaatgtctccttatatgctacacacaactcttggaaatgaagcattcaaagacattccagtgcaaaggcatgtgaccatgtccaccaacaacaggtttagcccaaaggcgtcccttcaaccacctttgcagatgcatctctcaagaacctctactaaggaaatgagtgataatttaaatcagactgttgaaaaacccaatgtcaagcctcctgcctcttacacttataaaatggatgaggttcaaaatcgcataaaggaaatactaaacaagcataacaatggcatttggatatctaagcttccacatttttacaaagagttatataaagaagaccttaatcaaggaattttacaacagtttgaacactggcctcatatttgcacggtggagaaaccttgcagtggtggccaagatttacttctttatccagctaagagaaagcagcttttgagaagtgaactggatactgagaaagtacctctatccccactacctggtcccaaacaaacaccaccgttgaaagggtgtccaacagttatggcaggagactttaaagaaaaagtggcagacctgctggtgaaatacacaagtggcctttgggccagtgcacttccgaaagcatttgaggaaatgtacaaagtgaaattccctgaggatgccttaaaaaatcttgcctcactttctgatgtatgcagcatagactacatttctggaaatccccagaaggccattctctatgctaaacttccattgcccactgacaaaatccaaaaggatgcagggcaagcacatggtgataatgatatcaaggctatggttgaacaagagtatttgcaggtagaagaaagcattgctgaaagtgctaatacctttatggaggacataacagttcctcctttaatgattccaactgaagcatcaccatctgtattggtggttgaactgagcaacacaaatgaagtggttatcaggtatgtgggcaaagactattctgctgctcaggaattaatggaagatgagatgaaggaatattacagtaagaatcctaagatcacaccagtccaggctgtgaatgttgggcagttgctggccgtaaatgccgaggaggacgcctggttacgggcacaggtcatctcaacagaagagaacaaaataaaggtatgctatgttgactatggttttagtgaaaatgttgaaaaaagcaaagcatacaaattaaacccgaagttttgttcactctcatttcaagctacaaaatgtaagcttgcaggcttggaagtcctaagcgatgaccctgatctagtgaaggtggttgaatctttaacttgtggaaagatctttgcagtggaaatacttgacaaagctgacattccacttgttgttctgtacgatacctcaggagaagatgatatcaatatcaatgccacctgcttgaaggctatatgtgacaagtcactagaggttcacctgcaggttgacgccatgtacacaaatgtcaaagtaactaatatttgctctgatgggacactctactgccaggtgccttgtaagggtctgaacaagctcagtgaccttctacgtaagatagaggactacttccattgcaagcacatgacctctgagtgctttgtttcattacccttctgtgggaaaatctgcctcttccattgcaaaggaaaatggttacgagtagagatcacaaatgttcacagcagccgggctcttgatgttcagttcctggactctggcactgtgacatctgtaaaagtgtcagagctcagggaaattccacctcggtttctacaagaaatgattgcaataccacctcaggccattaagtgctgtttagcagatcttccacaatctattggcatgtggacaccagatgcagtgctgtggttaagagattctgttttgaattgctcggactgtagcattaaggttacaaaagtggatgaaaccagagggatcgcacatgtttatttatttacccctaagaacttccctgaccctcatcgcagtattaatcgccagattacaaatgcagacttgtggaagcatcagaaggatgtgtttttgagtgccatatccagtggagctgactctcccaacagcaaaaatggcaacatgcccatgtcgggcaacactggagagaatttcagaaagaacctcacagatgtcatcaaaaagtccatggtggaccatacgagcgctttctccacagaggaactgccacctcctgtccacttatcaaagccaggggaacacatggatgtgtatgtgcctgtggcctgtcacccaggctacttcgtcatccagccttggcaggagatacataagttggaagttctgatggaagagatgattctatattacagcgtgtctgaagagcgccacatagcagtggagaaagaccaagtgtatgctgcaaaagtggaaaataagtggcacagggtgcttttaaaaggaatcctgaccaatggactggtatctgtgtatgagctggattatggcaaacacgaattagtcaacataagaaaagtacagcccctagtggacatgttccgaaagctgcccttccaagcagtcacagctcaacttgcaggagtgaagtgcaaccagtggtctgaggaggcttctatggtgtttcgaaatcatgtggagaagaaacctctggtggcactggtgcagacagtcattgaaaatgctaacccttgggaccggaaagtagtggtctacttagtggacacatcgttgccagacaccgatacctggattcatgattttatgtcagagtatctgatagagctttcaaaagttaattaatgactgcctctgaaaccttgacaactaattcagattttttagcaataacaaaatgtagtaggcttaaaaaaaatcttaactctgctacatggctctgactgctgtgggggattgaaaagaatatgcttatgtttgatgaaagatatttaacaagttttgttttaacagagttgacttttcaaagaaaattgtacttgaattattactataatattagaataaaaatgtttatcaatat

SEQ ID NO: 33166 - DNA, 1887 bp, Homo sapiens
  source 1..1887: mol_type = unassigned DNA
attgctgctgagaattatgggctggatgtgaagaataaaaaaggtagctcggtattttgtgcagtagcaagctcttgggacagcggtgattgtagcaatccgggcctgaacttgttccccacatccccttgaagctgacagagatgatttctccctttatttggagaaaccccagctacttagcaccagtcttgcttcgcttgaattgaactttgtctggtggtatgctatgttgactatggttttagtgaaaatgttgaaaaaagcaaagcatacaaattaaacccgaagttttgttcactctcatttcaagctacaaaatgtaagcttgcaggcttggaagtcctaagcgatgaccctgatctagtgaaggtggttgaatctttaacttgtggaaagatctttgcagtggaaatacttgacaaagctgacattccacttgttgttctgtacgatacctcaggagaagatgatatcaatatcaatgccacctgcttgaaggctatatgtgacaagtcactagaggttcacctgcaggttgacgccatgtacacaaatgtcaaagtaactaatatttgctctgatgggacactctactgccaggtgccttgtaagggtctgaacaagctcagtgaccttctacgtaagatagaggactacttccattgcaagatcacaaatgttcacagcagccgggctcttgatgttcagttcctggactctggcactgtgacatctgtaaaagtgtcagagctcagggaaattccacctcggtttctacaagaaatgattgcaataccacctcaggccattaagtgctgtttagcagatcttccacaatctattggcatgtggacaccagatgcagtgctgtggttaagagattctgttttgaattgctcggactgtagcattaaggttacaaaagtggatgaaaccagagggatcgcacatgtttatttatttacccctaagaacttccctgaccctcatcgcagtattaatcgccagattacaaatgcagacttgtggaagcatcagaaggatgtgtttttgagtgccatatccagtggagctgactctcccaacagcaaaaatggcaacatgcccatgtcgggcaacactggagagaatttcagaaagaacctcacagatgtcatcaaaaagtccatggtggaccatacgagcgctttctccacagaggaactgccacctcctgtccacttatcaaagccaggggaacacatggatgtgtatgtgcctgtggcctgtcacccaggctacttcgtcatccagccttggcaggagatacataagttggaagttctgatggaagagatgattctatattacagcgtgtctgaagagcgccacatagcagtggagaaagaccaagtgtatgctgcaaaagtggaaaataagtggcacagggtgcttttaaaaggaatcctgaccaatggactggtatctgtgtatgagctggattatggcaaacacgaattagtcaacataagaaaagtacagcccctagtggacatgttccgaaagctgcccttccaagcagtcacagctcaacttgcaggagtgaagtgcaaccagtggtctgaggaggcttctatggtgtttcgaaatcatgtggagaagaaacctctggtggcactggtgcagacagtcattgaaaatgctaacccttgggaccggaaagtagtggtctacttagtggacacatcgttgccagacaccgatacctggattcatgattttatgtcagagtatctgatagagctttcaaaagttaattaatgactgcctctgaaaccttgacaactaattcagattttttagcaataacaaaatgtagtaggcttaaaaaaaatcttaactctg

SEQ ID NO: 33167 - DNA, 2896 bp, Homo sapiens
  source 1..2896: mol_type = unassigned DNA
gtcatttccggcgcgccggccacggtgcttccgggttctggtgtaggagcggcgtcttctcgcgcggatggtgaagctgaatttggtacgctggaccctcggacagacagcaagagagagacaagcccgaggcctgacttctagcactcctgagtttgagccctatgagcagtggaacctaggttcttcagctttggaacttgactggctctccttgctcctcagcctgcagacagcctattgtgggaccttttgatcgtgaccaccaaggatccagatataattctttcctcagtaatagaaaaaagaatctgggatctaagaagatacctactcattttctaagtgactggccatgtcattgtcccacttataccgggatggggaaggccgcattgatgatgatgatgacgagcgggagaactttgagatcactgactgggatctccagaatgagttcaaccccaaccgacagcgccactggcagaccaaggaagaagccacctacggggtgtgggcagagcgagactcggatgatgagaggcccagctttggaggcaaacgggcccgtgactactctgcgccagtcaacttcatcagcgcagggctcaagaaaggggcagcggaggaggcagagttggaagattctgatgacgaagagaaacctgttaagcaggacgactttcctaaggattttggaccaaggaagctaaaaacgggtggcaattttaagcccagccagaaaggttttgcaggaggaaccaaatctttcatggacttcggcagctgggaaagacacacaaaaggaattggacagaagcttcttcagaagatgggctacgtccctggacggggcctcgggaagaatgcacaaggtatcattaacccaattgaagccaagcagagaaagggaaaaggtgctgtgggggcttatggatccgagcgcaccactcagtccatgcaagacttccctgtggttgactcagaggaagaagctgaagaggagtttcagaaggagctgagccagtggaggaaagacccaagtggaagcaagaagaagcccaaatactcttacaagaccgtggaagagttgaaggccaagggcaggattagcaagaagctcactgctccccagaaggaactttctcaagtcaaggtcatagacatgacaggccgggagcagaaggtctactacagctacagtcagatcagccacaagcacaacgttcccgatgatgggctgccgctacagtcccaacagctgccacagtctggcaaagaggccaaggcccccggcttcgcgctgcccgagctggagcacaacctgcagctgctcatcgacctcacggagcaggagatcatccagaatgaccggcagctacagtatgagcgggacatggtggtcaacctcttccacgagctggagaagatgaccgaggtcctggaccacgaggagcgggtcatctcgaacctcagcaaggtcctggagatggtggaggagtgcgagcggcggatgcagcccgactgcagcaaccccctcaccctggacgagtgtgcccgcatcttcgaaaccctgcaggacaagtactatgaggagtacaggatgtccgaccgtgtggaccttgctgtggccatcgtctatccactcatgaaggagtacttcaaggagtgggatcccctcaaagactgcacttatggcaccgagatcatctctaagtggaaaagcctcctagagaatgaccagctcttgtcccatggcggacaggacctctcagcagatgcctttcacaggttgatatgggaagtctggatgccttttgttcgaaatattgtcacccagtggcagccaaggaactgtgacccgatggtggactttttggatagttgggtgcacattattcctgtgtggatcttagataacatactggaccaactcatcttccccaagctgcaaaaggaggtggaaaactggaacccgctcacagacactgttcccatccactcttggatccacccatggctgccccttatgcaggcacggctggagccactctattcccccatccgtagtaagctgtccagcgccctgcagaagtggcaccccagcgactcctctgccaagctcatcctccagccctggaaggatgtcttcactcctggctcctgggaagcattcatggtcaaaaacatagtgcccaagctggggatgtgtcttggtgagctagtcattaacccccaccagcagcacatggatgcattctattgggtgattgactgggaagggatgatctctgtctctagcctggtgggacttcttgaaaagcacttcttccccaagtggcttcaggtgctgtgctcttggctcagtaacagcccaaattatgaggagatcaccaagtggtacctgggttggaagtcgatgttctcagaccaagtgctggcacatccatctgtcaaggacaaatttaatgaggcacttgatatcatgaaccgggcggtgtcctccaacgttggtgcctacatgcagccaggagcacgggagaacattgcctatctcacccacacggagcggaggaaggacttccagtacgaggccatgcaggagaggcgggaggctgagaacatggctcagaggggcattggcgtggccgctagctctgtgcccatgaactttaaggacctcattgagaccaaggctgaggagcacaacattgtcttcatgcccgtcattgggaagcgacacgaagggaagcagctctacacctttggccgcattgtgatctacatcgaccggggagtggtctttgtccagggcgagaagacgtgggtgcccacctcactgcagagcctgatcgacatggccaagtgaactgtggcaggtccagaaccagtcaga

SEQ ID NO: 33168 - DNA, 2789 bp, Homo sapiens
  source 1..2789: mol_type = unassigned DNA
atttccggcgcgccggccacggtgcttccgggttctggtgtaggagcggcgtcttctcgcgcggatggtgaagctgaatttggtacgctggaccctcggacagacagcaagagagagacaagcccgaggcctgacttctagcactcctgagtttgagccctatgagcagtggaacctaggtgactggccatgtcattgtcccacttataccgggatggggaaggccgcattgatgatgatgatgacgagcgggagaactttgagatcactgactgggatctccagaatgagttcaaccccaaccgacagcgccactggcagaccaaggaagaagccacctacggggtgtgggcagagcgagactcggatgatgagaggcccagctttggaggcaaacgggcccgtgactactctgcgccagtcaacttcatcagcgcagggctcaagaaaggggcagcggaggaggcagagttggaagattctgatgacgaagagaaacctgttaagcaggacgactttcctaaggattttggaccaaggaagctaaaaacgggtggcaattttaagcccagccagaaaggttttgcaggaggaaccaaatctttcatggacttcggcagctgggaaagacacacaaaaggaattggacagaagcttcttcagaagatgggctacgtccctggacggggcctcgggaagaatgcacaaggtatcattaacccaattgaagccaagcagagaaagggaaaaggtgctgtgggggcttatggatccgagcgcaccactcagtccatgcaagacttccctgtggttgactcagaggaagaagctgaagaggagtttcagaaggagctgagccagtggaggaaagacccaagtggaagcaagaagaagcccaaatactcttacaagaccgtggaagagttgaaggccaagggcaggattagcaagaagctcactgctccccagaaggaactttctcaagtcaaggtcatagacatgacaggccgggagcagaaggtctactacagctacagtcagatcagccacaagcacaacgttcccgatgatgggctgccgctacagtcccaacagctgccacagtctggcaaagaggccaaggcccccggcttcgcgctgcccgagctggagcacaacctgcagctgctcatcgacctcacggagcaggagatcatccagaatgaccggcagctacagtatgagcgggacatggtggtcaacctcttccacgagctggagaagatgaccgaggtcctggaccacgaggagcgggtcatctcgaacctcagcaaggtcctggagatggtggaggagtgcgagcggcggatgcagcccgactgcagcaaccccctcaccctggacgagtgtgcccgcatcttcgaaaccctgcaggacaagtactatgaggagtacaggatgtccgaccgtgtggaccttgctgtggccatcgtctatccactcatgaaggagtacttcaaggagtgggatcccctcaaagactgcacttatggcaccgagatcatctctaagtggaaaagcctcctagagaatgaccagctcttgtcccatggcggacaggacctctcagcagatgcctttcacaggttgatatgggaagtctggatgccttttgttcgaaatattgtcacccagtggcagccaaggaactgtgacccgatggtggactttttggatagttgggtgcacattattcctgtgtggatcttagataacatactggaccaactcatcttccccaagctgcaaaaggaggtggaaaactggaacccgctcacagacactgttcccatccactcttggatccacccatggctgccccttatgcaggcacggctggagccactctattcccccatccgtagtaagctgtccagcgccctgcagaagtggcaccccagcgactcctctgccaagctcatcctccagccctggaaggatgtcttcactcctggctcctgggaagcattcatggtcaaaaacatagtgcccaagctggggatgtgtcttggtgagctagtcattaacccccaccagcagcacatggatgcattctattgggtgattgactgggaagggatgatctctgtctctagcctggtgggacttcttgaaaagcacttcttccccaagtggcttcaggtgctgtgctcttggctcagtaacagcccaaattatgaggagatcaccaagtggtacctgggttggaagtcgatgttctcagaccaagtgctggcacatccatctgtcaaggacaaatttaatgaggcacttgatatcatgaaccgggcggtgtcctccaacgttggtgcctacatgcagccaggagcacgggagaacattgcctatctcacccacacggagcggaggaaggacttccagtacgaggccatgcaggagaggcgggaggctgagaacatggctcagaggggcattggcgtggccgctagctctgtgcccatgaactttaaggacctcattgagaccaaggctgaggagcacaacattgtcttcatgcccgtcattgggaagcgacacgaagggaagcagctctacacctttggccgcattgtgatctacatcgaccggggagtggtctttgtccagggcgagaagacgtgggtgcccacctcactgcagagcctgatcgacatggccaagtgaactgtggcaggtccagaaccagtcagagacttgcccctaagagggatgtactgtaaataaacagtatttttagatcaccttcaaaa

SEQ ID NO: 33169 - DNA, 2974 bp, Homo sapiens
  source 1..2974: mol_type = unassigned DNA
acaaggggactcagcgccagtgagagtagggacgaaggctcagggaaggcgagcttcggtccaagccgttggggtgtggggaggggaatccatttcgtagacagctctgccgaggcacggagaggggcggtgctgcttggggtcaactgggatttagggcttggattcatttaagaacctgagcttccttcaccaaacctagacagcaagagagagacaagcccgaggcctgacttctagcactcctgagtttgagccctatgagcagtggaacctagggaccaccaaggatccagatataattctttcctcagtaatagaaaaaagaatctgggatctaagaagatacctactcattttctaagtgactggccatgtcattgtcccacttataccgggatggggaaggccgcattgatgatgatgatgacgagcgggagaactttgagatcactgactgggatctccagaatgagttcaaccccaaccgacagcgccactggcagaccaaggaagaagccacctacggggtgtgggcagagcgagactcggatgatgagaggcccagctttggaggcaaacgggcccgtgactactctgcgccagtcaacttcatcagcgcagggctcaagaaaggggcagcggaggaggcagagttggaagattctgatgacgaagagaaacctgttaagcaggacgactttcctaaggattttggaccaaggaagctaaaaacgggtggcaattttaagcccagccagaaaggttttgcaggaggaaccaaatctttcatggacttcggcagctgggaaagacacacaaaaggaattggacagaagcttcttcagaagatgggctacgtccctggacggggcctcgggaagaatgcacaaggtatcattaacccaattgaagccaagcagagaaagggaaaaggtgctgtgggggcttatggatccgagcgcaccactcagtccatgcaagacttccctgtggttgactcagaggaagaagctgaagaggagtttcagaaggagctgagccagtggaggaaagacccaagtggaagcaagaagaagcccaaatactcttacaagaccgtggaagagttgaaggccaagggcaggattagcaagaagctcactgctccccagaaggaactttctcaagtcaaggtcatagacatgacaggccgggagcagaaggtctactacagctacagtcagatcagccacaagcacaacgttcccgatgatgggctgccgctacagtcccaacagctgccacagtctggcaaagaggccaaggcccccggcttcgcgctgcccgagctggagcacaacctgcagctgctcatcgacctcacggagcaggagatcatccagaatgaccggcagctacagtatgagcgggacatggtggtcaacctcttccacgagctggagaagatgaccgaggtcctggaccacgaggagcgggtcatctcgaacctcagcaaggtcctggagatggtggaggagtgcgagcggcggatgcagcccgactgcagcaaccccctcaccctggacgagtgtgcccgcatcttcgaaaccctgcaggacaagtactatgaggagtacaggatgtccgaccgtgtggaccttgctgtggccatcgtctatccactcatgaaggagtacttcaaggagtgggatcccctcaaagactgcacttatggcaccgagatcatctctaagtggaaaagcctcctagagaatgaccagctcttgtcccatggcggacaggacctctcagcagatgcctttcacaggttgatatgggaagtctggatgccttttgttcgaaatattgtcacccagtggcagccaaggaactgtgacccgatggtggactttttggatagttgggtgcacattattcctgtgtggatcttagataacatactggaccaactcatcttccccaagctgcaaaaggaggtggaaaactggaacccgctcacagacactgttcccatccactcttggatccacccatggctgccccttatgcaggcacggctggagccactctattcccccatccgtagtaagctgtccagcgccctgcagaagtggcaccccagcgactcctctgccaagctcatcctccagccctggaaggatgtcttcactcctggctcctgggaagcattcatggtcaaaaacatagtgcccaagctggggatgtgtcttggtgagctagtcattaacccccaccagcagcacatggatgcattctattgggtgattgactgggaagggatgatctctgtctctagcctggtgggacttcttgaaaagcacttcttccccaagtggcttcaggtgctgtgctcttggctcagtaacagcccaaattatgaggagatcaccaagtggtacctgggttggaagtcgatgttctcagaccaagtgctggcacatccatctgtcaaggacaaatttaatgaggcacttgatatcatgaaccgggcggtgtcctccaacgttggtgcctacatgcagccaggagcacgggagaacattgcctatctcacccacacggagcggaggaaggacttccagtacgaggccatgcaggagaggcgggaggctgagaacatggctcagaggggcattggcgtggccgctagctctgtgcccatgaactttaaggacctcattgagaccaaggctgaggagcacaacattgtcttcatgcccgtcattgggaagcgacacgaagggaagcagctctacacctttggccgcattgtgatctacatcgaccggggagtggtctttgtccagggcgagaagacgtgggtgcccacctcactgcagagcctgatcgacatggccaagtgaactgtggcaggtccagaaccagtcagagacttgcccctaagagggatgtactgtaaataaacagtatttttagatcaccttcaaaa

SEQ ID NO: 33170 - DNA, 3586 bp, Homo sapiens
  source 1..3586: mol_type = unassigned DNA
actaacgtcatttccggcgcgccggccacggtgcttccgggttctggtgtaggagcggcgtcttctcgcgcggatggtgaagctgaatttggtacgctggaccctcggacagacagcaagagagagacaagcccgaggcctgacttctagcactcctgagtttgagccctatgagcagtggaacctagggaccaccaaggatccagatataattctttcctcagtaatagaaaaaagaatctgggatctaagaagatacctactcattttctaagtgactggccatgtcattgtcccacttataccgggatggggaaggccgcattgatgatgatgatgacgagcgggagaactttgagatcactgactgggatctccagaatgagttcaaccccaaccgacagcgccactggcagaccaaggaagaagccacctacggggtgtgggcagagcgagactcggatgatgagaggcccagctttggaggcaaacgggcccgtgactactctgcgccagtcaacttcatcagcgcagggctcaagaaaggggcagcggaggaggcagagttggaagattctgatgacgaagagaaacctgttaagcaggacgactttcctaaggattttggaccaaggaagctaaaaacgggtggcaattttaagcccagccagaaaggttttgcaggaggaaccaaatctttcatggacttcggcagctgggaaagacacacaaaaggaattggacagaagcttcttcagaagatgggctacgtccctggacggggcctcgggaagaatgcacaaggtatcattaacccaattgaagccaagcagagaaagggaaaaggtgctgtgggggcttatggatccgagcgcaccactcagtccatgcaagacttccctgtggttgactcagaggaagaagctgaagaggagtttcagaaggagctgagccagtggaggaaagacccaagtggaagcaagaagaagcccaaatactcttacaagaccgtggaagagttgaaggccaagggcaggattagcaagaagctcactgctccccagaaggaactttctcaagtcaaggtcatagacatgacaggccgggagcagaaggtctactacagctacagtcagatcagccacaagcacaacgttcccgatgatgggctgccgctacagtcccaacagctgccacagtctggcaaagaggccaaggcccccggcttcgcgctgcccgagctggagcacaacctgcagctgctcatcgacctcacggagcaggagatcatccagaatgaccggcagctacagtatgagcgggacatggtggtcaacctcttccacgagctggagaagatgaccgaggtcctggaccacgaggagcgggtcatctcgaacctcagcaaggtcctggagatggtggaggagtgcgagcggcggatgcagcccgactgcagcaaccccctcaccctggacgagtgtgcccgcatcttcgaaaccctgcaggacaagtactatgaggagtacaggatgtccgaccgtgtggaccttgctgtggccatcgtctatccactcatgaaggagtacttcaaggagtgggatcccctcaaagactgcacttatggcaccgagatcatctctaagtggaaaagcctcctagagaatgaccagctcttgtcccatggcggacaggacctctcagcagatgcctttcacaggttgatatgggaagtctggatgccttttgttcgaaatattgtcacccagtggcagccaaggaactgtgacccgatggtggactttttggatagttgggtgcacattattcctgtgtggatcttagataacatactggaccaactcatcttccccaagctgcaaaaggaggtggaaaactggaacccgctcacagacactgttcccatccactcttggatccacccatggctgccccttatgcaggcacggctggagccactctattcccccatccgtagtaagctgtccagcgccctgcagaagtggcaccccagcgactcctctgccaagctcatcctccagccctggaaggatgtcttcactcctggctcctgggaagcattcatggtcaaaaacatagtgcccaagctggggatgtgtcttggtgagctagtcattaacccccaccagcagcacatggatgcattctattgggtgattgactgggaagggatgatctctgtctctagcctggtgggacttcttgaaaagcacttcttccccaagtggcttcaggtgctgtgctcttggctcagtaacagcccaaattatgaggagatcaccaagtggtacctgggttggaagtcgatgttctcagaccaagtgctggcacatccatctgtcaaggacaaatttaatgaggcacttgatatcatgaaccgggcggtgtcctccaacgttggtgcctacatgcagccaggagcacgggagaacattgcctatctcacccacacggagcggaggaaggacttccagtacgaggccatgcaggagaggcgggaggctgagaacatggctcagaggggcattggcgtggccgctagctctgtgcccatgaactttaaggacctcattgagaccaaggctgaggagcacaacattgtcttcatgcccgtcattgggaagcgacacgaagggaagcagctctacacctttggccgcattgtgatctacatcgaccggggagtggtctttgtccagggcgagaagacgtgggtgcccacctcactgcagagcctgatcgacatggccaagtgaactgtggcaggtccagaaccagtcagagacttgcccctaagagggatgtactgtaaataaacagtatttttagatcaccttcaaaagggtaacttctttactcaggagctactccacatcaggccaggtcatgagggaaggatgtaaaatgggacaatgccacgtagggcaggaatctttataccaagtcctcatgtggggtatcgtcctcaaaacaggacagccaagttgatgttctttcctggcaaaggagttctctgtagttcctccatagcagccttccctttagtctctggtggcagcttctacctcagccaacactgagtacctcacaacgagttcagtcagtagcagaaggatcttctctcttgttcctgatgatttcaaggtcctcacagtcctgataatctggttcttcccgaaactcccaaatatctatggagagctgttctagcttttgcacagggaaccagtggacagaggtatcattaaatatgtccatgtattgtgaagtctgaggaaactcaagctcctccagtccttttaaaatctgagcagaaaaattcaagtataaaaacttcagatagtcacagtaatccccactcttctgggataaatttccactttacttgtcatccccactttactttttaaaaaaataacaaatagggtattttgatttaaatgcttttgcacaatgaattgggcgccccaaggacagtggatatcatggactgtgatactaagaataaaggaaataaggaaaaaactaagagatgcattaaaga

SEQ ID NO: 33171 - DNA, 563 bp, Homo sapiens
  source 1..563: mol_type = unassigned DNA
acggtgcttccgggttctggtgtaggagcggcgtcttctcgcgcggatggtgaagctgaatttggtacgctggaccctcggacagacagcaagagagagacaagcccgaggcctgacttctagcactcctgagtttgagccctatgagcagtggaacctaggttcttcagctttggaacttgactggctctccttgctcctcagcctgcagacagcctattgtgggaccttttgatcgttaatagaaaaaagaatctgggatctaagaagatacctactcattttctaagtgactggccatgtcattgtcccacttataccgggatggggaaggccgcattgatgatgatgatgacgagcgggagaactttgagatcactgactgggatctccagaatgagttcaaccccaaccgacagcgccactggcagaccaaggaagaagccacctacggggtgtgggcagagcgagactcggatgatgagaggcccagctttggaggcaaacgggcccgtgactactctgcgccagtcaacttcatcagcgcagggctcaagaaaggg

SEQ ID NO: 33172 - DNA, 525 bp, Homo sapiens
  source 1..525: mol_type = unassigned DNA
atttccggcgcgccggccacggtgcttccgggttctggtgtaggagcggcgtcttctcgcgcggatggtgaagctgaatttggtacgctggaccctcggacagacagcaagagagagacaagcccgaggcctgacttctagcactcctgagtttgagccctatgagcagtggaacctagggatccagatataattctttcctcagtaatagaaaaaagaatctgggatctaagaagatacctactcattttctaagtgactggccatgtcattgtcccacttataccgggatggggaaggccgcattgatgatgatgatgacgagcgggagaactttgagatcactgactgggatctccagaatgagttcaaccccaaccgacagcgccactggcagaccaaggaagaagccacctacggggtgtgggcagagcgagactcggatgatgagaggcccagctttggaggcaaacgggcccgtgactactctgcgccagtcaacttcatcagcgcagggctcaagaa

SEQ ID NO: 33173 - DNA, 595 bp, Homo sapiens
  source 1..595: mol_type = unassigned DNA
gcgcgccggccacggtgcttccgggttctggtgtaggagcggcgtcttctcgcgcggatggtgaagctgaatttggtacgctggaccctcggacagacagcaagagagagacaagcccgaggcctgacttctagcactcctgagtttgagccctatgagcagtggaacctaggctgccagcacggcaagaatataagcaggcagaaaaatgtgaaaagagagactggcctagcctcccagcctatatctttctcctgtgctggatgcttcctgccctcgaacattggacttcaagttcttcagctttggaacttgactggctctccttgctcctcagcctgcagacagcctattgtgggaccttttgatcgtgaccaccaaggatccagatataattctttcctcagtaatagaaaaaagaatctgggatctaagaagatacctactcattttctaagtgactggccatgtcattgtcccacttataccgggatggggaaggccgcattgatgatgatgatgacgagcgggagaactttgagatcactgactgggatctccagaatgagttcaaccccaaccgacagcgccactg

SEQ ID NO: 33174 - DNA, 1650 bp, Homo sapiens
  source 1..1650: mol_type = unassigned DNA
atgtcattgtcccacttataccgggatggggaaggccgcattgatgatgatgatgacgagcgggagaactttgagatcactgactgggatctccagaatgagttcaacctcttccacgagctggagaagatgaccgaggtcctggaccacgaggagcgggtcatctcgaacctcagcaaggtcctggagatggtggaggagtgcgagcggcggatgcagcccgactgcagcaaccccctcaccctggacgagtgtgcccgcatcttcgaaaccctgcaggacaagtactatgaggagtacaggatgtccgaccgtgtggaccttgctgtggccatcgtctatccactcatgaaggagtacttcaaggagtgggatcccctcaaagactgcacttatggcaccgagatcatctctaagtggaaaagcctcctagagaatgaccagctcttgtcccatggcggacaggacctctcagcagatgcctttcacaggttgatatgggaagtctggatgccttttgttcgaaatattgtcacccagtggcagccaaggaactgtgacccgatggtggactttttggatagttgggtgcacattattcctgtgtggatcttagataacatactggaccaactcatcttccccaagctgcaaaaggaggtggaaaactggaacccgctcacagacactgttcccatccactcttggatccacccatggctgccccttatgcaggcacggctggagccactctattcccccatccgtagtaagctgtccagcgccctgcagaagtggcaccccagcgactcctctgccaagctcatcctccagccctggaaggatgtcttcactcctggctcctgggaagcattcatggtcaaaaacatagtgcccaagctggggatgtgtcttggtgagctagtcattaacccccaccagcagcacatggatgcattctattgggtgattgactgggaagggatgatctctgtctctagcctggtgggacttcttgaaaagcacttcttccccaagtggcttcaggtgctgtgctcttggctcagtaacagcccaaattatgaggagatcaccaagtggtacctgggttggaagtcgatgttctcagaccaagtgctggcacatccatctgtcaaggacaaatttaatgaggcacttgatatcatgaaccgggcggtgtcctccaacgttggtgcctacatgcagccaggagcacgggagaacattgcctatctcacccacacggagcggaggaaggacttccagtacgaggccatgcaggagaggcgggaggctgagaacatggctcagaggggcattggcgtggccgctagctctgtgcccatgaactttaaggacctcattgagaccaaggctgaggagcacaacattgtcttcatgcccgtcattgggaagcgacacgaagggaagcagctctacacctttggccgcattgtgatctacatcgaccggggagtggtctttgtccagggcgagaagacgtgggtgcccacctcactgcagagcctgatcgacatggccaagtgaactgtggcaggtccagaaccagtcagagacttgcccctaagagggatgtactgtaaataaacagtatttttagatcacctt

SEQ ID NO: 33175 - DNA, 571 bp, Homo sapiens
  source 1..571: mol_type = unassigned DNA
ctggacggggcctcgggaagaatgcacaaggtatcattaacccaattgaagccaagcagagaaagggaaaaggtgctgtgggggcttatggatccgagcgcaccactcagtccatgcaagacttccctgtggttgactcagaggaagaagctgaagagtggttgttccttgctgcatctgactgtattcttctggttcaggagtttcagaaggagctgagccagtggaggaaagacccaagtggaagcaagaagaagcccaaatactcttacaagaccgtggaagagttgaaggccaagggcaggattagcaagaagctcactgctccccagaaggaactttctcaagtcaaggtcatagacatgacaggccgggagcagaaggtctactacagctacagtcagatcagccacaagcacaacgttcccgatgatgggctgccgctacagtcccaacagctgccacagtctggcaaagaggccaaggcccccggcttcgcgctgcccgagctggagcacaacctgcagctgctcatcgacctcacggagcaggagatcatccagaatgaccg

SEQ ID NO: 33176 - DNA, 638 bp, Homo sapiens
  source 1..638: mol_type = unassigned DNA
ggtgtaggagcggcgtcttctcgcgcggatggtgaagctgaatttggtacgctggaccctcggacagacagcaagagagagacaagcccgaggcctgacttctagcactcctgagtttgagccctatgagcagtggaacctaggcctgcagacagcctattgtgggaccttttgatcgtgaccaccaaggatccagatataattctttcctcagtaatagaaaaaagaatctgggatctaagaagatacctactcattttctaagtgactggccatgtcattgtcccacttataccgggatggggaaggccgcattgatgatgatgatgacgagcgggagaactttgagatcactgactgggatctccagaatgagttcaaccccaaccgacagcgccactggcagaccaaggaagaagccacctacggggtgtgggcagagcgagactcggatgatgagaggcccagctttggaggcaaacgggcccgtgactactctgcgccagtcaacttcatcagcgcagggctcaagaaaggggcagcggaggaggcagagttggaagattctgatgacgaagagaaacctgttaagcaggacgactttcctaaggattttggaccaaggaagctaaaaacgg

SEQ ID NO: 33177 - DNA, 1476 bp, Homo sapiens
  source 1..1476: mol_type = unassigned DNA
cgagactccatctcaaaaacaaaacaaataaacgaacaaaaaaacccacaacgtattattttcttgtttacgaggtttcttgtctctctggctccaccagaagaggagcagggacccttcttgctgttgttcattgctgcatcccccacaccgagagcagagcctggcatgggcagaaagtcctcagtcgatatttggtggccccaagcgaatgaagcatccaagaagggaaagctgggggctccccactgcacttgccacctgagtcacattttcagaagcctctggaaagtcgtgcacagcccaggagtgttgagcaatttcggtttcctctgaggttgaaggacccaggcgtgtcagccctgctccagacaccttgggcatggaggagagtgtcgtacggccctcagtgtttgtggtggatggacagaccgacatcccattcacgaggctgggacgaagccaccggagacagtcgtgcagtgtggcccgggtgggtctgggtctcttgctgttgctgatgggggccgggctggccgtccaaggctggttcctcctgcagctgcactggcgtctaggagagatggtcacccgcctgcctgacggacctgcaggctcctgggagcagctgatacaagagcgaaggtctcacgaggtcaacccagcagcgcatctcacaggggccaactccagcttgaccggcagcggggggccgctgttatgggagactcagctgggcctggccttcctgaggggcctcagctaccacgatggggcccttgtggtcaccaaagctggctactactacatctactccaaggtgcagctgggcggtgtgggctgcccgctgggcctggccagcaccatcacccacggcctctacaagcgcacaccccgctaccccgaggagctggagctgttggtcagccagcagtcaccctgcggacgggccaccagcagctcccgggtctggtgggacagcagcttcctgggtggtgtggtacacctggaggctggggagaaggtggtcgtccgtgtgctggatgaacgcctggttcgactgcgtgatggtacccggtcttacttcggggctttcatggtgtgaaggaaggagcgtggtgcattggacatgggtctgacacgtggagaactcagagggtgcctcaggggaaagaaaactcacgaagcagaggctgggcgtggtggctctcgcctgtaatcccagcactttgggaggccaaggcaggcggatcacctgaggtcaggagttcgagaccagcctggctaacatggcaaaaccccatctctactaaaaatacaaaaattagccggacgtggtggtgcctgcctgtaatccagctactcaggaggctgaggcaggataattttgcttaaacccgggaggcggaggttgcagtgagccgagatcacaccactgcactccaacctgggaaacgcagtgagactgtgcctcaa

SEQ ID NO: 33178 - DNA, 2195 bp, Homo sapiens
  source 1..2195: mol_type = unassigned DNA
cccgctcgcccgcgcgccccaggacccaaagccgggctccaagtcggcgccccacgtcgaggctccgccgcagcctccggagttggccgcagacaagaaggggagggagcgggagagggaggagagctccgaagcgagagggccgagcgccatgcgccgcgccagcagagactacaccaagtacctgcgtggctcggaggagatgggcggcggccccggagccccgcacgagggccccctgcacgccccgccgccgcctgcgccgcaccagccccctgccgcctcccgctccatgttcgtggccctcctggggctggggctgggccaggttgtctgcagcgtcgccctgttcttctatttcagagcgcagatggatcctaatagaatatcagaagatggcactcactgcatttatagaattttgagactccatgaaaatgcagattttcaagacacaactctggagagtcaagatacaaaattaatacctgattcatgtaggagaattaaacaggcctttcaaggagctgtgcaaaaggaattacaacatatcgttggatcacagcacatcagagcagagaaagcgatggtggatggctcatggttagatctggccaagaggagcaagcttgaagctcagccttttgctcatctcactattaatgccaccgacatcccatctggttcccataaagtgagtctgtcctcttggtaccatgatcggggttgggccaagatctccaacatgacttttagcaatggaaaactaatagttaatcaggatggcttttattacctgtatgccaacatttgctttcgacatcatgaaacttcaggagacctagctacagagtatcttcaactaatggtgtacgtcactaaaaccagcatcaaaatcccaagttctcataccctgatgaaaggaggaagcaccaagtattggtcagggaattctgaattccatttttattccataaacgttggtggattttttaagttacggtctggagaggaaatcagcatcgaggtctccaacccctccttactggatccggatcaggatgcaacatactttggggcttttaaagttcgagatatagattgagccccagtttttggagtgttatgtatttcctggatgtttggaaacattttttaaaacaagccaagaaagatgtatataggtgtgtgagactactaagaggcatggccccaacggtacacgactcagtatccatgctcttgaccttgtagagaacacgcgtatttacagccagtgggagatgttagactcatggtgtgttacacaatggtttttaaattttgtaatgaattcctagaattaaaccagattggagcaattacggggtgaccttatgagaaactgcatgtgggctatgggaggggttggtccctggtcatgtgccccttcgcagctgaagtggagagggtgtcatctagcgcaattgaaggatcatctgaaggggcaaattcttttgaattgttacatcatgctggaacctgcaaaaaatactttttctaatgaggagagaaaatatatgtatttttatataatatctaaagttatatttcagatgtaatgttttctttgcaaagtattgtaaattatatttgtgctatagtatttgattcaaaatatttaaaaatgtcttgctgttgacatatttaatgttttaaatgtacagacatatttaactggtgcactttgtaaattccctggggaaaacttgcagctaaggaggggaaaaaaatgttgtttcctaatatcaaatgcagtatatttcttcgttctttttaagttaatagattttttcagacttgtcaagcctgtgcaaaaaaattaaaatggatgccttgaataataagcaggatgttggccaccaggtgcctttcaaatttagaaactaattgactttagaaagctgacattgccaaaaaggatacataatgggccactgaaatctgtcaagagtagttatataattgttgaacaggtgtttttccacaagtgccgcaaattgtaccttttttgttttttcaaaatagaaaagttattagtggtttatcagcaaaaaagtccaattttaatttagtaaatgttatcttatactgtacaataaaaacattgcctttgaatgttaattttttggtacaaaaataaatttatatgaaaa

SEQ ID NO: 33179 - DNA, 1520 bp, Homo sapiens
  source 1..1520: mol_type = unassigned DNA
ctgaaagcaaatggtgtggccgaagctgcctctctggtggcatagctaagaccaagctgcacgcagtgaaaacacagtttgttttcactgacaacaaggcagaatgtgtaccagggatgtgacgtggggaaccaggaagaggacagtctgaggatcattattaaagggactccatccaagaaggtttccagccagaggcaagctgtagccagaagaaaagaatgagagatcacctgaataatagaacagaaactgctgaaatattgaacacagatctagatcaaatgaaggaacatattcaggatgaagcataaataaaggccaggcgtggtggctcatgcctggaatctcagctctttgggaggccgaggctattctccatctcctgggctccagtgatcctcacgcctcggccacccaaagtgctgggattatagaagtgaaccactgcgcctggcctattgaaggtttttaatcttcagagtttcgactttatcaacaacacttagaagccaccaaagaattgcagatggatcctaatagaatatcagaagatggcactcactgcatttatagaattttgagactccatgaaaatgcagattttcaagacacaactctggagagtcaagatacaaaattaatacctgattcatgtaggagaattaaacaggcctttcaaggagctgtgcaaaaggaattacaacatatcgttggatcacagcacatcagagcagagaaagcgatggtggatggctcatggttagatctggccaagaggagcaagcttgaagctcagccttttgctcatctcactattaatgccaccgacatcccatctggttcccataaagtgagtctgtcctcttggtaccatgatcggggttgggccaagatctccaacatgacttttagcaatggaaaactaatagttaatcaggatggcttttattacctgtatgccaacatttgctttcgacatcatgaaacttcaggagacctagctacagagtatcttcaactaatggtgtacgtcactaaaaccagcatcaaaatcccaagttctcataccctgatgaaaggaggaagcaccaagtattggtcagggaattctgaattccatttttattccataaacgttggtggattttttaagttacggtctggagaggaaatcagcatcgaggtctccaacccctccttactggatccggatcaggatgcaacatactttggggcttttaaagttcgagatatagattgagccccagtttttggagtgttatgtatttcctggatgtttggaaacattttttaaaacaagccaagaaagatgtatataggtgtgtgagactactaagaggcatggccccaacggtacacgactcagtatccatgctcttgaccttgtagagaacacgcgtatttacagccagtgggagatgttagactcatggtgtgttacacaatggtttttaaattttgtaatgaattcctagaattaaaccagattggagcaa

SEQ ID NO: 33180 - DNA, 2198 bp, Homo sapiens
  source 1..2198: mol_type = unassigned DNA
cgctcgcccgcgcgccccaggacccaaagccgggctccaagtcggcgccccacgtcgaggctccgccgcagcctccggagttggccgcagacaagaaggggagggagcgggagagggaggagagctccgaagcgagagggccgagcgccatgcgccgcgccagcagagactacaccaagtacctgcgtggctcggaggagatgggcggcggccccggagccccgcacgagggccccctgcacgccccgccgccgcctgcgccgcaccagccccctgccgcctcccgctccatgttcgtggccctcctggggctggggctgggccaggttgtctgcagcgtcgccctgttcttctatttcagagcgcagatggatcctaatagaatatcagaagatggcactcactgcatttatagaattttgagactccatgaaaatgcagattttcaagacacaactctggagagtcaagatacaaaattaatacctgattcatgtaggagaattaaacaggcctttcaaggagctgtgcaaaaggaattacaacatatcgttggatcacagcacatcagagcagagaaagcgatggtggatggctcatggttagatctggccaagaggagcaagcttgaagctcagccttttgctcatctcactattaatgccaccgacatcccatctggttcccataaagtgagtctgtcctcttggtaccatgatcggggttgggccaagatctccaacatgacttttagcaatggaaaactaatagttaatcaggatggcttttattacctgtatgccaacatttgctttcgacatcatgaaacttcaggagacctagctacagagtatcttcaactaatggtgtacgtcactaaaaccagcatcaaaatcccaagttctcataccctgatgaaaggaggaagcaccaagtattggtcagggaattctgaattccatttttattccataaacgttggtggattttttaagttacggtctggagaggaaatcagcatcgaggtctccaacccctccttactggatccggatcaggatgcaacatactttggggcttttaaagttcgagatatagattgagccccagtttttggagtgttatgtatttcctggatgtttggaaacattttttaaaacaagccaagaaagatgtatataggtgtgtgagactactaagaggcatggccccaacggtacacgactcagtatccatgctcttgaccttgtagagaacacgcgtatttacagccagtgggagatgttagactcatggtgtgttacacaatggtttttaaattttgtaatgaattcctagaattaaaccagattggagcaattacggggtgaccttatgagaaactgcatgtgggctatgggaggggttggtccctggtcatgtgccccttcgcagctgaagtggagagggtgtcatctagcgcaattgaaggatcatctgaaggggcaaattcttttgaattgttacatcatgctggaacctgcaaaaaatactttttctaatgaggagagaaaatatatgtatttttatataatatctaaagttatatttcagatgtaatgttttctttgcaaagtattgtaaattatatttgtgctatagtatttgattcaaaatatttaaaaatgtcttgctgttgacatatttaatgttttaaatgtacagacatatttaactggtgcactttgtaaattccctggggaaaacttgcagctaaggaggggaaaaaaatgttgtttcctaatatcaaatgcagtatatttcttcgttctttttaagttaatagattttttcagacttgtcaagcctgtgcaaaaaaattaaaatggatgccttgaataataagcaggatgttggccaccaggtgcctttcaaatttagaaactaattgactttagaaagctgacattgccaaaaaggatacataatgggccactgaaatctgtcaagagtagttatataattgttgaacaggtgtttttccacaagtgccgcaaattgtaccttttttgttttttcaaaatagaaaagttattagtggtttatcagcaaaaaagtccaattttaatttagtaaatgttatcttatactgtacaataaaaacattgcctttgaatgttaattttttggtacaaaaataaatttatatgaaaacctgc

SEQ ID NO: 33181 - DNA, 2135 bp, Homo sapiens
  source 1..2135: mol_type = unassigned DNA
acagatcacctgaataatagaacagaaactgctgaaatattgaacacagatctagatcaaatgaaggaacatattcaggatgaagcataaataaaggccaggcgtggtggctcatgcctggaatctcagctctttgggaggccgaggctattctccatctcctgggctccagtgatcctcacgcctcggccacccaaagtgctgggattatagaagtgaaccactgcgcctggcctattgaaggtttttaatcttcagagtttcgactttatcaacaacacttagaagccaccaaagaattgcagatggatcctaatagaatatcagaagatggcactcactgcatttatagaattttgagactccatgaaaatgcagattttcaagacacaactctggagagtcaagatacaaaattaatacctgattcatgtaggagaattaaacaggcctttcaaggagctgtgcaaaaggaattacaacatatcgttggatcacagcacatcagagcagagaaagcgatggtggatggctcatggttagatctggccaagaggagcaagcttgaagctcagccttttgctcatctcactattaatgccaccgacatcccatctggttcccataaagtgagtctgtcctcttggtaccatgatcggggttgggccaagatctccaacatgacttttagcaatggaaaactaatagttaatcaggatggcttttattacctgtatgccaacatttgctttcgacatcatgaaacttcaggagacctagctacagagtatcttcaactaatggtgtacgtcactaaaaccagcatcaaaatcccaagttctcataccctgatgaaaggaggaagcaccaagtattggtcagggaattctgaattccatttttattccataaacgttggtggattttttaagttacggtctggagaggaaatcagcatcgaggtctccaacccctccttactggatccggatcaggatgcaacatactttggggcttttaaagttcgagatatagattgagccccagtttttggagtgttatgtatttcctggatgtttggaaacattttttaaaacaagccaagaaagatgtatataggtgtgtgagactactaagaggcatggccccaacggtacacgactcagtatccatgctcttgaccttgtagagaacacgcgtatttacagccagtgggagatgttagactcatggtgtgttacacaatggtttttaaattttgtaatgaattcctagaattaaaccagattggagcaattacggggtgaccttatgagaaactgcatgtgggctatgggaggggttggtccctggtcatgtgccccttcgcagctgaagtggagagggtgtcatctagcgcaattgaaggatcatctgaaggggcaaattcttttgaattgttacatcatgctggaacctgcaaaaaatactttttctaatgaggagagaaaatatatgtatttttatataatatctaaagttatatttcagatgtaatgttttctttgcaaagtattgtaaattatatttgtgctatagtatttgattcaaaatatttaaaaatgtcttgctgttgacatatttaatgttttaaatgtacagacatatttaactggtgcactttgtaaattccctggggaaaacttgcagctaaggaggggaaaaaaatgttgtttcctaatatcaaatgcagtatatttcttcgttctttttaagttaatagattttttcagacttgtcaagcctgtgcaaaaaaattaaaatggatgccttgaataataagcaggatgttggccaccaggtgcctttcaaatttagaaactaattgactttagaaagctgacattgccaaaaaggatacataatgggccactgaaatctgtcaagagtagttatataattgttgaacaggtgtttttccacaagtgccgcaaattgtaccttttttgttttttcaaaatagaaaagttattagtggtttatcagcaaaaaagtccaattttaatttagtaaatgttatcttatactgtacaataaaaacattgcctttgaatgttaattttttggtacaaaaataaatttatatgaaaacctgc

SEQ ID NO: 33182 - DNA, 818 bp, Homo sapiens
  source 1..818: mol_type = unassigned DNA
agcctccggagttggccgcagacaagaaggggctgggccaggttgtctgcagcgtcgccctgttcttctatttcagagcgcagatggatcctaatagaatatcagaagatggcactcactgcatttatagaattttgagactccatgaaaatgcagattttcaagacacaactctggagagtcaagatacaaaattaatacctgattcatgtaggagaattaaacaggcctttcaaggagctgtgcaaaaggaattacaacatatcgttggatcacagcacatcagagcagagaaagcgatggtggatggctcatggttagatctggccaagaggagcaagcttgaagctcagccttttgctcatctcactattaatgccaccgacatcccatctggttcccataaagtgagtctgtcctcttggtaccatgatcggggttgggccaagatctccaacatgacttttagcaatggaaaactaatagttaatcaggatggcttttattacctgtatgccaacatttgctttcgacatcatgaaacttcaggagacctagctacagagtatcttcaactaatggtgtacgtcactaaaaccagcatcaaaatcccaagttctcataccctgatgaaaggaggaagcaccaagtattggtcagggaattctgaattccatttttattccataaacgttggtggattttttaagttacggtctggagaggaaatcagcatcgaggtctccaacccctccttactggatccggatcaggatgcaacatactttggggcttttaaagttcgagatatagattga

SEQ ID NO: 33183 - DNA, 1553 bp, Homo sapiens
  source 1..1553: mol_type = unassigned DNA
cctcgccctggtggtgcacgcccgggctgggcgctcagaggtcgggtgggcgcccactccgttcgctgcgcgcacagcgcccggcgagaggctcggagtttgatcacacacagcgtccggcttcctgtccccagcgccccctcccgccccgtttcccttgcccctccctctccccggcccgatccgcccgccggctccccctcccccgatccctcgggtcccgggatgggggggcggtgaggcaggcacagccccccgcccccatggccgcccgtcggagccagaggcggagggggcgccggggggagccgggcaccgccctgctggtcccgctcgcgctgggcctgggcctggcgctggcctgcctcggcctcctgctggccgtggtcagtttggggagccgggcatcgctgtccgcccaggagcctgcccaggaggagctggtggcagaggaggaccaggacccgtcggaactgaatccccagacagaagaaagccaggatcctgcgcctttcctgaaccgactagttcggcctcgcagaagtgcacctaaaggccggaaaacacgggctcgaagagcgatcgcagcccattatgaagttcatccacgacctggacaggacggagcgcaggcaggtgtggacgggacagtgagtggctgggaggaagccagaatcaacagctccagccctctgcgctacaaccgccagatcggggagtttatagtcacccgggctgggctctactacctgtactgtcaggtgcactttgatgaggggaaggctgtctacctgaagctggacttgctggtggatggtgtgctggccctgcgctgcctggaggaattctcagccactgcggcgagttccctcgggccccagctccgcctctgccaggtgtctggtctgttggccctgcggccagggtcctccctgcggatccgcaccctcccctgggcccatctcaaggctgcccccttcctcacctacttcggactcttccaggttcactgaggggccctggtctccccgcagtcgtcccaggctgccggctcccctcgacagctctctgggcacccggtcccctctgccccaccctcagccgctctttgctccagacctgcccctccctctagaggctgcctgggcctgttcacgtgttttccatcccacataaatacagtattcccactcttatcttacaactcccccaccgcccactctccacctcactagctccccaatccctgaccctttgaggcccccagtgatctcgactcccccctggccacagacccccagggcattgtgttcactgtactctgtgggcaaggatgggtccagaagaccccacttcaggcactaagaggggctggacctggcggcaggaagccaaagagactgggcctaggccaggagttcccaaatgtgaggggcgagaaacaagacaagctcctcccttgagaattccctgtggatttttaaaacagatattatttttattattattgtgacaaaatgttgataaatggatattaaatagaataagtcata

SEQ ID NO: 33184 - DNA, 1768 bp, Homo sapiens
  source 1..1768: mol_type = unassigned DNA
atggccgcccgtcggagccagaggcggagggggcgccggggggagccgggcaccgccctgctggtcccgctcgcgctgggcctgggcctggcgctggcctgcctcggcctcctgctggccgtggtcagtttggggagccgggcatcgctgtccgcccaggagcctgcccaggaggagctggtggcagaggaggaccaggacccgtcggaactgaatccccagacagaagaaagccaggatcctgcgcctttcctgaaccgactagttcggcctcgcagaagtgcacctaaaggccggaaaacacgggctcgaagagcgatcgcagcccattatgaagttcatccacgacctggacaggacggagcgcaggcaggtgtggacgggacagtgagtggctgggaggaagccagaatcaacagctccagccctctgcgctacaaccgccagatcggggagtttatagtcacccgggctgggctctactacctgtactgtcagagttccgatgccctggaagcctgggagaatggggagagatcccggaaaaggagagcagtgctcacccaaaaacagaagaagcagcactctgtcctgcacctggttcccattaacgccacctccaaggatgactccgatgtgacagaggtgatgtggcaaccagctcttaggcgtgggagaggcctacaggcccaaggatatggtgtccgaatccaggatgctggagtttatctgctgtatagccaggtcctgtttcaagacgtgactttcaccatgggtcaggtggtgtctcgagaaggccaaggaaggcaggagactctattccgatgtataagaagtatgccctcccacccggaccgggcctacaacagctgctatagcgcaggtgtcttccatttacaccaaggggatattctgagtgtcataattccccgggcaagggcgaaacttaacctctctccacatggaaccttcctggggtttgtgaaactgtgattgtgttataaaaagtggctcccagcttggaagaccagggtgggtacatactggagacagccaagagctgagtatataaaggagagggaatgtgcaggaacagaggcgtcttcctgggtttggctccccgttcctcacttttcccttttcattcccaccccctagactttgattttacggatatcttgcttctgttccccatggagctccgaattcttgcgtgtgtgtagatgaggggcgggggacgggcgccaggcattgtccagacctggtcggggcccactggaagcatccagaacagcaccaccatctagcggccgctcgagggaagcacccgccggttggccgaagtccacgaagccgccctctgctagggaaaacccctggttctccatgccacacctctctccaggtgccctctgcctcttcaccccacaagaagccttatcctacgtccttctctccatctatcggaccccagtttccatcactatctccagagatgtagctattatgcgcccgtctacagggggtgcccgacgatgacggtgccttcgcagtcaaattactcttcgggtcccaaggtttggctttcacgcgctccattgccccggcgtggcaggccattccaagcccttccgggctggaactggtgtcggaggagcctcgggtgtatcgtacgccctggtgttggtgttgcctcactcctctgagctcttctttctgatcaagccctgcttaaagttaaataaaatagaatgaatgataccccggc

SEQ ID NO: 33185 - DNA, 2894 bp, Homo sapiens
  source 1..2894: mol_type = unassigned DNA
cgagactccatctcaaaaacaaaacaaataaacgaacaaaaaaacccacaacgtattattttcttgtttacgaggtttcttgtctctctggctccaccagaagaggagcagggacccttcttgctgttgttcattgctgcatcccccacaccgagagcagagcctggcatgggcagaaagtcctcagtcgatatttggtggccccaagcgaatgaagcatccaagaagggaaagctgggggctccccactgcacttgccacctgagtcacattttcagaagcctctggaaagtcgtgcacagcccaggagtgttgagcaatttcggtttcctctgaggttgaaggacccaggcgtgtcagccctgctccagacaccttgggcatggaggagagtgtcgtacggccctcagtgtttgtggtggatggacagaccgacatcccattcacgaggctgggacgaagccaccggagacagtcgtgcagtgtggcccgggtgggtctgggtctcttgctgttgctgatgggggccgggctggccgtccaaggctggttcctcctgcagctgcactggcgtctaggagagatggtcacccgcctgcctgacggacctgcaggctcctgggagcagctgatacaagagcgaaggtctcacgaggtcaacccagcagcgcatctcacaggggccaactccagcttgaccggcagcggggggccgctgttatgggagactcagctgggcctggccttcctgaggggcctcagctaccacgatggggcccttgtggtcaccaaagctggctactactacatctactccaaggtgcagctgggcggtgtgggctgcccgctgggcctggccagcaccatcacccacggcctctacaagcgcacaccccgctaccccgaggagctggagctgttggtcagccagcagtcaccctgcggacgggccaccagcagctcccgggtctggtgggacagcagcttcctgggtggtgtggtacacctggaggctggggagaaggtggtcgtccgtgtgctggatgaacgcctggttcgactgcgtgatggtacccggtcttacttcggggctttcatggtgtgaaggaaggagcgtggtgcattggacatgggtctgacacgtggagaactcagagggtgcctcaggggaaagaaaactcacgaagcagaggctgggcgtggtggctctcgcctgtaatcccagcactttgggaggccaaggcaggcggatcacctgaggtcaggagttcgagaccagcctggctaacatggcaaaaccccatctctactaaaaatacaaaaattagccggacgtggtggtgcctgcctgtaatccagctactcaggaggctgaggcaggataattttgcttaaacccgggaggcggaggttgcagtgagccgagatcacaccactgcactccaacctgggaaacgcagtgagactgtgcctcaaaaaaaagaaaggaagaaaaaagaaaactcaggaaacagatcttgggggacactccagggaacccaaaactcaaaggcggagagctcagtgggcaccaccaaggcgagatgaagccccagcaggcaccttcagaagacccacgtagactgcagaccctgccacggacaatactaaggacaaaaacccagagacttggggtctgtgggcccccaaacatggggtaaagttgatttgcctgatattcaggaagaaggggtgaggggtgggtatttatgcttttgattcagaagaaagtggggcttgggattccagggacttggctgggggtgggaaacttcatccacttccctactctcatcatgagtacggacagggtgggcgggagactgatcatcgggactcatcatgaagagcccagccccaccccacatactcagatcccacccacagactggtggccacacctcagcctggtcacaaagagttacactcagatacatgagcacggcagcgtgctcataactgtttaacaaccagctgtcctgggagggggacagctttgtaatgtttgccaatttccatggtgtaaatgctaccaccatggctgatttcatcactgccaagcatagacatccctaataggacaccacggatctgtccccggcatccggcccagggcctggcacaaagcatgctctagggaaatgcttgctgattgaaaggaaggaagaatgactctacagtcacacctatggcatcccacaaaatctgtcacatggctgcataatctcagccactctttcacaactatagactcatacacgcgaagtgccagattcatgcacaaccacacaatcacatggaagtcacagacggcatcacagacagtcacagcactgtgtgtatgttataacacaagcacacaaaactcagacagcatcccagctacacagccactcccagaggtgtcaccgtcacacttggtaattaatactcattacattagacacagacagaccaagttatagtcagacctggttacacacatacacacacacaatatcaccatgacaaatacacattacacacacacaacatcacaatgacaaacacacattacacacacaacatcacgatgacaaacacacattacacacacaacatcacgatgacaaacacacattacacacacatcacaatgacaaacacaacattacacacacacaacatcacaatgacacacacatcacacacacatcacaatgacaaacacacaacattacacacatatacacacagcctgagggccctccccagcccagactaacacatctcggggtgaggaccagaccttgttcataaccctgggcctcttaaccactgatctttgaaataaatggcaaatagttgtacctgga

SEQ ID NO: 33186 - DNA, 2786 bp, Homo sapiens
  source 1..2786: mol_type = unassigned DNA
cgagactccatctcaaaaacaaaacaaataaacgaacaaaaaaacccacaacgtattattttcttgtttacgaggtttcttgtctctctggctccaccagaagaggagcagggacccttcttgctgttgttcattgctgcatcccccacaccgagagcagagcctggcatgggcagaaagtcctcagtcgatatttggtggccccaagcgaatgaagcatccaagaagggaaagctgggggctccccactgcacttgccacctgagtcacattttcagaagcctctggaaagtcgtgcacagcccaggagtgttgagcaatttcggtttcctctgaggttgaaggacccaggcgtgtcagccctgctccagacaccttgggcatggaggagagtgtcgtacggccctcagtgtttgtggtggatggacagaccgacatcccattcacgaggctgggacgaagccaccggagacagtcgtgcagtgtggcccgggacggacctgcaggctcctgggagcagctgatacaagagcgaaggtctcacgaggtcaacccagcagcgcatctcacaggggccaactccagcttgaccggcagcggggggccgctgttatgggagactcagctgggcctggccttcctgaggggcctcagctaccacgatggggcccttgtggtcaccaaagctggctactactacatctactccaaggtgcagctgggcggtgtgggctgcccgctgggcctggccagcaccatcacccacggcctctacaagcgcacaccccgctaccccgaggagctggagctgttggtcagccagcagtcaccctgcggacgggccaccagcagctcccgggtctggtgggacagcagcttcctgggtggtgtggtacacctggaggctggggagaaggtggtcgtccgtgtgctggatgaacgcctggttcgactgcgtgatggtacccggtcttacttcggggctttcatggtgtgaaggaaggagcgtggtgcattggacatgggtctgacacgtggagaactcagagggtgcctcaggggaaagaaaactcacgaagcagaggctgggcgtggtggctctcgcctgtaatcccagcactttgggaggccaaggcaggcggatcacctgaggtcaggagttcgagaccagcctggctaacatggcaaaaccccatctctactaaaaatacaaaaattagccggacgtggtggtgcctgcctgtaatccagctactcaggaggctgaggcaggataattttgcttaaacccgggaggcggaggttgcagtgagccgagatcacaccactgcactccaacctgggaaacgcagtgagactgtgcctcaaaaaaaagaaaggaagaaaaaagaaaactcaggaaacagatcttgggggacactccagggaacccaaaactcaaaggcggagagctcagtgggcaccaccaaggcgagatgaagccccagcaggcaccttcagaagacccacgtagactgcagaccctgccacggacaatactaaggacaaaaacccagagacttggggtctgtgggcccccaaacatggggtaaagttgatttgcctgatattcaggaagaaggggtgaggggtgggtatttatgcttttgattcagaagaaagtggggcttgggattccagggacttggctgggggtgggaaacttcatccacttccctactctcatcatgagtacggacagggtgggcgggagactgatcatcgggactcatcatgaagagcccagccccaccccacatactcagatcccacccacagactggtggccacacctcagcctggtcacaaagagttacactcagatacatgagcacggcagcgtgctcataactgtttaacaaccagctgtcctgggagggggacagctttgtaatgtttgccaatttccatggtgtaaatgctaccaccatggctgatttcatcactgccaagcatagacatccctaataggacaccacggatctgtccccggcatccggcccagggcctggcacaaagcatgctctagggaaatgcttgctgattgaaaggaaggaagaatgactctacagtcacacctatggcatcccacaaaatctgtcacatggctgcataatctcagccactctttcacaactatagactcatacacgcgaagtgccagattcatgcacaaccacacaatcacatggaagtcacagacggcatcacagacagtcacagcactgtgtgtatgttataacacaagcacacaaaactcagacagcatcccagctacacagccactcccagaggtgtcaccgtcacacttggtaattaatactcattacattagacacagacagaccaagttatagtcagacctggttacacacatacacacacacaatatcaccatgacaaatacacattacacacacacaacatcacaatgacaaacacacattacacacacaacatcacgatgacaaacacacattacacacacaacatcacgatgacaaacacacattacacacacatcacaatgacaaacacaacattacacacacacaacatcacaatgacacacacatcacacacacatcacaatgacaaacacacaacattacacacatatacacacagcctgagggccctccccagcccagactaacacatctcggggtgaggaccagaccttgttcataaccctgggcctcttaaccactgatctttgaaataaatggcaaatagttgtacctgga

SEQ ID NO: 33187 - DNA, 2789 bp, Homo sapiens
  source 1..2789: mol_type = unassigned DNA
agtgcaggtatctcatggagggttttttggatgtcttcttccctgtgggggggttccaaaggcccatgtctcttgggcattttctttcagattctatcagccctctctctttctctcctgtctctctctttcattcatacactgagtcattcagaaatggcttctctccaactcggagctgcaagtaattctggatctggtcacaaacaaaaagtccccagagttgccaatttatctagttcatctgtgccctgttcaagatgatgtaactaaacatttaccttcagggaggtgtttccaaagaattttcatcgatatatagaaatcaagagaaattccatactatcaccaaatcaagagaaattccatactatcaccagttggccaactttccaagtctagtgcagaaatccaaggcacctcacacctagagttcctatacctctgagactccagaggaaagaacaagacagtgcagaaggatatgttagaacccactgaaaacctagaaggttaaaaaggaagcataccctcctgacctataagaaaattttcagtctgcagggggatatccttgtggcccaagacattggtgttatcatttgactaagaggaaattatttgtggtgagctctgagtgaggattaggaccagggagatgccaagtttctatcacttacctcatgcctgtaagacaagtgttttgttccaattgatgaatggggataaaacagttcagccaatcacttatggggcaaagaatgggaatttgaagggtctggtgcctggccttgtcatacgtaaacaagagaggcatcgatgagttttatctgagtcatttgggaaaggataattcttgcagcaagccattttcctaaacacagaagaatagggggattccttaaccttcattgttctccaggatcataggtctcaggtaaaattaaaaattttcaggtcagaccactcagtctcagaaaggcaaagtaatttgccccaggtcactagtccaagatgttattctctttgaacaaatgtgtatgtccagtcacatattcttcattcattcctccccaaagcagtttttagctgttaggtatattcgatcactttagtctattttgaaaatgatatgagacactttttaagcaaagtctacagtttcccaatgagaaaattaatcctctttcttgtctttccagttgtgagacaaactcccacacagcactttaaaaatcagttcccagctctgcactgggaacatgaactaggcctggccttcaccaagaaccgaatgaactataccaacaaattcctgctgatcccagagtcgggagactacttcatttactcccaggtcacattccgtgggatgacctctgagtgcagtgaaatcagacaagcaggccgaccaaacaagccagactccatcactgtggtcatcaccaaggtaacagacagctaccctgagccaacccagctcctcatggggaccaagtctgtatgcgaagtaggtagcaactggttccagcccatctacctcggagccatgttctccttgcaagaaggggacaagctaatggtgaacgtcagtgacatctctttggtggattacacaaaagaagataaaaccttctttggagccttcttactataggaggagagcaaatatcattatatgaaagtcctctgccaccgagttcctaattttctttgttcaaatgtaattataaccaggggttttcttggggccgggagtagggggcattccacagggacaacggtttagctatgaaatttggggcccaaaatttcacacttcatgtgccttactgatgagagtactaactggaaaaaggctgaagagagcaaatatattattaagatgggttggaggattggcgagtttctaaatattaagacactgatcactaaatgaatggatgatctactcgggtcaggattgaaagagaaatatttcaacaccttcctgctatacaatggtcaccagtggtccagttattgttcaatttgatcataaatttgcttcaattcaggagctttgaaggaagtccaaggaaagctctagaaaacagtataaactttcagaggcaaaatccttcaccaatttttccacatactttcatgccttgcctaaaaaaaatgaaaagagagttggtatgtctcatgaatgttcacacagaaggagttggttttcatgtcatctacagcatatgagaaaagctacctttcttttgattatgtacacagatatctaaataaggaagtatgagtttcacatgtatatcaaaaatacaacagttgcttgtattcagtagagttttcttgcccacctattttgtgctgggttctaccttaacccagaagacactatgaaaaacaagacagactccactcaaaatttatatgaacaccactagatacttcctgatcaaacatcagtcaacatactctaaagaataactccaagtcttggccaggcgcagtggctcacacctgtaatcccaacactttgggaggccaaggtgggtggatcatctaaggccgggagttcaagaccagcctgaccaacgtggagaaaccccatctctactaaaaatacaaaattagccgggcgtggtagcgcatggctgtaatcctggctactcaggaggccgaggcagaagaattgcttgaactggggaggcagaggttgcggtgagcccagatcgcgccattgcactccagcctgggtaacaagagcaaaactctgtccaaaaaaaaaaaaa

SEQ ID NO: 33188 - DNA, 2002 bp, Homo sapiens
  source 1..2002: mol_type = unassigned DNA
aaaagggaaggaggagactgagtgattaagtcacccactgtgagagctggtcttctatttaatgggggctctctctgcccaggagtcagaggtgcctccaggagcagcaggagcatggccgaggatctgggactgagctttggggaaacagccagtgtggaaatgctgccagagcacggcagctgcaggcccaaggccaggagcagcagcgcacgctgggctctcacctgctgcctggtgttgctccccttccttgcaggactcaccacatacctgcttgtcagccagctccgggcccagggagaggcctgtgtgcagttccaggctctaaaaggacaggagtttgcaccttcacatcagcaagtttatgcacctcttagagcagacggagataagccaagggcacacctgacagttgtgagacaaactcccacacagcactttaaaaatcagttcccagctctgcactgggaacatgaactaggcctggccttcaccaagaaccgaatgaactataccaacaaattcctgctgatcccagagtcgggagactacttcatttactcccaggtcacattccgtgggatgacctctgagtgcagtgaaatcagacaagcaggccgaccaaacaagccagactccatcactgtggtcatcaccaaggtaacagacagctaccctgagccaacccagctcctcatggggaccaagtctgtatgcgaagtaggtagcaactggttccagcccatctacctcggagccatgttctccttgcaagaaggggacaagctaatggtgaacgtcagtgacatctctttggtggattacacaaaagaagataaaaccttctttggagccttcttactataggaggagagcaaatatcattatatgaaagtcctctgccaccgagttcctaattttctttgttcaaatgtaattataaccaggggttttcttggggccgggagtagggggcattccacagggacaacggtttagctatgaaatttggggcccaaaatttcacacttcatgtgccttactgatgagagtactaactggaaaaaggctgaagagagcaaatatattattaagatgggttggaggattggcgagtttctaaatattaagacactgatcactaaatgaatggatgatctactcgggtcaggattgaaagagaaatatttcaacaccttcctgctatacaatggtcaccagtggtccagttattgttcaatttgatcataaatttgcttcaattcaggagctttgaaggaagtccaaggaaagctctagaaaacagtataaactttcagaggcaaaatccttcaccaatttttccacatactttcatgccttgcctaaaaaaaatgaaaagagagttggtatgtctcatgaatgttcacacagaaggagttggttttcatgtcatctacagcatatgagaaaagctacctttcttttgattatgtacacagatatctaaataaggaagtatgagtttcacatgtatatcaaaaatacaacagttgcttgtattcagtagagttttcttgcccacctattttgtgctgggttctaccttaacccagaagacactatgaaaaacaagacagactccactcaaaatttatatgaacaccactagatacttcctgatcaaacatcagtcaacatactctaaagaataactccaagtcttggccaggcgcagtggctcacacctgtaatcccaacactttgggaggccaaggtgggtggatcatctaaggccgggagttcaagaccagcctgaccaacgtggagaaaccccatctctactaaaaatacaaaattagccgggcgtggtagcgcatggctgtaatcctggctactcaggaggccgaggcagaagaattgcttgaactggggaggcagaggttgcggtgagcccagatcgcgccattgcactccagcctgggtaacaagagcaaaactctgtccaaaaaaaaaaaaa

SEQ ID NO: 33189 - DNA, 1961 bp, Homo sapiens
  source 1..1961: mol_type = unassigned DNA
cagctctcatttctccaaaaatgtgtttgagccacttggaaaatatgcctttaagccattcaagaactcaaggagctcagagatcatcctggaagctgtggctcttttgctcaatagttatgttgctatttctttgctccttcagttggctaatctttatttttctccaattagagactgctaaggagccctgtatggctaagtttggaccattaccctcaaaatggcaaatggcatcttctgaacctccttgcgtgaataaggtgtctgactggaagctggagatacttcagaatggcttatatttaatttatggccaagtggctcccaatgcaaactacaatgatgtagctccttttgaggtgcggctgtataaaaacaaagacatgatacaaactctaacaaacaaatctaaaatccaaaatgtaggagggacttatgaattgcatgttggggacaccatagacttgatattcaactctgagcatcaggttctaaaaaataatacatactggggtatcattttactagcaaatccccaattcatctcctagagacttgatttgatctcctcattcccttcagcacatgtagaggtgccagtgggtggattggagggagaagatattcaatttctagagtttgtctgtctacaaaaatcaacacaaacagaactcctctgcacgtgaattttcatctatcatgcctatctgaaagagactcaggggaagagccaaagacttttggttggatctgcagagatacttcattaatccatgataaaacaaatatggatgacagaggacatgtgcttttcaaagaatctttatctaattcttgaattcatgagtggaaaaatggagttctattcccatggaagatttacctggtatgcaaaaaggatctggggcagtagcctggctttgttctcatattcttgggctgctgtaattcattcttctcatactcccatcttctgagaccctcccaataaaaagtagactgataggatggccacagatatgcctaccataccctactttagatatggtggtgttagaagataaagaacaatctgagaactattggaatagaggtacaagtggcataaaatggaatgtacgctatctggaaatttctcttggttttatcttcctcaggatgcagggtgctttaaaaagccttatcaaaggagtcattccgaaccctcacgtagagctttgtgagaccttactgttggtgtgtgtgtctaaacattgctaattgtaaagaaagagtaaccattagtaatcattaggtttaaccccagaatggtattatcattactggattatgtcatgtaatgatttagtatttttagctagctttccacagtttgcaaagtgctttcgtaaaacagttagcaattctatgaagttaattgggcaggcatttgggggaaaattttagtgatgagaatgtgatagcatagcatagccaactttcctcaactcataggacaagtgactacaagaggcaatgggtagtcccctgcattgcactgtctcagctttagaattgttatttctgctatcgtgttataagactctaaaacttagcgaattcacttttcaggaagcatattcccctttagcccaaggtgagcagagtgaagctacaacagatctttcctttaccagcacactttttttttttttcctgcctgaatcagggagatccaggatgctgttcaggccttatcccaaccaaattcccctcttcactttgcagggcccatcttagtcaaatgtgctaacttctaaaataataaatagcactaattcaaaatttttggactcttaaattagctacttgcaggttcttgttgaaaggtatataatattacattgtaaacaaatttaaaatatttatggatatttgtgaaaagctgcattatgttaaataatattacatgtaaagct

SEQ ID NO: 33190 - DNA, 2008 bp, Homo sapiens
  source 1..2008: mol_type = unassigned DNA
catgacattgcatccttcacccatcacttgtgaatttttgttttccacagctctcatttctccaaaaatgtgtttgagccacttggaaaatatgcctttaagccattcaagaactcaaggagctcagagatcatcctggaagctgtggctcttttgctcaatagttatgttgctatttctttgctccttcagttggctaatctttatttttctccaattagagactgctaaggagccctgtatggctaagtttggaccattaccctcaaaatggcaaatggcatcttctgaacctccttgcgtgaataaggtgtctgactggaagctggagatacttcagaatggcttatatttaatttatggccaagtggctcccaatgcaaactacaatgatgtagctccttttgaggtgcggctgtataaaaacaaagacatgatacaaactctaacaaacaaatctaaaatccaaaatgtaggagggacttatgaattgcatgttggggacaccatagacttgatattcaactctgagcatcaggttctaaaaaataatacatactggggtatcattttactagcaaatccccaattcatctcctagagacttgatttgatctcctcattcccttcagcacatgtagaggtgccagtgggtggattggagggagaagatattcaatttctagagtttgtctgtctacaaaaatcaacacaaacagaactcctctgcacgtgaattttcatctatcatgcctatctgaaagagactcaggggaagagccaaagacttttggttggatctgcagagatacttcattaatccatgataaaacaaatatggatgacagaggacatgtgcttttcaaagaatctttatctaattcttgaattcatgagtggaaaaatggagttctattcccatggaagatttacctggtatgcaaaaaggatctggggcagtagcctggctttgttctcatattcttgggctgctgtaattcattcttctcatactcccatcttctgagaccctcccaataaaaagtagactgataggatggccacagatatgcctaccataccctactttagatatggtggtgttagaagataaagaacaatctgagaactattggaatagaggtacaagtggcataaaatggaatgtacgctatctggaaatttctcttggttttatcttcctcaggatgcagggtgctttaaaaagccttatcaaaggagtcattccgaaccctcacgtagagctttgtgagaccttactgttggtgtgtgtgtctaaacattgctaattgtaaagaaagagtaaccattagtaatcattaggtttaaccccagaatggtattatcattactggattatgtcatgtaatgatttagtatttttagctagctttccacagtttgcaaagtgctttcgtaaaacagttagcaattctatgaagttaattgggcaggcatttgggggaaaattttagtgatgagaatgtgatagcatagcatagccaactttcctcaactcataggacaagtgactacaagaggcaatgggtagtcccctgcattgcactgtctcagctttagaattgttatttctgctatcgtgttataagactctaaaacttagcgaattcacttttcaggaagcatattcccctttagcccaaggtgagcagagtgaagctacaacagatctttcctttaccagcacactttttttttttttcctgcctgaatcagggagatccaggatgctgttcaggccttatcccaaccaaattcccctcttcactttgcagggcccatcttagtcaaatgtgctaacttctaaaataataaatagcactaattcaaaatttttggactcttaaattagctacttgcaggttcttgttgaaaggtatataatattacattgtaaacaaatttaaaatatttatggatatttgtgaaaagctgcattatgttaaataatattacatgtaaagct

SEQ ID NO: 33191 - DNA, 3470 bp, Homo sapiens
  source 1..3470: mol_type = unassigned DNA
ggccctgggacctttgcctattttctgattgataggctttgttttgtctttacctccttctttctggggaaaacttcagttttatcgcacgttccccttttccatatcttcatcttccctctacccagattgtgaagatggaaagggtccaacccctggaagagaatgtgggaaatgcagccaggccaagattcgagaggaacaagctattgctggtggcctctgtaattcagggactggggctgctcctgtgcttcacctacatctgcctgcacttctctgctcttcaggtatcacatcggtatcctcgaattcaaagtatcaaagtacaatttaccgaatataagaaggagaaaggtttcatcctcacttcccaaaaggaggatgaaatcatgaaggtgcagaacaactcagtcatcatcaactgtgatgggttttatctcatctccctgaagggctacttctcccaggaagtcaacattagccttcattaccagaaggatgaggagcccctcttccaactgaagaaggtcaggtctgtcaactccttgatggtggcctctctgacttacaaagacaaagtctacttgaatgtgaccactgacaatacctccctggatgacttccatgtgaatggcggagaactgattcttatccatcaaaatcctggtgaattctgtgtcctttgaggggctgatggcaatatctaaaaccaggcaccagcatgaacaccaagctgggggtggacagggcatggattcttcattgcaagtgaaggagcctcccagctcagccacgtgggatgtgacaagaagcagatcctggccctcccgcccccacccctcagggatatttaaaacttattttatataccagttaatcttatttatccttatattttctaaattgcctagccgtcacaccccaagattgccttgagcctactaggcacctttgtgagaaagaaaaaatagatgcctcttcttcaagatgcattgtttctattggtcaggcaattgtcataataaacttatgtcattgaaaacggtacctgactaccatttgctggaaatttgacatgtgtgtggcattatcaaaatgaagaggagcaaggagtgaaggagtggggttatgaatctgccaaaggtggtatgaaccaacccctggaagccaaagcggcctctccaaggttaaattgattgcagtttgcatattgcctaaatttaaactttctcatttggtgggggttcaaaagaagaatcagcttgtgaaaaatcaggacttgaagagagccgtctaagaaataccacgtgctttttttctttaccattttgctttcccagcctccaaacatagttaatagaaatttcccttcaaagaactgtctggggatgtgatgctttgaaaaatctaatcagtgacttaagagagattttcttgtatacagggagagtgagataacttattgtgaagggttagctttactgtacaggatagcagggaactggacatctcagggtaaaagtcagtacggattttaatagcctggggaggaaaacacattctttgccacagacaggcaaagcaacacatgctcatcctcctgcctatgctgagatacgcactcagctccatgtcttgtacacacagaaacattgctggtttcaagaaatgaggtgatcctattatcaaattcaatctgatgtcaaatagcactaagaagttattgtgccttatgaaaaataatgatctctgtctagaaataccatagaccatatatagtctcacattgataattgaaactagaagggtctataatcagcctatgccagggcttcaatggaatagtatccccttatgtttagttgaaatgtccccttaacttgatataatgtgttatgcttatggcgctgtggacaatctgatttttcatgtcaactttccagatgatttgtaacttctctgtgccaaaccttttataaacataaatttttgagatatgtattttaaaattgtagcacatgtttccctgacattttcaatagaggatacaacatcacagaatctttctggatgattctgtgttatcaaggaattgtactgtgctacaattatctctagaatctccagaaaggtggagggctgttcgcccttacactaaatggtctcagttggatttttttttcctgttttctatttcctcttaagtacaccttcaactatattcccatccctctattttaatctgttatgaaggaaggtaaataaaaatgctaaatagaagaaattgtaggtaaggtaagaggaatcaagttctgagtggctgccaaggcactcacagaatcataatcatggctaaatatttatggagggcctactgtggaccaggcactgggctaaatacttacatttacaagaatcattctgagacagatattcaatgatatctggcttcactactcagaagattgtgtgtgtgtttgtgtgtgtgtgtgtgtgtgtatttcactttttgttattgaccatgttctgcaaaattgcagttactcagtgagtgatatccgaaaaagtaaacgtttatgactataggtaatatttaagaaaatgcatggttcatttttaagtttggaatttttatctatatttctcacagatgtgcagtgcacatgcaggcctaagtatatgttgtgtgtgttgtttgtctttgatgtcatggtcccctctcttaggtgctcactcgctttgggtgcacctggcctgctcttcccatgttggcctctgcaaccacacagggatatttctgctatgcaccagcctcactccaccttccttccatcaaaaatatgtgtgtgtgtctcagtccctgtaagtcatgtccttcacagggagaattaacccttcgatatacatggcagagttttgtgggaaaagaattgaatgaaaagtcaggagatcagaattttaaatttgacttagccactaactagccatgtaaccttgggaaagtcatttcccatttctgggtcttgcttttctttctgttaaatgagaggaatgttaaatatctaacagtttagaatcttatgcttacagtgttatctgtgaatgcacatattaaatgtctatgttcttgttgctatgagtcaaggagtgtaaccttctcctttactatgttgaatgtatttttttctggacaagcttacatcttcctcagccatctttgtgagtccttcaagagcagttatcaattgttagttagatattttctatttagagaatgcttaagggattccaatcccgatccaaatcataatttgttcttaagtatactgggcaggtcccctattttaagtcataattttgtatttagtgctttcctggctctcagagagtattaatattgatattaataatatagttaatagtaatattgctatttacatggaaacaaataaaagatctcagaattc

SEQ ID NO: 33192 - DNA, 3429 bp, Homo sapiens
  source 1..3429: mol_type = unassigned DNA
aaaacacaggacacatggctccattcaaggctaactgattgcacaacggctctgagcaggagagagcaaaaggtgaaccacagttgtacagcttgctggtggttggggtcacattggactatcaatatccaggagatgttgagaaaaagaggggatcctttccaacaagtcatccagcaactctgggacagaaggaaagctgtgggaagaaaagcagggtgctggtttctaggacactaaacctcatggtatcacatcggtatcctcgaattcaaagtatcaaagtacaatttaccgaatataagaaggagaaaggtttcatcctcacttcccaaaaggaggatgaaatcatgaaggtgcagaacaactcagtcatcatcaactgtgatgggttttatctcatctccctgaagggctacttctcccaggaagtcaacattagccttcattaccagaaggatgaggagcccctcttccaactgaagaaggtcaggtctgtcaactccttgatggtggcctctctgacttacaaagacaaagtctacttgaatgtgaccactgacaatacctccctggatgacttccatgtgaatggcggagaactgattcttatccatcaaaatcctggtgaattctgtgtcctttgaggggctgatggcaatatctaaaaccaggcaccagcatgaacaccaagctgggggtggacagggcatggattcttcattgcaagtgaaggagcctcccagctcagccacgtgggatgtgacaagaagcagatcctggccctcccgcccccacccctcagggatatttaaaacttattttatataccagttaatcttatttatccttatattttctaaattgcctagccgtcacaccccaagattgccttgagcctactaggcacctttgtgagaaagaaaaaatagatgcctcttcttcaagatgcattgtttctattggtcaggcaattgtcataataaacttatgtcattgaaaacggtacctgactaccatttgctggaaatttgacatgtgtgtggcattatcaaaatgaagaggagcaaggagtgaaggagtggggttatgaatctgccaaaggtggtatgaaccaacccctggaagccaaagcggcctctccaaggttaaattgattgcagtttgcatattgcctaaatttaaactttctcatttggtgggggttcaaaagaagaatcagcttgtgaaaaatcaggacttgaagagagccgtctaagaaataccacgtgctttttttctttaccattttgctttcccagcctccaaacatagttaatagaaatttcccttcaaagaactgtctggggatgtgatgctttgaaaaatctaatcagtgacttaagagagattttcttgtatacagggagagtgagataacttattgtgaagggttagctttactgtacaggatagcagggaactggacatctcagggtaaaagtcagtacggattttaatagcctggggaggaaaacacattctttgccacagacaggcaaagcaacacatgctcatcctcctgcctatgctgagatacgcactcagctccatgtcttgtacacacagaaacattgctggtttcaagaaatgaggtgatcctattatcaaattcaatctgatgtcaaatagcactaagaagttattgtgccttatgaaaaataatgatctctgtctagaaataccatagaccatatatagtctcacattgataattgaaactagaagggtctataatcagcctatgccagggcttcaatggaatagtatccccttatgtttagttgaaatgtccccttaacttgatataatgtgttatgcttatggcgctgtggacaatctgatttttcatgtcaactttccagatgatttgtaacttctctgtgccaaaccttttataaacataaatttttgagatatgtattttaaaattgtagcacatgtttccctgacattttcaatagaggatacaacatcacagaatctttctggatgattctgtgttatcaaggaattgtactgtgctacaattatctctagaatctccagaaaggtggagggctgttcgcccttacactaaatggtctcagttggatttttttttcctgttttctatttcctcttaagtacaccttcaactatattcccatccctctattttaatctgttatgaaggaaggtaaataaaaatgctaaatagaagaaattgtaggtaaggtaagaggaatcaagttctgagtggctgccaaggcactcacagaatcataatcatggctaaatatttatggagggcctactgtggaccaggcactgggctaaatacttacatttacaagaatcattctgagacagatattcaatgatatctggcttcactactcagaagattgtgtgtgtgtttgtgtgtgtgtgtgtgtgtgtatttcactttttgttattgaccatgttctgcaaaattgcagttactcagtgagtgatatccgaaaaagtaaacgtttatgactataggtaatatttaagaaaatgcatggttcatttttaagtttggaatttttatctatatttctcacagatgtgcagtgcacatgcaggcctaagtatatgttgtgtgtgttgtttgtctttgatgtcatggtcccctctcttaggtgctcactcgctttgggtgcacctggcctgctcttcccatgttggcctctgcaaccacacagggatatttctgctatgcaccagcctcactccaccttccttccatcaaaaatatgtgtgtgtgtctcagtccctgtaagtcatgtccttcacagggagaattaacccttcgatatacatggcagagttttgtgggaaaagaattgaatgaaaagtcaggagatcagaattttaaatttgacttagccactaactagccatgtaaccttgggaaagtcatttcccatttctgggtcttgcttttctttctgttaaatgagaggaatgttaaatatctaacagtttagaatcttatgcttacagtgttatctgtgaatgcacatattaaatgtctatgttcttgttgctatgagtcaaggagtgtaaccttctcctttactatgttgaatgtatttttttctggacaagcttacatcttcctcagccatctttgtgagtccttcaagagcagttatcaattgttagttagatattttctatttagagaatgcttaagggattccaatcccgatccaaatcataatttgttcttaagtatactgggcaggtcccctattttaagtcataattttgtatttagtgctttcctggctctcagagagtattaatattgatattaataatatagttaatagtaatattgctatttacatggaaacaaataaaagatctcagaattca

SEQ ID NO: 33193 - DNA, 1240 bp, Homo sapiens
  source 1..1240: mol_type = unassigned DNA
gtacagcttgctggtggttggggtcacattggactatcaatatccaggagatgttgagaaaaagaggggatcctttccaacaagtcatccagcaactctgggacagaaggaaagctgtgggaagaaaagcagggtgctggtttctaggacactaaacctcatggtatcacatcggtatcctcgaattcaaagtatcaaagtacaatttaccgaatataagaaggagaaaggtttcatcctcacttcccaaaaggaggatgaaatcatgaaggtgcagaacaactcagtcatcatcaactgtgatgggttttatctcatctccctgaagggctacttctcccaggaagtcaacattagccttcattaccagaaggatgaggagcccctcttccaactgaagaaggtcaggtctgtcaactccttgatggtggcctctctgacttacaaagacaaagtctacttgaatgtgaccactgacaatacctccctggatgacttccatgtgaatggcggagaactgattcttatccatcaaaatcctggtgaattctgtgtcctttgaggggctgatggcaatatctaaaaccaggcaccagcatgaacaccaagctgggggtggacagggcatggattcttcattgcaagtgaaggagcctcccagctcagccacgtgggatgtgacaagaagcagatcctggccctcccgcccccacccctcagggatatttaaaacttattttatataccagttaatcttatttatccttatattttctaaattgcctagccgtcacaccccaagattgccttgagcctactaggcacctttgtgagaaagaaaaaatagatgcctcttcttcaagatgcattgtttctattggtcaggcaattgtcataataaacttatgtcattgaaaacggtacctgactaccatttgctggaaatttgacatgtgtgtggcattatcaaaatgaagaggagcaaggagtgaaggagtggggttatgaatctgccaaaggtggtatgaaccaacccctggaagccaaagcggcctctccaaggttaaattgattgcagtttgcatattgcctaaatttaaactttctcatttggtgggggttcaaaagaagaatcagcttgtgaaaaatcagtgacttaagagagattttcttgtatacagggagagtgagataacttattgtgaagggttagctttactgtacaggatagcagggaact

SEQ ID NO: 33194 - DNA, 1665 bp, Homo sapiens
  source 1..1665: mol_type = unassigned DNA
aaaaagcggcgcgctgtgtcttcccgcagtctctcgtcatggaatacgcctctgacgcttcactggaccccgaagccccgtggcctcccgcgccccgcgctcgcgcctgccgcgtactgccttgggccctggtcgcggggctgctgctgctgctgctgctcgctgccgcctgcgccgtcttcctcgcctgcccctgggccgtgtccggggctcgcgcctcgcccggctccgcggccagcccgagactccgcgagggtcccgagctttcgcccgacgatcccgccggcctcttggacctgcggcagggcatgtttgcgcagctggtggcccaaaatgttctgctgatcgatgggcccctgagctggtacagtgacccaggcctggcaggcgtgtccctgacggggggcctgagctacaaagaggacacgaaggagctggtggtggccaaggctggagtctactatgtcttctttcaactagagctgcggcgcgtggtggccggcgagggctcaggctccgtttcacttgcgctgcacctgcagccactgcgctctgctgctggggccgccgccctggctttgaccgtggacctgccacccgcctcctccgaggctcggaactcggccttcggtttccagggccgcttgctgcacctgagtgccggccagcgcctgggcgtccatcttcacactgaggccagggcacgccatgcctggcagcttacccagggcgccacagtcttgggactcttccgggtgacccccgaaatcccagccggactcccttcaccgaggtcggaataacgtccagcctgggtgcagcccacctggacagagtccgaatcctactccatccttcatggagacccctggtgctgggtccctgctgctttctctacctcaaggggcttggcaggggtccctgctgctgacctccccttgaggaccctcctcacccactccttccccaagttggaccttgatatttattctgagcctgagctcagataatatattatatatattatatatatatatatatttctatttaaagaggatcctgagtttgtgaatggacttttttagaggagttgttttgggggggggggggtcttcgacattgccgaggctggtcttgaactcctggacttagacgatcctcctgcctcagcctcccaagcaactgggattcatcctttctattaattcattgtacttatttgcttatttgtgtgtattgagcatctgtaatgtgccagcattgtgcccaggctagggggctatagaaacatctagaaatagactgaaagaaaatctgagttatggtaatacgtgaggaatttaaagactcatccccagcctccacctcctgtgtgatacttgggggctagcttttttctttctttcttttttttgagatggtcttgttctgtcaaccaggctagaatgcagcggtgcaatcatgagtcaatgcagcctccagcctcgacctcccgaggctcaggtgatcctcccatctcagcctctcgagtagctgggaccacagttgtgtgccaccacacttggctaactttttaatttttttgcggagacggtattgctatgttgccaaggttgtttacatgccagtacaatttataataaacactcatttttcctccctctg

SEQ ID NO: 33195 - DNA, 8138 bp, Homo sapiens
  source 1..8138: mol_type = unassigned DNA
ccgctgaggccgcggcgcccgccagcctgtcccgcgccatggccccgcgcgcccggcggcgccgcccgctgttcgcgctgctgctgctctgcgcgctgctcgcccggctgcaggtggctttgcagatcgctcctccatgtaccagtgagaagcattatgagcatctgggacggtgctgtaacaaatgtgaaccaggaaagtacatgtcttctaaatgcactactacctctgacagtgtatgtctgccctgtggcccggatgaatacttggatagctggaatgaagaagataaatgcttgctgcataaagtttgtgatacaggcaaggccctggtggccgtggtcgccggcaacagcacgaccccccggcgctgcgcgtgcacggctgggtaccactggagccaggactgcgagtgctgccgccgcaacaccgagtgcgcgccgggcctgggcgcccagcacccgttgcagctcaacaaggacacagtgtgcaaaccttgccttgcaggctacttctctgatgccttttcctccacggacaaatgcagaccctggaccaactgtaccttccttggaaagagagtagaacatcatgggacagagaaatccgatgcggtttgcagttcttctctgccagctagaaaaccaccaaatgaaccccatgtttacttgcccggtttaataattctgcttctcttcgcgtctgtggccctggtggctgccatcatctttggcgtttgctataggaaaaaagggaaagcactcacagctaatttgtggcactggatcaatgaggcttgtggccgcctaagtggagataaggagtcctcaggtgacagttgtgtcagtacacacacggcaaactttggtcagcagggagcatgtgaaggtgtcttactgctgactctggaggagaagacatttccagaagatatgtgctacccagatcaaggtggtgtctgtcagggcacatgtgtaggaggtggtccctacgcacaaggcgaagatgccaggatgctctcattggtcagcaagaccgagatagaggaagacagcttcagacagatgcccacagaagatgaatacatggacaggccctcccagcccacagaccagttactgttcctcactgagcctggaagcaaatccacacctcctttctctgaacccctggaggtgggggagaatgacagtttaagccagtgcttcacggggacacagagcacagtgggttcagaaagctgcaactgcactgagcccctgtgcaggactgattggactcccatgtcctctgaaaactacttgcaaaaagaggtggacagtggccattgcccgcactgggcagccagccccagccccaactgggcagatgtctgcacaggctgccggaaccctcctggggaggactgtgaacccctcgtgggttccccaaaacgtggacccttgccccagtgcgcctatggcatgggccttccccctgaagaagaagccagcaggacggaggccagagaccagcccgaggatggggctgatgggaggctcccaagctcagcgagggcaggtgccgggtctggaagctcccctggtggccagtcccctgcatctggaaatgtgactggaaacagtaactccacgttcatctccagcgggcaggtgatgaacttcaagggcgacatcatcgtggtctacgtcagccagacctcgcaggagggcgcggcggcggctgcggagcccatgggccgcccggtgcaggaggagaccctggcgcgccgagactccttcgcggggaacggcccgcgcttcccggacccgtgcggcggccccgaggggctgcgggagccggagaaggcctcgaggccggtgcaggagcaaggcggggccaaggcttgagcgccccccatggctgggagcccgaagctcggagccagggctcgcgagggcagcaccgcagcctctgccccagccccggccacccagggatcgatcggtacagtcgaggaagaccacccggcattctctgcccactttgccttccaggaaatgggcttttcaggaagtgaattgatgaggactgtccccatgcccacggatgctcagcagcccgccgcactggggcagatgtctcccctgccactcctcaaactcgcagcagtaatttgtggcactatgacagctatttttatgactatcctgttctgtgggggggggggtctgttttccccccatatttgtattccttttcataacttttcttgatatctttcctccctcttttttaatgtaaaggttttctcaaaaattctcctaaaggtgagggtctctttcttttctcttttccttttttttttctttttttggcaacctggctctggcccaggctagagtgcagtggtgcgattatagcccggtgcagcctctaactcctgggctcaagcaatccaagtgatcctcccacctcaaccttcggagtagctgggatcacagctgcaggccacgcccagcttcctccccccgactccccccccagagacacggtcccaccatgttacccagcctggtctcaaactccccagctaaagcagtcctccagcctcggcctcccaaagtactgggattacaggcgtgagcccccacgctggcctgctttacgtattttcttttgtgcccctgctcacagtgttttagagatggctttcccagtgtgtgttcattgtaaacacttttgggaaagggctaaacatgtgaggcctggagatagttgctaagttgctaggaacatgtggtgggactttcatattctgaaaaatgttctatattctcatttttctaaaagaaagaaaaaaggaaacccgatttatttctcctgaatctttttaagtttgtgtcgttccttaagcagaactaagctcagtatgtgaccttacccgctaggtggttaatttatccatgctggcagaggcactcaggtacttggtaagcaaatttctaaaactccaagttgctgcagcttggcattcttcttattctagaggtctctctggaaaagatggagaaaatgaacaggacatggggctcctggaaagaaagggcccgggaagttcaaggaagaataaagttgaaattttaatttgcattttttttgtctagataagaatagcgtgaatagatcctcttttattcgtaaataatcgtgcatctgtgggttagccttgtagaagtggaaaacattccattttccaatgcatttaaatgtaaagccaaatctgcatgttgtgaatttaagaaaacttattatcctaaaggtgcctttctcttggcatcatcccgcttgtgagaagcctagaggacgctccaggtggaaggaaatcccctgggtggttttatcttttgttacccagtgagcactggttccccgcaaatactggggaaaagcaaaaatacacaagcaagttaaaattaattttgcacatctgggaggttataaaagaaagcactaatagtagtcactgcccagactttactggccacaaatgcccagctgaagagcatgactgtggatcactggtttttccctcctgctggaaatgctggggtggtagcggtcgattaggattttcagtggagaagcacaggacagttctgtaatttatgggactccttagccaacataaagaactgcaggaaataactgcacagccaggaggatccgttggtgggaatttaccgtcattcctgcccttttatttaacatcatccacagagagatgttatacaaatggaggaaaccattataccttttgatatggaatatattacagagttacagttcacaaagtagaatgctgagctgaaaacccgagtttctgctgtgactgtcatctcactgagcacttcgcttttctttgcttttattttttccttctataaaaaggcaataatgataatttataatagtttccctacccagagatattagaagtatgctacagtgaatgttaaagtaccttgagatccttaaatcaaaggtgctatatacataagtaagactctactttcagaaaaaggtaatattatttcctgcactgatccctactaattctatattgatccaaaggcaactcaatgctaaaaaatgtatagaaaatataagtctgtgtctgtgtactgtagagatgtatgtgacaagtgtaaacaaaatgaactgaagcagtaatgaacagttattagggggaacatgataaagagattatattaagcttatgtttcaccataaaatcctttttatggcttactaaaaccgagctcactgtaaaatcatgatccaacttattgctaatctttatgatatgcttattcctaatctttatggtatggtgtcaaccgttcatttgtatcttattgctcattccctggaccacagactagggacagaaaatacttgctttaataatatatatgctgttgatttcacaaaaatttattaaaatacagcctgggtacccagtgaaagagctgaaatggaaatggagtatcatgtttcctactcacattttactcagctgtcggaaggaagaatgaatttctcaagagcagtttgaatgtgttagatcagaaccttcatgtggtggggaaaatgggattatttcagtgtaacaaaccacccaaagacttagtggcttaaaatagtcaccattggccaggcacagcggttcatgcctcccagtgctttgggaggccaaggcaggaggatcacttgaggacagtagttagagatcaaactgggcaatggagtgagacctcgtctctacaaaaaatacaaaacttatctgggcacggtggtgtgcacctgcagtcctggctactcaggaggctgaggcaggaggatgcttgagtccaggagttcaaggttactgtgagctttgattgggtcagtgcactccagtgtaaaaaaacaaaaataaaaaccaccacttatttagctcccaattctatgggttggatcagcttgggtggttcttcaggcctggtccctcctggcctggtttgcttacccatttacaatgacccggctagttggccgggccaggctgtgtgctctccacctgtctcccatccttccagccacctagctgggcatgctctcatggtggtgtcgagcctgagaacaagcagaaacctgccaggcttcttgaggcctaggctctaactggcatgctgtcacttctgccacattctgtgggccaaagcaggtcacaaaggcagcccagatccaagggatgggggagcagcatatccccccatgggaagagttgcggaatgagagggtagggggtggacacacagaggggaagatggcccccttgccatctgtccaccacagggcactgcgtggagtaaaatgctgcagagaagagtgcattctgggaaaaaaagaggaacatatcccagcccctaaccagtgagtagctccttctctggtgattgaattcccttaatgcacagcactatagattcccacaatgaaagggacacccacgttcatatttaagtgctgtgtcaaaattctttccagagccaaatataggtgatttgggaattgagcctactgtactgcttccacattcctttggcacagaaaactgaaaagtcacaacttctaaaatcaagaaaactggtgagataccttggggtagagaaacctgcatataaacagataaaagatcgagtgttcacccttcacctcagctcaacaaacaaactcttgttacgattatacaagggtgagcttgagcaaaggtgctgtctttggtggaagaaacgtagttttgagttgtttgctctttgacagtctctgatggcatgtgagtctggtgcattgctgtgggctgcgctgggcacaagttgcataacccgcttttggaagaggagacaaagcattcaaagccctaaacactctgttggtgaatcatcatgtttattgagtgtgcttttagtggcagggccctgagcacctgggaaaggagatgaggagcgctggagggttcggagcagagaagacgagacaatgctctgctccaagcgccagaggaggcttctgggaaggggctgtctgtggaatttctgacccccagagccctgctggtgaagtcttgcaaccactaaagctttgccagagaagaggagggacctgacactgggcagtggcggtgccagcagtgagcacaggcggggtctaggtgggatcactgaagccaagccaagtggtgcagggggagccgccctggaccaacacccccatggctgccccactgcggaactgcctactgcggcaaaacaatcctatgtcccccaaggtttcaacaaagaggaggaccgaataaatgtcccagtgggcaggcacacccacaagacttgctgctcctcctgacccacccgcatggctctgcacagctgtgagtccagttttctctcttcctacctccctcttacccagttatcctgaccccagggtgaggttgaaactcatgctaggctaacatctctttccttcatcccattcataaaactggcatacaggaatgttttaaaaaaatctttaagattaccaggagtataaaagttaaaatgacaaaattacaggcctgttaccagatcttcgtactaaccaaggagctggtgacactaccctcttccctgtgtgatagaaaatgcagacgttttgcaggcagacctggttcatgactcagcgctgtgacttgtggacttatcttgtgcagctacatcacttcttagccttgttttcaacatgcgtaagcagaaggtactaatattagtctttagggctggtttgaggatgacgtgagatgagagacaaccaagcactcactggcagttcctagaagattccagtagtagagatctgactgtcctacactactttccctccctgtctctgacacttgttcattcctgggctcaggagccatctcagtcatcatgtcggaccacgtaactataaccaagctctgctgcccacctgggacaccttcccactctttgcaactaggtcggagggacgcaccttctccacagttgacaggactgttatggttgacccaaaagttgtcatcttctgacatgacacactgagggaagtagacttacccaatataacttcacattatactgtcttaaaagactatgattaaaatgggcatcagtgtaggcaacatgtagggcgcaaagaatagccagatgtgaaggttgaaaggctatgtgggctagtttgtcatggtattcctggtgcctctccccgtttgggaagaataacacattgaccaccggctcagaggaggtggcattataggtccaggccccttcaggagggcactggagtcaatgaaagcttttgctctcacccaggctcttggtttctcacgggcaggggtagcccaggaaacaaaggctgtatagactttaagtcgtgagaaaaacgacattcttatggtgaggctcttagagactgtctccatttaagcagcagcagtaaaacatcttaccctaaaatgaagaagcaaatccatttttattggcttttatagcctctctctttcaatgacaaagaaaccattaaaatgaatgtttaaagttcttagaagagctttctctaaatatttactctgtcagtggaaaaataaacattttttacatcgggtctattgagtttgttatatacagtaaaattcaccctttttagatatatagttttatgagttttaacaaaaatacatagttgtgtaaccaccaccatcacaatcaagatatagaatatttcaacatcccaaagttcccatttcccttttcagtcaatcccttccccactacccctagcccctggcaaccattatctgttctctcttcccatagtttcaccttttccaatttgtcgtgtagagttacacagctcatagccatttgagtctggcttctttccacataatgtccttgagatccatcggtgggtacaccagtagttccattttttttctgagtagtagtccattgtatggatgtactgcggtttattcaccaacatatgggttctttcctgtttggggagattacaaataaagctactat

SEQ ID NO: 33196 - DNA, 1718 bp, Homo sapiens
  source 1..1718: mol_type = unassigned DNA
ggagcaggctcaggatgggcctccagtgcctcctctggagctcactacccagactacagcagcgcagtgggcagcgcctcagctccttccccttctgctgcctacagcctggacaggacccggaatcaaaccgcaggccctgggtcaccgctgccggaaagagccagttcctgtccgtccatgcacccaccaccaaaacccaggccttcctggaggtgctaggggaggccatgccccttttctgagtgcttggaagtgactgctgcaagtgacaagtgaccacgccttttcccccgcgggtataaattcagaggcgctgcgctccgattctggcagtgcagctgtgggaacctctccacgcgcacgaactcagccaacgatttctgatagatttttgggagtttgaccagagatgcaaggggtgaaggagcgcttcctaccgttagggaactctggggacagagcgccccggccgcctgatggccgaggcagggtgcgacccaggacccaggacggcgtcgggaaccataccatggcccggatccccaagaccctaaagttcgtcgtcgtcatcgtcgcggtcctgctgccagtcctagcttactctgccaccactgcccggcaggaggaagttccccagcagacagtggccccacagcaacagaggcacagcttcaagggggaggagtgtccagcaggatctcatagatcagaacatactggagcctgtaacccgtgcacagagggtgtggattacaccaacgcttccaacaatgaaccttcttgcttcccatgtacagtttgtaaatcagatcaaaaacataaaagttcctgcaccatgaccagagacacagtgtgtcagtgtaaagaaggcaccttccggaatgaaaactccccagagatgtgccggaagtgtagcaggtgccctagtggggaagtccaagtcagtaattgtacgtcctgggatgatatccagtgtgttgaagaatttggtgccaatgccactgtggaaaccccagctgctgaagagacaatgaacaccagcccggggactcctgccccagctgctgaagagacaatgaacaccagcccggggactcctgccccagctgctgaagagacaatgaccaccagcccggggactcctgccccagctgctgaagagacaatgaccaccagcccggggactcctgccccagctgctgaagagacaatgatcaccagcccggggactcctgcctcttctcattacctctcatgcaccatcgtagggatcatagttctaattgtgcttctgattgtgtttgtttgaaagacttcactgtggaagaaattccttccttacctgaaaggttcaggtaggcgctggctgagggcggggggcgctggacactctctgccctgcctccctctgctgtgttcccacagacagaaacgcctgcccctgccccaagtcctggtgtctccagcctggctctatcttcctccttgtgatcgtcccatccccacatcccgtgcaccccccaggaccctggtctcatcagtccctctcctggagctgggggtccacacatctcccagccaagtccaagagggcagggccagttcctcccatcttcaggcccagccaggcagggggcagtcggctcctcaactgggtgacaagggtgaggatgagaagtggtcacgggatttattcagccttggtcagagcagaa

SEQ ID NO: 33197 - DNA, 894 bp, Homo sapiens
  source 1..894: mol_type = unassigned DNA
ggcagtgcagctgtgggaacctctccacgcgcacgaactcagccaacgatttctgatagatttttgggagtttgaccagagatgcaaggggtgaaggagcgcttcctaccgttagggaactctggggacagagcgccccggccgcctgatggccgaggcagggtgcgacccaggacccaggacggcgtcgggaaccataccatggcccggatccccaagaccctaaagttcgtcgtcgtcatcgtcgcggtcctgctgccagatctcatagatcagaacatactggagcctgtaacccgtgcacagagggtgtggattacaccaacgcttccaacaatgaaccttcttgcttcccatgtacagtttgtaaatcagatcaaaaacataaaagttcctgcaccatgaccagagacacagtgtgtcagtgtaaagaaggcaccttccggaatgaaaactccccagagatgtgccggaagtgtagcaggtgccctagtggggaagtccaagtcagtaattgtacgtcctgggatgatatccagtgtgttgaagaatttggtgccaatgccactgtggaaaccccagctgctgaagagacaatgaacaccagcccggggactcctgccccagctgctgaagagacaatgaacaccagcccggggactcctgccccagctgctgaagagacaatgaccaccagcccggggactcctgccccagctgctgaagagacaatgaccaccagcccggggactcctgccccagctgctgaagagacaatgatcaccagcccggggactcctgcctcttctcattacctctcatgcaccatcgtagggatcatagttctaattgtgcttctgattgtgtttgtttgaaagacttcactgtggaaga

SEQ ID NO: 33198 - DNA, 1023 bp, Homo sapiens
  source 1..1023: mol_type = unassigned DNA
gctgtgggaacctctccacgcgcacgaactcagccaacgatttctgatagatttttgggagtttgaccagagatgcaaggggtgaaggagcgcttcctaccgttagggaactctggggacagagcgccccggccgcctgatggccgaggcagggtgcgacccaggacccaggacggcgtcgggaaccataccatggcccggatccccaagaccctaaagttcgtcgtcgtcatcgtcgcggtcctgctgccagtcctagcttactctgccaccactgcccggcaggaggaagttccccagcagacagtggccccacagcaacagaggcacagcttcaagggggaggagtgtccagcaggatctcatagatcagaacatactggagcctgtaacccgtgcacagagggtgtggattacaccaacgcttccaacaatgaaccttcttgcttcccatgtacagtttgtaaatcagatcaaaaacataaaagttcctgcaccatgaccagagacacagtgtgtcagtgtaaagaaggcaccttccggaatgaaaactccccagagatgtgccggaagtgtagcaggtgccctagtggggaagtccaagtcagtaattgtacgtcctgggatgatatccagtgtgttgaagaatttggtgccaatgccactgtggaaaccccagctgctgaagagacaatgaacaccagcccggggactcctgccccagctgctgaagagacaatgaacaccagcccggggactcctgccccagctgctgaagagacaatgaccaccagcccggggactcctgccccagctgctgaagagacaatgaccaccagcccggggactcctgccccagctgctgaagagacaatgatcaccagcccggggactcctgcctcttctcattacctctcatgcaccatcgtagggatcatagttctaattgtgcttctgattgtaccctatctcaaaaaaaaaaaaaaaaaaaaactaaagaaaaaacaaaaacgaaagagcaag

SEQ ID NO: 33199 - DNA, 4521 bp, Homo sapiens
  source 1..4521: mol_type = unassigned DNA
ccgctgaggccgcggcgcccgccagcctgtcccgcgccatggccccgcgcgcccggcggcgccgcccgctgttcgcgctgctgctgctctgcgcgctgctcgcccggctgcaggtggctttgcagatcgctcctccatgtaccagtgagaagcattatgagcatctgggacggtgctgtaacaaatgtgaaccaggaaagtacatgtcttctaaatgcactactacctctgacagtgtatgtctgccctgtggcccggatgaatacttggatagctggaatgaagaagataaatgcttgctgcataaagtttgtgatacaggcaaggccctggtggccgtggtcgccggcaacagcacgaccccccggcgctgcgcgtgcacggctgggtaccactggagccaggactgcgagtgctgccgccgcaacaccgagtgcgcgccgggcctgggcgcccagcacccgttgcagctcaacaaggacacagtgtgcaaaccttgccttgcaggctacttctctgatgccttttcctccacggacaaatgcagaccctggaccaactgtaccttccttggaaagagagtagaacatcatgggacagagaaatccgatgcggtttgcagttcttctctgccagctagaaaaccaccaaatgaaccccatgtttacttgcccggtttaataattctgcttctcttcgcgtctgtggccctggtggctgccatcatctttggcgtttgctataggaaaaaagggaaagcactcacagctaatttgtggcactggatcaatgaggcttgtggccgcctaagtggagataaggagtcctcaggtgacagttgtgtcagtacacacacggcaaactttggtcagcagggagcatgtgaaggtgtcttactgctgactctggaggagaagacatttccagaagatatgtgctacccagatcaaggtggtgtctgtcagggcacatgtgtaggaggtggtccctacgcacaaggcgaagatgccaggatgctctcattggtcagcaagaccgagatagaggaagacagcttcagacagatgcccacagaagatgaatacatggacaggccctcccagcccacagaccagttactgttcctcactgagcctggaagcaaatccacacctcctttctctgaacccctggaggtgggggagaatgacagtttaagccagtgcttcacggggacacagagcacagtgggttcagaaagctgcaactgcactgagcccctgtgcaggactgattggactcccatgtcctctgaaaactacttgcaaaaagaggtggacagtggccattgcccgcactgggcagccagccccagccccaactgggcagatgtctgcacaggctgccggaaccctcctggggaggactgtgaacccctcgtgggttccccaaaacgtggacccttgccccagtgcgcctatggcatgggccttccccctgaagaagaagccagcaggacggaggccagagaccagcccgaggatggggctgatgggaggctcccaagctcagcgagggcaggtgccgggtctggaagctcccctggtggccagtcccctgcatctggaaatgtgactggaaacagtaactccacgttcatctccagcgggcaggtgatgaacttcaagggcgacatcatcgtggtctacgtcagccagacctcgcaggagggcgcggcggcggctgcggagcccatgggccgcccggtgcaggaggagaccctggcgcgccgagactccttcgcggggaacggcccgcgcttcccggacccgtgcggcggccccgaggggctgcgggagccggagaaggcctcgaggccggtgcaggagcaaggcggggccaaggcttgagcgccccccatggctgggagcccgaagctcggagccagggctcgcgagggcagcaccgcagcctctgccccagccccggccacccagggatcgatcggtacagtcgaggaagaccacccggcattctctgcccactttgccttccaggaaatgggcttttcaggaagtgaattgatgaggactgtccccatgcccacggatgctcagcagcccgccgcactggggcagatgtctcccctgccactcctcaaactcgcagcagtaatttgtggcactatgacagctatttttatgactatcctgttctgtgggggggggggtctgttttccccccatatttgtattccttttcataacttttcttgatatctttcctccctcttttttaatgtaaaggttttctcaaaaattctcctaaaggtgagggtctctttcttttctcttttccttttttttttctttttttggcaacctggctctggcccaggctagagtgcagtggtgcgattatagcccggtgcagcctctaactcctgggctcaagcaatccaagtgatcctcccacctcaaccttcggagtagctgggatcacagctgcaggccacgcccagcttcctccccccgactccccccccagagacacggtcccaccatgttacccagcctggtctcaaactccccagctaaagcagtcctccagcctcggcctcccaaagtactgggattacaggcgtgagcccccacgctggcctgctttacgtattttcttttgtgcccctgctcacagtgttttagagatggctttcccagtgtgtgttcattgtaaacacttttgggaaagggctaaacatgtgaggcctggagatagttgctaagttgctaggaacatgtggtgggactttcatattctgaaaaatgttctatattctcatttttctaaaagaaagaaaaaaggaaacccgatttatttctcctgaatctttttaagtttgtgtcgttccttaagcagaactaagctcagtatgtgaccttacccgctaggtggttaatttatccatgctggcagaggcactcaggtacttggtaagcaaatttctaaaactccaagttgctgcagcttggcattcttcttattctagaggtctctctggaaaagatggagaaaatgaacaggacatggggctcctggaaagaaagggcccgggaagttcaaggaagaataaagttgaaattttaatttgcattttttttgtctagataagaatagcgtgaatagatcctcttttattcgtaaataatcgtgcatctgtgggttagccttgtagaagtggaaaacattccattttccaatgcatttaaatgtaaagccaaatctgcatgttgtgaatttaagaaaacttattatcctaaaggtgcctttctcttggcatcatcccgcttgtgagaagcctagaggacgctccaggtggaaggaaatcccctgggtggttttatcttttgttacccagtgagcactggttccccgcaaatactggggaaaagcaaaaatacacaagcaagttaaaattaattttgcacatctgggaggttataaaagaaagcactaatagtagtcactgcccagactttactggccacaaatgcccagctgaagagcatgactgtggatcactggtttttccctcctgctggaaatgctggggtggtagcggtcgattaggattttcagtggagaagcacaggacagttctgtaatttatgggactccttagccaacataaagaactgcaggaaataactgcacagccaggaggatccgttggtgggaatttaccgtcattcctgcccttttatttaacatcatccacagagagatgttatacaaatggaggaaaccattataccttttgatatggaatatattacagagttacagttcacaaagtagaatgctgagctgaaaacccgagtttctgctgtgactgtcatctcactgagcacttcgcttttctttgcttttattttttccttctataaaaaggcaataatgataatttataatagtttccctacccagagatattagaagtatgctacagtgaatgttaaagtaccttgagatccttaaatcaaaggtgctatatacataagtaagactctactttcagaaaaaggtaatattatttcctgcactgatccctactaattctatattgatccaaaggcaactcaatgctaaaaaatgtatagaaaatataagtctgtgtctgtgtactgtagagatgtatgtgacaagtgtaaacaaaatgaactgaagcagtaatgaacagttattagggggaacatgataaagagattatattaagcttatgtttcaccataaaatcctttttatggcttactaaaaccgagctcactgtaaaatcatgatccaacttattgctaatctttatgatatgcttattcctaatctttatggtatggtgtcaaccgttcatttgtatcttattgctcattccctggaccacagactagggacagaaaatacttgctttaataatatatatgctgttgatttcacaaaaatttattaaaatacagcctgggtacccagtgaaagagctgaaatgga

SEQ ID NO: 33200 - DNA, 3591 bp, Homo sapiens
  source 1..3591: mol_type = unassigned DNA
ggcagccgcgcccgctgggccacagaggccgctgaggccgcggcgcccgccagcctgtcccgcgccatggccccgcgcgcccggcggcgccgcccgctgttcgcgctgctgctgctctgcgcgctgctcgcccggctgcaggtggctttgcagatcgctcctccatgtaccagtgagaagcattatgagcatctgggacggtgctgtaacaaatgtgaaccaggaaagtacatgtcttctaaatgcactactacctctgacagtgtatgtctgccctgtggcccggatgaatacttggatagctggaatgaagaagataaatgcttgctgcataaagtttgtgatacaggcaaggccctggtggccgtggtcgccggcaacagcacgaccccccggcgctgcgcgtgcacggctgggtaccactggagccaggactgcgagtgctgccgccgcaacaccgagtgcgcgccgggcctgggcgcccagcacccgttgcagctcaacaaggacacagtgtgcaaaccttgccttgcaggctacttctctgatgccttttcctccacggacaaatgcagaccctggaccaactgtaccttccttggaaagagagtagaacatcatgggacagagaaatccgatgcggtttgcagttcttctctgccagctagaaaaccaccaaatggaaatgtgactggaaacagtaactccacgttcatctccagcgggcaggtgatgaacttcaagggcgacatcatcgtggtctacgtcagccagacctcgcaggagggcgcggcggcggctgcggagcccatgggccgcccggtgcaggaggagaccctggcgcgccgagactccttcgcggggaacggcccgcgcttcccggacccgtgcggcggccccgaggggctgcgggagccggagaaggcctcgaggccggtgcaggagcaaggcggggccaaggcttgagcgccccccatggctgggagcccgaagctcggagccagggctcgcgagggcagcaccgcagcctctgccccagccccggccacccagggatcgatcggtacagtcgaggaagaccacccggcattctctgcccactttgccttccaggaaatgggcttttcaggaagtgaattgatgaggactgtccccatgcccacggatgctcagcagcccgccgcactggggcagatgtctcccctgccactcctcaaactcgcagcagtaatttgtggcactatgacagctatttttatgactatcctgttctgtgggggggggggtctgttttccccccatatttgtattccttttcataacttttcttgatatctttcctccctcttttttaatgtaaaggttttctcaaaaattctcctaaaggtgagggtctctttcttttctcttttccttttttttttctttttttggcaacctggctctggcccaggctagagtgcagtggtgcgattatagcccggtgcagcctctaactcctgggctcaagcaatccaagtgatcctcccacctcaaccttcggagtagctgggatcacagctgcaggccacgcccagcttcctccccccgactccccccccagagacacggtcccaccatgttacccagcctggtctcaaactccccagctaaagcagtcctccagcctcggcctcccaaagtactgggattacaggcgtgagcccccacgctggcctgctttacgtattttcttttgtgcccctgctcacagtgttttagagatggctttcccagtgtgtgttcattgtaaacacttttgggaaagggctaaacatgtgaggcctggagatagttgctaagttgctaggaacatgtggtgggactttcatattctgaaaaatgttctatattctcatttttctaaaagaaagaaaaaaggaaacccgatttatttctcctgaatctttttaagtttgtgtcgttccttaagcagaactaagctcagtatgtgaccttacccgctaggtggttaatttatccatgctggcagaggcactcaggtacttggtaagcaaatttctaaaactccaagttgctgcagcttggcattcttcttattctagaggtctctctggaaaagatggagaaaatgaacaggacatggggctcctggaaagaaagggcccgggaagttcaaggaagaataaagttgaaattttaatttgcattttttttgtctagataagaatagcgtgaatagatcctcttttattcgtaaataatcgtgcatctgtgggttagccttgtagaagtggaaaacattccattttccaatgcatttaaatgtaaagccaaatctgcatgttgtgaatttaagaaaacttattatcctaaaggtgcctttctcttggcatcatcccgcttgtgagaagcctagaggacgctccaggtggaaggaaatcccctgggtggttttatcttttgttacccagtgagcactggttccccgcaaatactggggaaaagcaaaaatacacaagcaagttaaaattaattttgcacatctgggaggttataaaagaaagcactaatagtagtcactgcccagactttactggccacaaatgcccagctgaagagcatgactgtggatcactggtttttccctcctgctggaaatgctggggtggtagcggtcgattaggattttcagtggagaagcacaggacagttctgtaatttatgggactccttagccaacataaagaactgcaggaaataactgcacagccaggaggatccgttggtgggaatttaccgtcattcctgcccttttatttaacatcatccacagagagatgttatacaaatggaggaaaccattataccttttgatatggaatatattacagagttacagttcacaaagtagaatgctgagctgaaaacccgagtttctgctgtgactgtcatctcactgagcacttcgcttttctttgcttttattttttccttctataaaaaggcaataatgataatttataatagtttccctacccagagatattagaagtatgctacagtgaatgttaaagtaccttgagatccttaaatcaaaggtgctatatacataagtaagactctactttcagaaaaaggtaatattatttcctgcactgatccctactaattctatattgatccaaaggcaactcaatgctaaaaaatgtatagaaaatataagtctgtgtctgtgtactgtagagatgtatgtgacaagtgtaaacaaaatgaactgaagcagtaatgaacagttattagggggaacatgataaagagattatattaagcttatgtttcaccataaaatcctttttatggcttactaaaaccgagctcactgtaaaatcatgatccaacttattgctaatctttatgatatgcttattcctaatctttatggtatggtgtcaaccgttcatttgtatcttattgctcattccctggaccacagactagggacagaaaatacttgctttaataatatatatgctgttgatttcacaaaaatttattaaaatacagcctgggtacccagtgaaagagctg

SEQ ID NO: 33201 - DNA, 2402 bp, Homo sapiens
  source 1..2402: mol_type = unassigned DNA
ggaaacctcagagccccgcggagacagcagccgccttgttcctcagcccggtggcttttttttcccctgctctcccaggggccagacaccaccgccccacccctcacgccccacctccctgggggatcctttccgccccagccctgaaagcgttaaccctggagctttctgcacaccccccgaccgctcccgcccaagcttcctaaaaaagaaaggtgcaaagtttggtccaggatagaaaaatgactgatcaaaggcaggcgatacttcctgttgccgggacgctatatataacgtgatgagcgcacgggctgcggagacgcaccggagcgctcgcccagccgccgcctccaagcccctgaggtttccggggaccacaatgaacaacttgctgtgctgcgcgctcgtgtttctggacatctccattaagtggaccacccaggaaacgtttcctccaaagtaccttcattatgacgaagaaacctctcatcagctgttgtgtgacaaatgtcctcctggtacctacctaaaacaacactgtacagcaaagtggaagaccgtgtgcgccccttgccctgaccactactacacagacagctggcacaccagtgacgagtgtctatactgcagccccgtgtgcaaggagctgcagtacgtcaagcaggagtgcaatcgcacccacaaccgcgtgtgcgaatgcaaggaagggcgctaccttgagatagagttctgcttgaaacataggagctgccctcctggatttggagtggtgcaagctggaaccccagagcgaaatacagtttgcaaaagatgtccagatgggttcttctcaaatgagacgtcatctaaagcaccctgtagaaaacacacaaattgcagtgtctttggtctcctgctaactcagaaaggaaatgcaacacacgacaacatatgttccggaaacagtgaatcaactcaaaaatgtggaatagatgttaccctgtgtgaggaggcattcttcaggtttgctgttcctacaaagtttacgcctaactggcttagtgtcttggtagacaatttgcctggcaccaaagtaaacgcagagagtgtagagaggataaaacggcaacacagctcacaagaacagactttccagctgctgaagttatggaaacatcaaaacaaagaccaagatatagtcaagaagatcatccaagatattgacctctgtgaaaacagcgtgcagcggcacattggacatgctaacctcaccttcgagcagcttcgtagcttgatggaaagcttaccgggaaagaaagtgggagcagaagacattgaaaaaacaataaaggcatgcaaacccagtgaccagatcctgaagctgctcagtttgtggcgaataaaaaatggcgaccaagacaccttgaagggcctaatgcacgcactaaagcactcaaagacgtaccactttcccaaaactgtcactcagagtctaaagaagaccatcaggttccttcacagcttcacaatgtacaaattgtatcagaagttatttttagaaatgataggtaaccaggtccaatcagtaaaaataagctgcttataactggaaatggccattgagctgtttcctcacaattggcgagatcccatggatgagtaaactgtttctcaggcacttgaggctttcagtgatatctttctcattaccagtgactaattttgccacagggtactaaaagaaactatgatgtggagaaaggactaacatctcctccaataaaccccaaatggttaatccaactgtcagatctggatcgttatctactgactatattttcccttattactgcttgcagtaattcaactggaaattaaaaaaaaaaaactagactccattgtgccttactaaatatgggaatgtctaacttaaatagctttgagatttcagctatgctagaggcttttattagaaagccatatttttttctgtaaaagttactaatatatctgtaacactattacagtattgctatttatattcattcagatataagatttgtacatattatcatcctataaagaaacggtatgacttaattttagaaagaaaattatattctgtttattatgacaaatgaaagagaaaatatatatttttaatggaaagtttgtagcatttttctaataggtactgccatatttttctgtgtggagtatttttataattttatctgtataagctgtaatatcattttatagaaaatgcattatttagtcaattgtttaatgttggaaaacatatgaaatataaattatctgaatattagatgctctgagaaattgaatgtaccttatttaaaagattttatggttttataactatataaatgacattattaaagttttcaaattatttttta

SEQ ID NO: 33202 - DNA, 1033 bp, Homo sapiens
  source 1..1033: mol_type = unassigned DNA
aaggcgggggcgggggcggggcggcggccgtgggtccctgccggccggcggcgggcgcagacagcggcgggcgcaggacgtgcactatggctcggggctcgctgcgccggttgctgcggctcctcgtgctggggctctggctggcgttgctgcgctccgtggccggggagcaagcgccaggcaccgccccctgctcccgcggcagctcctggagcgcggacctggacaagtgcatggactgcgcgtcttgcagggcgcgaccgcacagcgacttctgcctgggctgcgctgcagcacctcctgcccccttccggctgctttggcccatccttgggggcgctctgagcctgaccttcgtgctggggctgctttctggctttttggtctggagacgatgccgcaggagagagaagttcaccacccccatagaggagaccggcggagagggctgcccagctgtggcgctgatccagtgacaatgtgccccctgccagccggggctcgcccactcatcattcattcatccattctagagccagtctctgcctcccagacgcggcgggagccaagctcctccaaccacaaggggggtggggggcggtgaatcacctctgaggcctgggcccagggttcaggggaaccttccaaggtgtctggttgccctgcctctggctccagaacagaaagggagcctcacgctggctcacacaaaacagctgacactgactaaggaactgcagcatttgcacaggggaggggggtgccctccttcctagaggccctgggggccaggctgacttggggggcagacttgacactaggccccactcactcagatgtcctgaaattccaccacgggggtcaccctggggggttagggacctatttttaacactagggggctggcccactaggagggctggccctaagatacagacccccccaactccccaaagcggggaggagatatttattttggggagagtttggaggggagggagaatttattaataaaagaatctttaactttaaa

SEQ ID NO: 33203 - DNA, 839 bp, Homo sapiens
  source 1..839: mol_type = unassigned DNA
atggctcggggctcgctgcgccggttgctgcggctcctcgtgctggggctctggctggcgttgctgcgctccgtggccggggagcaagcgccaggcgctgcagcacctcctgcccccttccggctgctttggcccatccttgggggcgctctgagcctgaccttcgtgctggggctgctttctggctttttggtctggagacgatgccgcaggagagagaagttcaccacccccatagaggagaccggcggagagggctgcccagctgtggcgctgatccagtgacaatgtgccccctgccagccggggctcgcccactcatcattcattcatccattctagagccagtctctgcctcccagacgcggcgggagccaagctcctccaaccacaaggggggtggggggcggtgaatcacctctgaggcctgggcccagggttcaggggaaccttccaaggtgtctggttgccctgcctctggctccagaacagaaagggagcctcacgctggctcacacaaaacagctgacactgactaaggaactgcagcatttgcacaggggaggggggtgccctccttcctagaggccctgggggccaggctgacttggggggcagacttgacactaggccccactcactcagatgtcctgaaattccaccacgggggtcaccctggggggttagggacctatttttaacactagggggctggcccactaggagggctggccctaagatacagacccccccaactccccaaagcggggaggagatatttattttggggagagtttggaggggagggagaatttattaataaaagaatctttaacttt

SEQ ID NO: 33204 - DNA, 1357 bp, Homo sapiens
  source 1..1357: mol_type = unassigned DNA
agcatcctgagtaatgagtggcctgggccggagcaggcgaggtggccggagccgtgtggaccaggaggagcgctttccacagggcctgtggacgggggtggctatgagatcctgccccgaagagcagtactgggatcctctgctgggtacctgcatgtcctgcaaaaccatttgcaaccatcagagccagcgcacctgtgcagccttctgcaggtcactcagctgccgcaaggagcaaggcaagttctatgaccatctcctgagggactgcatcagctgtgcctccatctgtggacagcaccctaagcaatgtgcatacttctgtgagaacaagctcaggagcccagtgaaccttccaccagagctcaggagacagcggagtggagaagttgaaaacaattcagacaactcgggaaggtaccaaggattggagcacagaggctcagaagcaagtccagctctcccggggctgaagctgagtgcagatcaggtggccctggtctacagcacgctggggctctgcctgtgtgccgtcctctgctgcttcctggtggcggtggcctgcttcctcaagaagaggggggatccctgctcctgccagccccgctcaaggccccgtcaaagtccggccaagtcttcccaggatcacgcgatggaagccggcagccctgtgagcacatcccccgagccagtggagacctgcagcttctgcttccctgagtgcagggcgcccacgcaggagagcgcagtcacgcctgggacccccgaccccacttgtgctggaaggtgggggtgccacaccaggaccacagtcctgcagccttgcccacacatcccagacagtggccttggcattgtgtgtgtgcctgcccaggaggggggcccaggtgcataaatgggggtcagggagggaaaggaggagggagagagatggagaggaggggagagagaaagagaggtggggagaggggagagagatatgaggagagagagacagaggaggcagagagggagagaaacagaggagacagagagggagagagagacagagggagagagagacagaggggaagagaggcagagagggaaagaggcagagaaggaaagagacaggcagagaaggagagaggcagagagggagagaggcagagagggagagaggcagagagacagagagggagagagggacagagagagatagagcaggaggtcggggcactctgagtcccagttcccagtgcagctgtaggtcgtcatcacctaaccacacgtgcaataaagtcctcgtgcctgctgctcacagcccccgagagcccctcctcctggagaataaaacctttggcagctgcccttcctc

SEQ ID NO: 33205 - DNA, 1397 bp, Homo sapiens
  source 1..1397: mol_type = unassigned DNA
tcctgagtaatgagtggcctgggccggagcaggcgaggtggccggagccgtgtggaccaggaggagcgctggtcactcagctgccgcaaggagcaaggcaagttctatgaccatctcctgagggactgcatcagctgtgcctccatctgtggacagcaccctaagcaatgtgcatacttctgtgagaacaagctcaggagcccagtgaaccttccaccagagctcaggagacagcggagtggagaagttgaaaacaattcagacaactcgggaaggtaccaaggattggagcacagaggctcagaagcaagtccagctctcccggggctgaagctgagtgcagatcaggtggccctggtctacagcacgctggggctctgcctgtgtgccgtcctctgctgcttcctggtggcggtggcctgcttcctcaagaagaggggggatccctgctcctgccagccccgctcaaggccccgtcaaagtccggccaagtcttcccaggatcacgcgatggaagccggcagccctgtgagcacatcccccgagccagtggagacctgcagcttctgcttccctgagtgcagggcgcccacgcaggagagcgcagtcacgcctgggacccccgaccccacttgtgctggaaggaaaacgaagccccctcctgtattgacagctgggaattgtggagtccaccgtcctccacctgagacgagcacagggtctccacgaggacagaggctgctttggactcaatagaaaactgggcatcttcatggtcctagaaggatcccaggaggctgatcctatagagacgtctggttcctgaccccaactgcctccaggtgcctggaacagcccatcgtgggccctttaccctcagcaggtggacgccgttggtcctgccagggcaagatggagatggatgagcacccggatatcctgcccacccaggggcaaggcaacatcatcattactaagtatgagcagggacgctgagctggggcagcagtggacacagagcatgagcgtgttgacatctggaaattcaccagtcgtctctgggttgtgtgtgagacagagctgcccgtgtcagtgccctggaggtgaagggaagagcctgtgcctgctgcgtgggagactggtccagggacagggaatcaggagtggttgcaaaggtgtcaggaaataaaatgtactgacaagtggctgaagatgcttggagactggccaaaatataagaacagcaagaagctgggcacggtggcgggcacctgtaatcccagctactcaggaggctgaggcacgagaattgcttgaacccaggcagtggaggttgcagtgagccaagatcgcaccactgaactccagcctgggcgacaagagggagacttcatctc

SEQ ID NO: 33206 - DNA, 926 bp, Homo sapiens
  source 1..926: mol_type = unassigned DNA
cagctcagcctcagtccccgcagcttgtgcggcggcgtcggcaccatgaggcgagggccccggagcctgcggggcagggacgcgccagcccccacgccctgcgtcccggccgagtgcttcgacctgctggtccgccactgcgtggcctgcgggctcctgcgcacgccgcggccgaaaccggccggggccagcagccctgcgcccaggacggcgctgcagccgcaggagtcggtgggcgcgggggccggcgaggcggcgctgcccctgcccgggctgctctttggcgcccccgcgctgctgggcctggcactggtcctggcgctggtcctggtgggtctggtgagctggaggcggcgacagcggcggcttcgcggcgcgtcctccgcagaggcccccgacggagacaaggacgccccagagcccctggacaaggtcatcattctgtctccgggaatctctgatgccacagctcctgcctggcctcctcctggggaagacccaggaaccaccccacctggccacagtgtccctgtgccagccacagagctgggctccactgaactggtgaccaccaagacggccggccctgagcaacaatagcagggagccggcaggaggtggcccctgccctccctctggacccccagccaggggcttggaaatcaaattcagctcttcactccagcatgcacatgccctctttctgggaccaggctaactctgcagaagcacagacactacagaccacagcattcagcccccatggagtttggtgtgcttgcctttggcttcagacctcaccatctttgacagcccttgaaggtggtagcccagctcctgttcctgtgccttcaaaaggctggggcactatgagtaaaagaccgcttttaaaatggggaaggcaccattaagccaaaatgaatctg

SEQ ID NO: 33207 - DNA, 1707 bp, Homo sapiens
  source 1..1707: mol_type = unassigned DNA
ccttcataccggcccttcccctcggctttgcctggacagctcctgcctcccgcagggcccacctgtgtcccccagcgccgctccacccagcaggcctgagcccctctctgctgccagacaccccctgctgcccactctcctgctgctcgggttctgaggcacagcttgtcacaccgaggcggattctctttctctttctctttctcttctggcccacagccgcagcaatggcgctgagttcctctgctggagttcatcctgctagctgggttcccgagctgccggtctgagcctgaggcatggagcctcctggagactgggggcctcctccctggagatccacccccaaaaccgacgtcttgaggctggtgctgtatctcaccttcctgggagccccctgctacgccccagctctgccgtcctgcaaggaggacgagtacccagtgggctccgagtgctgccccaagtgcagtccaggttatcgtgtgaaggaggcctgcggggagctgacgggcacagtgtgtgaaccctgccctccaggcacctacattgcccacctcaatggcctaagcaagtgtctgcagtgccaaatgtgtgacccagccatgggcctgcgcgcgagccggaactgctccaggacagagaacgccgtgtgtggctgcagcccaggccacttctgcatcgtccaggacggggaccactgcgccgcgtgccgcgcttacgccacctccagcccgggccagagggtgcagaagggaggcaccgagagtcaggacaccctgtgtcagaactgccccccggggaccttctctcccaatgggaccctggaggaatgtcagcaccagaccaagtgcagctggctggtgacgaaggccggagctgggaccagcagctcccactgggtatggtggtttctctcagggagcctcgtcatcgtcattgtttgctccacagttggcctaatcatatgtgtgaaaagaagaaagccaaggggtgatgtagtcaaggtgatcgtctccgtccagcggaaaagacaggaggcagaaggtgaggccacagtcattgaggccctgcaggcccctccggacgtcaccacggtggccgtggaggagacaataccctcattcacggggaggagcccaaaccactgacccacagactctgcaccccgacgccagagatacctggagcgacggctgctgaaagaggctgtccacctggcggaaccaccggagcccggaggcttgggggctccgccctgggctggcttccgtctcctccagtggagggagaggtggggcccctgctggggtagagctggggacgccacgtgccattcccatgggccagtgagggcctggggcctctgttctgctgtggcctgagctccccagagtcctgaggaggagcgccagttgcccctcgctcacagaccacacacccagccctcctgggccagcccagagggcccttcagaccccagctgtctgcgcgtctgactcttgtggcctcagcaggacaggccccgggcactgcctcacagccaaggctggactgggttggctgcagtgtggtgtttagtggataccacatcggaagtgattttctaaattggatttgaattcggctcctgttttctatttgtcatgaaacagtgtatttggggagatgctgtgggaggatgtaaatatcttgtttctcctcaaa

SEQ ID NO: 33208 - DNA, 1027 bp, Homo sapiens
  source 1..1027: mol_type = unassigned DNA
tccttcataccggcccttcccctcggctttgcctggacagctcctgcctcccgcagggcccacctgtgtcccccagcgccgctccacccagcaggcctgagcccctctctgctgccagacaccccctgctgcccactctcctgctgctcgggttctgaggcacagcttgtcacaccgaggcggattctctttctctttctctttctcttctggcccacagccgcagcaatggcgctgagttcctctgctggagttcatcctgctagctgggttcccgagctgccggtctgagcctgaggcatggagcctcctggagactgggggcctcctccctggagatccacccccaaaaccgacgtcttgaggctggtgctgtatctcaccttcctgggagccccctgctacgccccagctctgccgtcctgcaaggaggacgagtacccagtgggctccgagtgctgccccaagtgcagtccaggttatcgtgtgaaggaggcctgcggggagctgacgggcacagtgtgtgaaccctgccctccaggcacctacattgcccacctcaatggcctaagcaagtgtctgcagtgccaaatgtgtgacccagatattggttccccctgtgacctcaggggaagaggtcacctggaggctggtgcccacctgagtccaggcagacagaaaggggaaccagacccagaggtggcctttgagtcactgagcgcagagcctcatgccaggctcagcatggccagtgctccctgcggccaggcaggactgcacctgcgggacagggctgacggcacacctgggggcagggcctgagcctacagggaggcacagggcaggtgggctagccatgaacagaagaggaagctggagtgctttgggggttcatgcatgtaggctgggatttggggctcacacctcaacctgcatgcccagttccatgcccctcccctcttgtgaaagcacctgtctacttgggctgaggatgtgggggcacaggtggcaggtgaggctgccctca

SEQ ID NO: 33209 - DNA, 660 bp, Homo sapiens
  source 1..660: mol_type = unassigned DNA
ctgggacctgctctgggcaagcacaggcgccgcagcaatggcgctgagttcctctgctggagttcatcctgctagctgggttcccgagctgccggtctgagcctgaggcatggagcctcctggagactgggggcctcctccctggagatccacccccaaaaccgacgtcttgaggctggtgctgtatctcaccttcctgggagccccctgctacgccccagctctgccgtcctgcaaggaggacgagtacccagtgggctccgagtgctgccccaagtgcagtccaggttatcgtgtgaaggaggcctgcggggagctgacgggcacagtgtgtgaaccctgccctccaggcacctacattgcccacctcaatggcctaagcaagtgtctgcagtgccaaatgtgtgacccagccatgggcctgcgcgcgagccggaactgctccaggacagagaacgccgtgtgtggctgcagcccaggccacttctgcatcgtccaggacggggaccactgcgccgcgtgccgcgcttacgccacctccagcccgggccagagggtgcagaagggaggcaccgagagtcaggacaccctgtgtcagaactgccccccggggaccttctctcccaatgggaccctggaggaatgtcagcaccagaccaa

SEQ ID NO: 33210 - DNA, 834 bp, Homo sapiens
  source 1..834: mol_type = unassigned DNA
cgagggactcactggtgcctgccttggggctccgggactgtgggctgtctccatccggagccgcagcaatggcgctgagttcctctgctggagttcatcctgctagctgggttcccgagctgccggtctgagcctgaggcatggagcctcctggagactgggggcctcctccctggagatccacccccaaaaccgacgtcttgaggctggtgctgtatctcaccttcctgggagccccctgctacgccccagctctgccgtcctgcaaggaggacgagtacccagtgggctccgagtgctgccccaagtgcagtccaggttatcgtgtgaaggaggcctgcggggagctgacgggcacagtgtgtgaaccctgccctccaggcacctacattgcccacctcaatggcctaagcaagtgtctgcagtgccaaatgtgtgacccagccatgggcctgcgcgcgagccggaactgctccaggacagagaacgccgtgtgtggctgcagcccaggccacttctgcatcgtccaggacggggaccactgcgccgcgtgccgcgcttacgccacctccagcccgggccagagggtgcagaagggaggcaccgagagtcaggacaccctgtgtcagaactgccccccggggaccttctctcccaatgggaccctggaggaatgtcagcaccagaccaagtgcagctggctggtgacgaaggccggagctgggaccagcagctcccactgggtatggtggtttctctcagggagcctcgtcatcgtcattgtttgctccacagttggcctaatcatatgtgtgaaaagaagaaagccaaggg

SEQ ID NO: 33211 - DNA, 1225 bp, Homo sapiens
  source 1..1225: mol_type = unassigned DNA
ctggtgcctgccttggggctccgggactgtgggctgtctccatccggaggtctccctaccaccaggctctgtggggcagggaagcccagtggggtgcagggagccaggaagctggggtggggtcagggcagggtccacagggagaccgggcgaggctggcagccttcccagtccgcgcagcgtctctgcagggggagcaagagctgcccttccacccctcccaggggacgggtaggggcactctgggcttttcccaccccctcacgcagggacacaggcctggtgggtctatgactgaaattggccagaccgcattctggtggttttattcggaagggaagtttaccctgttcagcagaagctgagatgggaacaggaaacccacagggcccctttattcggcaaaaatgtcagtcagcgccccggggagcagccgagggtccctgagtgtccgcagcaatggcgctgagttcctctgctggagttcatcctgctagctgggttcccgagctgccggtctgagcctgaggcatggagcctcctggagactgggggcctcctccctggagatccacccccaaaaccgacgtcttgaggctggtgctgtatctcaccttcctgggagccccctgctacgccccagctctgccgtcctgcaaggaggacgagtacccagtgggctccgagtgctgccccaagtgcagtccaggttatcgtgtgaaggaggcctgcggggagctgacgggcacagtgtgtgaaccctgccctccaggcacctacattgcccacctcaatggcctaagcaagtgtctgcagtgccaaatgtgtgacccagccatgggcctgcgcgcgagccggaactgctccaggacagagaacgccgtgtgtggctgcagcccaggccacttctgcatcgtccaggacggggaccactgcgccgcgtgccgcgcttacgccacctccagcccgggccagagggtgcagaagggaggcaccgagagtcaggacaccctgtgtcagaactgccccccggggaccttctctcccaatgggaccctggaggaatgtcagcaccagaccaagtgcagctggctggtgacgaaggccggagctgggaccagcagctcccactgggtatggtggtttctctcagggagcctcgtcatcgtcattgtttgctccacagttggcctaatcatatgtgtgaaaagaagaaagccaaggg

SEQ ID NO: 33212 - DNA, 827 bp, Homo sapiens
  source 1..827: mol_type = unassigned DNA
agcgtctctgcagggggagcaagagctgcccttccacccctcccaggggacggccgcagcaatggcgctgagttcctctgctggagttcatcctgctagctgggttcccgagctgccggtctgagcctgaggcatggagcctcctggagactgggggcctcctccctggagatccacccccaaaaccgacgtcttgaggctggtgctgtatctcaccttcctgggagccccctgctacgccccagctctgccgtcctgcaaggaggacgagtacccagtgggctccgagtgctgccccaagtgcagtccaggttatcgtgtgaaggaggcctgcggggagctgacgggcacagtgtgtgaaccctgccctccaggcacctacattgcccacctcaatggcctaagcaagtgtctgcagtgccaaatgtgtgacccagccatgggcctgcgcgcgagccggaactgctccaggacagagaacgccgtgtgtggctgcagcccaggccacttctgcatcgtccaggacggggaccactgcgccgcgtgccgcgcttacgccacctccagcccgggccagagggtgcagaagggaggcaccgagagtcaggacaccctgtgtcagaactgccccccggggaccttctctcccaatgggaccctggaggaatgtcagcaccagaccaagtgcagctggctggtgacgaaggccggagctgggaccagcagctcccactgggtatggtggtttctctcagggagcctcgtcatcgtcattgtttgctccacagttggcctaatcatatgtgtgaaaagaagaaagccaaggg

SEQ ID NO: 33213 - DNA, 994 bp, Homo sapiens
  source 1..994: mol_type = unassigned DNA
aagactcaaacttagaaacttgaattagatgtggtattcaaatccttagctgccgcgaagacacagacagcccccgtaagaacccacgaagcaggcgaagttcattgttctcaacattctagctgctcttgctgcatttgctctggaattcttgtagagatattacttgtccttccaggctgttctttctgtagctcccttgttttctttttgtgatcatgttgcagatggctgggcagtgctcccaaaatgaatattttgacagtttgttgcatgcttgcataccttgtcaacttcgatgttcttctaatactcctcctctaacatgtcagcgttattgtaatgcaagtgtgaccaattcagtgaaaggaacgaatgcgattctctggacctgtttgggactgagcttaataatttctttggcagttttcgtgctaatgtttttgctaaggaagataaactctgaaccattaaaggacgagtttaaaaacacaggatcaggtctcctgggcatggctaacattgacctggaaaagagcaggactggtgatgaaattattcttccgagaggcctcgagtacacggtggaagaatgcacctgtgaagactgcatcaagagcaaaccgaaggtcgactctgaccattgctttccactcccagctatggaggaaggcgcaaccattcttgtcaccacgaaaacgaatgactattgcaagagcctgccagctgctttgagtgctacggagatagagaaatcaatttctgctaggtaattaaccatttcgactcgagcagtgccactttaaaaatcttttgtcagaatagatgatgtgtcagatctctttaggatgactgtatttttcagttgccgatacagctttttgtcctctaactgtggaaactctttatgttagatatatttctctaggttactgttgggagcttaatggtagaaacttccttggtttcatgattaaactcttttttttcctga

SEQ ID NO: 33214 - DNA, 621 bp, Homo sapiens
  source 1..621: mol_type = unassigned DNA
ttctagctgctcttgctgcatttgctctggaattcttgtagagatattacttgtccttccaggctgttctttctgtagctcccttgttttctttttgtgatcatgttgcagatggctgggcagtgctcccaaaatgaatattttgacagtttgttgcatgcttgcataccttgtcaacttcgatgttcttctaatactcctcctctaacatgtcagcgttattgtaatgcaagatcaggtctcctgggcatggctaacattgacctggaaaagagcaggactggtgatgaaattattcttccgagaggcctcgagtacacggtggaagaatgcacctgtgaagactgcatcaagagcaaaccgaaggtcgactctgaccattgctttccactcccagctatggaggaaggcgcaaccattcttgtcaccacgaaaacgaatgactattgcaagagcctgccagctgctttgagtgctacggagatagagaaatcaatttctgctaggtaattaaccatttcgactcgagcagtgccactttaaaaatcttttgtcagaatagatgatgtgtcagatctctttaggatgactgtatttttcagttgccgatacagctttttg

SEQ ID NO: 33215 - DNA, 1118 bp, Homo sapiens
  source 1..1118: mol_type = unassigned DNA
aagactcaaacttagaaacttgaattagatgtggtattcaaatccttagctgccgcgaagacacagacagcccccgtaagaacccacgaagcaggcgaagttcattgttctcaacattctagctgctcttgctgcatttgctctggaattcttgtagagatattacttgtccttccaggctgttctttctgtagctcccttgttttctttttgtgatcatgttgcagatggctgggcagtgctcccaaaatgaatattttgacagtttgttgcatgcttgcataccttgtcaacttcgatgttcttctaatactcctcctctaacatgtcagcgttattgtaatgcaagtgtgaccaattcagtgaaaggaacgaatgcgattctctggacctgtttgggactgagcttaataatttctttggcagttttcgtgctaatgtttttgctaaggaagataaactctgaaccattaaaggacgagtttaaaaacacagagatggagtctcgctctgtggcccaggctggagtgcagtggcgtgatctcaactcactgcagcctctgcctcttgggttcaaacaattctcccatctcagcctcctgagtaactgggactataggatcaggtctcctgggcatggctaacattgacctggaaaagagcaggactggtgatgaaattattcttccgagaggcctcgagtacacggtggaagaatgcacctgtgaagactgcatcaagagcaaaccgaaggtcgactctgaccattgctttccactcccagctatggaggaaggcgcaaccattcttgtcaccacgaaaacgaatgactattgcaagagcctgccagctgctttgagtgctacggagatagagaaatcaatttctgctaggtaattaaccatttcgactcgagcagtgccactttaaaaatcttttgtcagaatagatgatgtgtcagatctctttaggatgactgtatttttcagttgccgatacagctttttgtcctctaactgtggaaactctttatgttagatatatttctctaggttactgttgggagcttaatggtagaaacttccttggtttcatgattaaactcttttttttcctga

SEQ ID NO: 33216 - DNA, 851 bp, Homo sapiens
  source 1..851: mol_type = unassigned DNA
atggcacagcacggggcgatgggcgcgtttcgggccctgtgcggcctggcgctgctgtgcgcgctcagcctgggtcagcgccccaccgggggtcccgggtgcggccctgggcgcctcctgcttgggacgggaacggacgcgcgctgctgccgggttcacacgacgcgctgctgccgcgattacccgggcgaggagtgctgttccgagtgggactgcatgtgtgtccagcctgaattccactgcggagacccttgctgcacgacctgccggcaccacccttgtcccccaggccagggggtacagtcccaggggaaattcagttttggcttccagtgtatcgactgtgcctcggggaccttctccgggggccacgaaggccactgcaaaccttggacagactgctgctggaggtgccgccgtcgaccgaagacgccagaagctgccagttccccgaggaagagcggggcgagcgatcggcagaggagaaggggcggctgggagacctgtgggtgtgagcctggccgtcctccggggccaccgaccgcagccagcccctccccaggagctccccaggccgcaggggctctgcgttctgctctgggccgggccctgctcccctggcagcagaagtgggtgcaggaaggtggcagtgaccagcgccctggaccatgcagttcggcggccgcggctgggccctgcaggagggagagagagacacagtcatggcccccttcctcccttgctggccctgatggggtggggtcttaggacgggaggctgtgtccgtgggtgtgcagtgcccagcacgggacccggctgcaggggaccttcaataaacacttgtccagtga

SEQ ID NO: 33217 - DNA, 705 bp, Homo sapiens
  source 1..705: mol_type = unassigned DNA
atggcacagcacggggcgatgggcgcgtttcgggccctgtgcggcctggcgctgctgtgcgcgctcagcctgggtcagcgccccaccgggggtcccgggtgcggccctgggcgcctcctgcttgggacgggaacggacgcgcgctgctgccgggttcacacgacgcgctgctgccgcgattacccgggcgaggagtgctgttccgagtgggactgcatgtgtgtccagcctgaattccactgcggagacccttgctgcacgacctgccggcaccacccttgtcccccaggccagggggtacagtcccaggggaaattcagttttggcttccagtgtatcgactgtgcctcggggaccttctccgggggccacgaaggccactgcaaaccttggacagactgcacccagttcgggtttctcactgtgttccctgggaacaagacccacaacgctgtgtgcgtcccagggtccccgccggcagagccgcttgggtggctgaccgtcgtcctcctggccgtggccgcctgcgtcctcctcctgacctcggcccagcttggactgcacatctggcagctgaggaagacccagctgctgctggaggtgccgccgtcgaccgaagacgccagaagctgccagttccccgaggaagagcggggcgagcgatcggcagaggagaaggggcggctgggagacctgtgggtgtga

SEQ ID NO: 33218 - DNA, 1179 bp, Homo sapiens
  source 1..1179: mol_type = unassigned DNA
cacgcacttcacctgggtcgggattctcaggtcatgaacggtcccagccacctccgggcagggcgggtgaggacggggacggggcgtgtccaactggctgtgggctcttgaaacccgagcatggcacagcacggggcgatgggcgcgtttcgggccctgtgcggcctggcgctgctgtgcgcgctcagcctgggtcagcgccccaccgggggtcccgggtgcggccctgggcgcctcctgcttgggacgggaacggacgcgcgctgctgccgggttcacacgacgcgctgctgccgcgattacccgggcgaggagtgctgttccgagtgggactgcatgtgtgtccagcctgaattccactgcggagacccttgctgcacgacctgccggcaccacccttgtcccccaggccagggggtacagtcccaggggaaattcagttttggcttccagtgtatcgactgtgcctcggggaccttctccgggggccacgaaggccactgcaaaccttggacagactgcacccagttcgggtttctcactgtgttccctgggaacaagacccacaacgctgtgtgcgtcccagggtccccgccggcagagccgcttgggtggctgaccgtcgtcctcctggccgtggccgcctgcgtcctcctcctgacctcggcccagcttggactgcacatctggcagctgaggagtcagtgcatgtggccccgagagacccagctgctgctggaggtgccgccgtcgaccgaagacgccagaagctgccagttccccgaggaagagcggggcgagcgatcggcagaggagaaggggcggctgggagacctgtgggtgtgagcctggccgtcctccggggccaccgaccgcagccagcccctccccaggagctccccaggccgcaggggctctgcgttctgctctgggccgggccctgctcccctggcagcagaagtgggtgcaggaaggtggcagtgaccagcgccctggaccatgcagttcggcggccgcggctgggccctgcaggagggagagagagacacagtcatggcccccttcctcccttgctggccctgatggggtggggtcttaggacgggaggctgtgtccgtgggtgtgcagtgcccagcacgggacccggctgcaggggaccttcaataaacacttgtccag

SEQ ID NO: 33219 - DNA, 1068 bp, Homo sapiens
  source 1..1068: mol_type = unassigned DNA
cgaggatgtgcgtgggggctcggcggctgggccgcgggccgtgtgcggctctgctcctcctgggcctggggctgagcaccgtgacggggctccactgtgtcggggacacctaccccagcaacgaccggtgctgccacgagtgcaggccaggcaacgggatggtgagccgctgcagccgctcccagaacacggtgtgccgtccgtgcgggccgggcttctacaacgacgtggtcagctccaagccgtgcaagccctgcacgtggtgtaacctcagaagtgggagtgagcggaagcagctgtgcacggccacacaggacacagtctgccgctgccgggcgggcacccagcccctggacagctacaagcctggagttgactgtgccccctgccctccagggcacttctccccaggcgacaaccaggcctgcaagccctggaccaactgcaccttggctgggaagcacaccctgcagccggccagcaatagctcggacgcaatctgtgaggacagggaccccccagccacgcagccccaggagacccagggccccccggccaggcccatcactgtccagcccactgaagcctggcccagaacctcacagggaccctccacccggcccgtggaggtccccgggggccgtgcggttgccgccatcctgggcctgggcctggtgctggggctgctgggccccctggccatcctgctggccctgtacctgctccggagggaccagaggctgccccccgatgcccacaagccccctgggggaggcagtttccggacccccatccaagaggagcaggccgacgcccactccaccctggccaagatctgacctgggcccaccaaggtggacgctgggccccgccaggctggagcccggagggtctgctgggcgagcagggcaggtgcaggccgcctgccccgccacgctcctgggccaactctgcaccgttctaggtgccgatggctgcctccggctctctgcttacgtatgccatgcatacctcctgccccgcgggaccacaataaaaaccttggcagacgggagtctccgaccggca

SEQ ID NO: 33220 - DNA, 393 bp, Homo sapiens
  source 1..393: mol_type = unassigned DNA
cccaggggcaccccctctccctccgggggcccagactcggcccaggccacgtggagtcggggagaccacgctggccatgtggcctggccttgctggcctgagcagaagtgggagtgagcggaagcagctgtgcacggccacacaggacacagtctgccgctgccgggcgggcacccagcccctggacagctacaagcctggagttgactgtgccccctgccctccagggcacttctccccaggcgacaaccaggcctgcaagccctggaccaactgcaccttggctgggaagcacaccctgcagccggccagcaatagctcggacgcaatctgtgaggacagggaccccccagccacgcagccccaggagacccagggccccccggccaggcc

SEQ ID NO: 33221 - DNA, 420 bp, Homo sapiens
  source 1..420: mol_type = unassigned DNA
atgagggcgctggaggggccaggcctgtcgctgctgtgcctggtgttggcgctgcctgccctgctgccggtgccggctgtacgcggagtggcagaaacacccacctacccctggcgggacgcagagacaggggagcggctggtgtgcgcccagtgccccccaggcacctttgtgcagcggccgtgccgccgagacagccccacgacgtgtggcccgtgtccaccgcgccactacacgcagttctggaactacctagagcgctgccgctactgcaacgtcctctgcggggagcgtgaggaggaggcacgggcttgccacgccacccacaaccgtgcctgctgcggctgctgcaggcgctgcgcgtggccaggatgcccgggctggagcggagcgtccgtgagcgcttcctccctgtgcact

SEQ ID NO: 33222 - DNA, 1124 bp, Homo sapiens
  source 1..1124: mol_type = unassigned DNA
tccgcaggcggaccgggggcaaaggaggtggcatgtcggtcaggcacagcagggtcctgtgtccgcgctgagccgcgctctccctgctccagcaaggaccatgagggcgctggaggggccaggcctgtcgctgctgtgcctggtgttggcgctgcctgccctgctgccggtgccggctgtacgcggagtggcagaaacacccacctacccctggcgggacgcagagacaggggagcggctggtgtgcgcccagtgccccccaggcacctttgtgcagcggccgtgccgccgagacagccccacgacgtgtggcccgtgtccaccgcgccactacacgcagttctggaactacctagagcgctgccgctactgcaacgtcctctgcggggagcgtgaggaggaggcacgggcttgccacgccacccacaaccgtgcctgccgctgccgcaccggcttcttcgcgcacgctggtttctgcttggagcacgcatcgtgtccacctggtgccggcgtgattgccccgggcacccccagccagaacacgcagtgccagccgtgccccccaggcaccttctcagccagcagctccagctcagagcagtgccagccccaccgcaactgcacggccctgggcctggccctcaatgtgccaggctcttcctcccatgacaccctgtgcaccagctgcactggcttccccctcagcaccagggtaccaggagctgaggagtgtgagcgtgccgtcatcgactttgtggctttccaggacatctccatcaagaggctgcagcggctgctgcaggccctcgaggccccggagggctggggtccgacaccaagggcgggccgcgcggccttgcagctgaagctgcgtcggcggctcacggagctcctgggggcgcaggacggggcgctgctggtgcggctgctgcaggcgctgcgcgtggccaggatgcccgggctggagcggagcgtccgtgagcgcttcctccctgtgcactgatcctggccccctcttatttattctacatccttggcaccccacttgcactgaaagaggcttttttttaaatagaagaaatgaggtttcttaaagcttatttttataaagctttttcataaaa

SEQ ID NO: 33223 - DNA, 4945 bp, Homo sapiens
  source 1..4945: mol_type = unassigned DNA
atgcccaagatagtcctgaatggtgtgaccgtagacttccctttccagccctacaaatgccaacaggagtacatgaccaaggtcctggaatgtctgcagcagaaggtgaatggcatcctggagagccctacgggtacagggaagacgctgtgcctgctgtgcaccacgctggcctggcgagaacacctccgagacggcatctctgcccgcaagattgccgagagggcgcaaggagagcttttcccggatcgggccttgtcatcctggggcaacgctgctgctgctgctggagaccccatagcttgctacacggacatcccaaagattatttacgcctccaggacccactcgcaactcacacaggtcatcaacgagcttcggaacacctcctaccggcctaaggtgtgtgtgctgggctcccgggagcagctgtgcatccatcctgaggtgaagaaacaagagagtaaccatctacagatccacttgtgccgtaagaaggtggcaagtcgctcctgtcatttctacaacaacgtagaagaaaaaagcctggagcaggagctggccagccccatcctggacattgaggacttggtcaagagcggaagcaagcacagggtgtgcccttactacctgtcccggaacctgaagcagcaagccgacatcatattcatgccgtacaattacttgttggatgccaagagccgcagagcacacaacattgacctgaaggggacagtcgtgatctttgacgaagctcacaacgtggagaagatgtgtgaagaatcggcatcctttgacctgactccccatgacctggcttcaggactggacgtcatagaccaggtgctggaggagcagaccaaggcagcgcagcagggtgagccccacccggagttcagcgcggactcccccagcccagggctgaacatggagctggaagacattgcaaagctgaagatgatcctgctgcgcctggagggggccatcgatgctgttgagctgcctggagacgacagcggtgtcaccaagccagggagctacatctttgagctgtttgctgaagcccagatcacgtttcagaccaagggctgcatcctggactcgctggaccagatcatccagcacctggcaggacgtgctggagtgttcaccaacacggccggactgcagaagctggcggacattatccagattgtgttcagtgtggacccctccgagggcagccctggttccccagcagggctgggggccttacagtcctataaggtgcacatccatcctgatgctggtcaccggaggacggctcagcggtctgatgcctggagcaccactgcagccagaaagcgagggaaggtgctgagctactggtgcttcagtcccggccacagcatgcacgagctggtccgccagggcgtccgctccctcatccttaccagcggcacgctggccccggtgtcctcctttgctctggagatgcagatccctttcccagtctgcctggagaacccacacatcatcgacaagcaccagatctgggtgggggtcgtccccagaggccccgatggagcccagttgagctccgcgtttgacagacggttttccgaggagtgcttatcctccctggggaaggctctgggcaacatcgcccgcgtggtgccctatgggctcctgatcttcttcccttcctatcctgtcatggagaagagcctggagttctggcgggcccgcgacttggccaggaagatggaggcgctgaagccgctgtttgtggagcccaggagcaaaggcagcttctccgagaccatcagtgcttactatgcaagggttgccgcccctgggtccaccggcgccaccttcctggcggtctgccggggcaaggccagcgaggggctggacttctcagacacgaatggccgtggtgtgattgtcacgggcctcccgtaccccccacgcatggacccccgggttgtcctcaagatgcagttcctggatgagatgaagggccagggtggggctgggggccagttcctctctgggcaggagtggtaccggcagcaggcgtccagggctgtgaaccaggccatcgggcgagtgatccggcaccgccaggactacggagctgtcttcctctgtgaccacaggttcgcctttgccgacgcaagagcccaactgccctcctgggtgcgtccccacgtcagggtgtatgacaactttggccatgtcatccgagacgtggcccagttcttccgtgttgccgagcgaactatgccagcgccggccccccgggctacagcacccagtgtgcgtggagaagatgctgtcagcgaggccaagtcgcctggccccttcttctccaccaggaaagctaagagtctggacctgcatgtccccagcctgaagcagaggtcctcagggtcaccagctgccggggaccccgagagtagcctgtgtgtggagtatgagcaggagccagttcctgcccggcagaggcccagggggctgctggccgccctggagcacagcgaacagcgggcggggagccctggcgaggagcaggcccacagctgctccaccctgtccctcctgtctgagaagaggccggcagaagaaccgcgaggagggaggaagaagatccggctggtcagccacccggaggagcccgtggctggtgcacagacggacagggccaagctcttcatggtggccgtgaagcaggagttgagccaagccaactttgccaccttcacccaggccctgcaggactacaagggttccgatgacttcgccgccctggccgcctgtctcggccccctctttgctgaggaccccaagaagcacaacctgctccaaggcttctaccagtttgtgcggccccaccataagcagcagtttgaggaggtctgtatccagctgacaggacgaggctgtggctatcggcctgagcacagcattccccgaaggcagcgggcacagccggtcctggaccccactggaagaacggcgccggatcccaagctgaccgtgtccacggctgcagcccagcagctggacccccaagagcacctgaaccagggcaggccccacctgtcgcccaggccacccccaacaggagaccctggcagccaaccacagtgggggtctggagtgcccagagcagggaagcagggccagcacgccgtgagcgcctacctggctgatgcccgcagggccctggggtccgcgggctgtagccaactcttggcagcgctgacagcctataagcaagacgacgacctcgacaaggtgctggctgtgttggccgccctgaccactgcaaagccagaggacttccccctgctgcacaggttcagcatgtttgtgcgtccacaccacaagcagcgcttctcacagacgtgcacagacctgaccggccggccctacccgggcatggagccaccgggaccccaggaggagaggcttgccgtgcctcctgtgcttacccacagggctccccaaccaggcccctcacggtccgagaagaccgggaagacccagagcaagatctcgtccttccttagacagaggccagcagggactgtgggggcgggcggtgaggatgcaggtcccagccagtcctcaggacctccccacgggcctgcagcatctgagtggggtgagcctcatgggagagacatcgctgggcagcaggccacgggagctccgggcgggcccctctcagcaggctgtgtgtgccagggctgtggggcagaggacgtggtgcccttccagtgccctgcctgtgacttccagcgctgccaagcctgctggcaacggcaccttcaggcctctaggatgtgcccagcctgccacaccgcctccaggaagcagagcgtcatgcaggtcttctggccagagccccacaaggaccatgagggcgctggaggggccaggcctgtcgctgctgtgcctggtgttggcgctgcctgccctgctgccggtgccggctgtacgcggagtggcagaaacacccacctacccctggcgggacgcagagacaggggagcggctggtgtgcgcccagtgccccccaggcacctttgtgcagcggccgtgccgccgagacagccccacgacgtgtggcccgtgtccaccgcgccactacacgcagttctggaactacctagagcgctgccgctactgcaacgtcctctgcggggagcgtgaggaggaggcacgggcttgccacgccacccacaaccgtgcctgccgctgccgcaccggcttcttcgcgcacgctggtttctgcttggagcacgcatcgtgtccacctggtgccggcgtgattgccccgggcacccccagccagaacacgcagtgccagccgtgccccccaggcaccttctcagccagcagctccagctcagagcagtgccagccccaccgcaactgcacggccctgggcctggccctcaatgtgccaggctcttcctcccatgacaccctgtgcaccagctgcactggcttccccctcagcaccagggtaccaggagctgaggagtgtgagcgtgccgtcatcgactttgtggctttccaggacatctccatcaagaggctgcagcggctgctgcaggccctcgaggccccggagggctggggtccgacaccaagggcgggccgcgcggccttgcagctgaagctgcgtcggcggctcacggagctcctgggggcgcaggacggggcgctgctggtgcggctgctgcaggcgctgcgcgtggccaggatgcccgggctggagcggagcgtccgtgagcgcttcctccctgtgcactgatcctggccccctcttatttattctacatccttggcaccccacttgcactgaaagaggcttttttttaaatagaagaaatgaggtttcttaaagcttatttttataaagctttttcataaaactggttgtagttgc

SEQ ID NO: 33224 - DNA, 3686 bp, Homo sapiens
  source 1..3686: mol_type = unassigned DNA
atacgggagaactaaggctgaaacctcggaggaacaaccacttttgaagtgacttcgcggcgtgcgttgggtgcggactaggtggccgcggcgggagtgtgctggagcctgaagtccacgcgcgcggctgagaaccgccgggaccgcacgtgggcgccgcgcgcttcccccgcttcccaggtgggcgccggccgccaggccacctcacgtccggccccggggatgcgcgtcctcctcgccgcgctgggactgctgttcctgggggcgctacgagccttcccacaggatcgacccttcgaggacacctgtcatggaaaccccagccactactatgacaaggctgtcaggaggtgctgttaccgctgccccatggggctgttcccgacacagcagtgcccacagaggcctactgactgcaggaagcagtgtgagcctgactactacctggatgaggccgaccgctgtacagcctgcgtgacttgttctcgagacgacctcgtggagaagacgccgtgtgcatggaactcctcccgtgtctgcgaatgtcgacccggcatgttctgttccacgtctgccgtcaactcctgtgcccgctgcttcttccattctgtctgtccggcagggatgattgtcaagttcccaggcacggcgcagaagaacacggtctgtgagccggcttccccaggggtcagccctgcctgtgccagcccagagaactgcaaggaaccctccagtggcaccatcccccaggccaagcccaccccggtgtccccagcaacctccagtgccagcaccatgcctgtaagagggggcacccgcctcgcccaggaagctgcttctaaactgacgagggctcccgactctccctcctctgtgggaaggcctagttcagatccaggtctgtccccaacacagccatgcccagaggggtctggtgattgcagaaagcagtgtgagcccgactactacctggacgaggccggccgctgcacggcctgcgtgagctgttctcgagatgaccttgtggagaagacgccatgtgcatggaactcctcccgcacctgcgaatgtcgacctggcatgatctgtgccacatcagccaccaactcccgtgcccgctgtgtcccctacccaatctgtgcagcagagacggtcaccaagccccaggatatggctgagaaggacaccacctttgaggcgccacccctggggacccagccggactgcaaccccaccccagagaatggcgaggcgcctgccagcaccagccccactcagagcttgctggtggactcccaggccagtaagacgctgcccatcccaaccagcgctcccgtcgctctctcctccacggggaagcccgttctggatgcagggccagtgctcttctgggtgatcctggtgttggttgtggtggtcggctccagcgccttcctcctgtgccaccggagggcctgcaggaagcgaattcggcagaagctccacctgtgctacccggtccagacctcccagcccaagctagagcttgtggattccagacccaggaggagctcaacgcagctgaggagtggtgcgtcggtgacagaacccgtcgcggaagagcgagggttaatgagccagccactgatggagacctgccacagcgtgggggcagcctacctggagagcctgccgctgcaggatgccagcccggccgggggcccctcgtcccccagggaccttcctgagccccgggtgtccacggagcacaccaataacaagattgagaaaatctacatcatgaaggctgacaccgtgatcgtggggaccgtgaaggctgagctgccggagggccggggcctggcggggccagcagagcccgagttggaggaggagctggaggcggaccataccccccactaccccgagcaggagacagaaccgcctctgggcagctgcagcgatgtcatgctctcagtggaagaggaagggaaagaagaccccttgcccacagctgcctctggaaagtgaggcctgggctgggctggggctaggagggcagcagggtggcctctgggaggccaggatggcactgttggcaccgaggttgggggcagaggcccatctggcctgaactgaggctccagcatctagtggtggaccggccggtcactgcaggggtctggtggtctctgcttgcatccccaacttagctgtcccctgacccagagcctaggggatccggggcttgtacagaagagacagtccaaggggactggatcccagcagtgatgttggttgaggcagcaaacagatggcaggatgggcactgccgagaacagcattggtcccagagccctgggcatcagaccttaaccaccaggcccacagcccagcgagggagaggtcgtgaggccagctcccggggcccctgtaaccctactctcctctctccctggacctcagaggtgacacccattgggcccttccggcatgcccccagttactgtaaatgtggcccccagtgggcatggagccagtgcctgtggttgtttctccagagtcaaaagggaagtcgagggatggggcgtcgtcagctggcactgtctctgctgcagcggccacactgtactctgcactggtgtgagggcccctgcctggactgtgggaccctcctggtgctgcccaccttccctgtcctgtagccccctcggtgggcccagggcctagggcccaggatcaagtcactcatctcagaatgtccccaccaatccccgccacagcaggcgcctcgggtcccagatgtctgcagccctcagcagctgcagaccgcccctcaccaacccagagaacctgctttactttgcccagggacttcctccccatgtgaacatggggaacttcgggccctgcctggagtccttgaccgctctctgtgggccccacccactctgtcctgggaaatgaagaagcatcttccttaggtctgccctgcttgcaaatccactagcaccgaccccaccacctggttccggctctgcacgctttggggtgtggatgtcgagaggcaccacggcctcacccaggcatctgctttactctggaccataggaaacaagaccgtttggaggtttcatcaggattttgggtttttcacatttcacgctaaggagtagtggccctgacttccggtcggctggccagctgactccctagggccttcagacgtgtatgcaaatgagtgatggataaggatgagtcttggagttgcgggcagcctggagactcgtggacttaccgcctggaggcaggcccgggaaggctgctgtttactcatcgggcagccacgtgctctctggaggaagtgatagtttctgaaaccgctcagatgttttggggaaagttggagaagccgtggccttgcgagaggtggttacaccagaacctggacattggccagaagaagcttaagtgggcagacactgtttgcccagtgtttgtgcaaggatggagtgggtgtctctgcatcacccacagccgcagctgtaaggcacgctggaaggcacacgcctgccaggcagggcagtctggcgcccatgatgggagggattgacatgtttcaacaaaataatgcacttccttacctagtggcccttcacacaacttttgaatctctaaaaatccataaaatccttaaagaactgtaa

SEQ ID NO: 33225 - DNA, 2363 bp, Homo sapiens
  source 1..2363: mol_type = unassigned DNA
gtcttgtgtggttgcagcaaggcaaagagtgtggggcgtctctgtgttccagggccagtgctcttctgggtgatcctggtgttggttgtggtggtcggctccagcgccttcctcctgtgccaccggagggcctgcaggaagcgaattcggcagaagctccacctgtgctacccggtccagacctcccagcccaagctagagcttgtggattccagacccaggaggagctcaacgcagctgaggagtggtgcgtcggtgacagaacccgtcgcggaagagcgagggttaatgagccagccactgatggagacctgccacagcgtgggggcagcctacctggagagcctgccgctgcaggatgccagcccggccgggggcccctcgtcccccagggaccttcctgagccccgggtgtccacggagcacaccaataacaagattgagaaaatctacatcatgaaggctgacaccgtgatcgtggggaccgtgaaggctgagctgccggagggccggggcctggcggggccagcagagcccgagttggaggaggagctggaggcggaccataccccccactaccccgagcaggagacagaaccgcctctgggcagctgcagcgatgtcatgctctcagtggaagaggaagggaaagaagaccccttgcccacagctgcctctggaaagtgaggcctgggctgggctggggctaggagggcagcagggtggcctctgggaggccaggatggcactgttggcaccgaggttgggggcagaggcccatctggcctgaactgaggctccagcatctagtggtggaccggccggtcactgcaggggtctggtggtctctgcttgcatccccaacttagctgtcccctgacccagagcctaggggatccggggcttgtacagaagagacagtccaaggggactggatcccagcagtgatgttggttgaggcagcaaacagatggcaggatgggcactgccgagaacagcattggtcccagagccctgggcatcagaccttaaccaccaggcccacagcccagcgagggagaggtcgtgaggccagctcccggggcccctgtaaccctactctcctctctccctggacctcagaggtgacacccattgggcccttccggcatgcccccagttactgtaaatgtggcccccagtgggcatggagccagtgcctgtggttgtttctccagagtcaaaagggaagtcgagggatggggcgtcgtcagctggcactgtctctgctgcagcggccacactgtactctgcactggtgtgagggcccctgcctggactgtgggaccctcctggtgctgcccaccttccctgtcctgtagccccctcggtgggcccagggcctagggcccaggatcaagtcactcatctcagaatgtccccaccaatccccgccacagcaggcgcctcgggtcccagatgtctgcagccctcagcagctgcagaccgcccctcaccaacccagagaacctgctttactttgcccagggacttcctccccatgtgaacatggggaacttcgggccctgcctggagtccttgaccgctctctgtgggccccacccactctgtcctgggaaatgaagaagcatcttccttaggtctgccctgcttgcaaatccactagcaccgaccccaccacctggttccggctctgcacgctttggggtgtggatgtcgagaggcaccacggcctcacccaggcatctgctttactctggaccataggaaacaagaccgtttggaggtttcatcaggattttgggtttttcacatttcacgctaaggagtagtggccctgacttccggtcggctggccagctgactccctagggccttcagacgtgtatgcaaatgagtgatggataaggatgagtcttggagttgcgggcagcctggagactcgtggacttaccgcctggaggcaggcccgggaaggctgctgtttactcatcgggcagccacgtgctctctggaggaagtgatagtttctgaaaccgctcagatgttttggggaaagttggagaagccgtggccttgcgagaggtggttacaccagaacctggacattggccagaagaagcttaagtgggcagacactgtttgcccagtgtttgtgcaaggatggagtgggtgtctctgcatcacccacagccgcagctgtaaggcacgctggaaggcacacgcctgccaggcagggcagtctggcgcccatgatgggagggattgacatgtttcaacaaaataatgcacttccttacctagtggcccttcacacaacttttgaatctctaaaaatccataaaatccttaaagaactgtaa

SEQ ID NO: 33226 - DNA, 2412 bp, Homo sapiens
  source 1..2412: mol_type = unassigned DNA
ggagtgtgctggagcctgaagtccacgcgcgcggctgagaaccgccgggaccgcacgtgggcgccgcgcgcttcccccgcttcccaggtgggcgccggccgccaggccacctcacgtccggccccggggatgcgcgtcctcctcgccgcgctgggactgctgttcctgggggcgctacgagccttcccacagggctgttcccgacacagcagtgcccacagaggcctactgactgcaggaagcagtgtgagcctgactactacctggatgaggccgaccgctgtacagcctgcgtgacttgttctcgagacgacctcgtggagaagacgccgtgtgcatggaactcctcccgtgtctgcgaatgtcgacccggcatgttctgttccacgtctgccgtcaactcctgtgcccgctgcttcttccattctgtctgtccggcagggatgattgtcaagttcccaggcacggcgcagaagaacacggtctgtgagccggcttccccaggggtcagccctgcctgtgccagcccagagaactgcaaggaaccctccagtggcaccatcccccaggccaagcccaccccggtgtccccagcaacctccagtgccagcaccatgcctgtaagagggggcacccgcctcgcccaggaagctgcttctaaactgacgagggctcccgactctccctcctctgtgggaaggcctagttcagatccaggtctgtccccaacacagccatgcccagaggggtctggtgattgcagaaagcagtgtgagcccgactactacctggacgaggccggccgctgcacggcctgcgtgagctgttctcgagatgaccttgtggagaagacgccatgtgcatggaactcctcccgcacctgcgaatgtcgacctggcatgatctgtgccacatcagccaccaactcccgtgcccgctgtgtcccctacccaatctgtgcagcagagacggtcaccaagccccaggatatggctgagaaggacaccacctttgaggcgccacccctggggacccagccggactgcaaccccaccccagagaatggcgaggcgcctgccagcaccagccccactcagagcttgctggtggactcccaggccagtaagacgctgcccatcccaaccagcgctcccgtcgctctctcctccacggggaagcccgttctggatgcagggccagtgctcttctgggtgatcctggtgttggttgtggtggtcggctccagcgccttcctcctgtgccaccggagggcctgcaggaagcgaattcggcagaagctccacctgtgctacccggtccagacctcccagcccaagctagagcttgtggattccagacccaggaggagctcaacgctgaggagtggtgcgtcggtgacagaacccgtcgcggaagagcgagggttaatgagccagccactgatggagacctgccacagcgtgggggcagcctacctggagagcctgccgctgcaggatgccagcccggccgggggcccctcgtcccccagggaccttcctgagccccgggtgtccacggagcacaccaataacaagattgagaaaatctacatcatgaaggctgacaccgtgatcgtggggaccgtgaaggctgagctgccggagggccggggcctggcggggccagcagagcccgagttggaggaggagctggaggcggaccataccccccactaccccgagcaggagacagaaccgcctctgggcagctgcagcgatgtcatgctctcagtggaagaggaagggaaagaagaccccttgcccacagctgcctctggaaagtgaggcctgggctgggctggggctaggagggcagcagggtggcctctgggaggccaggatggcactgttggcaccgaggttgggggcagaggcccatctggcctgaactgaggctccagcatctagtggtggaccggccggtcactgcaggggtctggtggtctctgcttgcatccccaacttagctgtcccctgacccagagcctaggggatccggggcttgtacagaagagacagtccaaggggactggatcccagcagtgatgttggttgaggcagcaaacagatggcaggatgggcactgccgagaacagcattggtcccagagccctgggcatcagaccttaaccaccaggcccacagcccagcgagggagaggtcgtgaggccagctcccggggcccctgtaaccctactctcctctctccctggacctcagaggtgacacccattgggcccttccggcatgcccccagttactgtaaatgtggcccccagtgggcatggagccagtgcctgtggttgtttctccagagtcaaaagggaagtcgagggatggggcgtcgtcagctggcactgtctctgctgca

SEQ ID NO: 33227 - DNA, 3627 bp, Homo sapiens
  source 1..3627: mol_type = unassigned DNA
agccggctgggctgggcagcactccgggcggagtcgacgagcgcaggatgtgagctcacagcttgggactgctgaggggcaggcggctgcaggctaggggcggctcggagtccgctggccacccagctgagaggagaggcgcccccggggacgcactgagattatgaggctctggcctccactggccactcactcgtgaccctttccaccacggcggagccttccaagcctacctcctgccgtgtggtgatctacctgcagcgggagatgtcgggggacacctgcctgtgcccagcctcaggggccaagcccaagctcagtggcttcaagggaggagggttgggcaacaagtatgtccagctcaacgtgggcggctctctgtactacaccactgtgcgggccctgacccgccacgacaccatgctcaaggccatgttcagtgggcgcatggaggtgctgaccgacaaagaaggctggatcctcatagaccgttgtggaaagcactttggcaccattttgaattacctccgagatgacaccatcaccctccctcagaaccggcaagaaatcaaggaattgatggctgaagcaaagtattacctcatccaggggctggtgaatatgtgccagagtgccctgcaggacaagaaggactcctaccagcctgtgtgcaacatccccatcatcacatccctaaaggaggaggagcggctcatcgaatcctccaccaagcccgtggtgaagctgctgtacaacagaagcaacaacaagtattcctacaccagcaactctgacgaccacctgctgaaaaacatcgagctgtttgacaagctctccctgcgcttcaacggccgcgtgctcttcatcaaggatgtcattggtgacgagatctgctgctggtccttttatggccagggccgtaagctggcagaggtgtgctgtacctccatcgtgtatgccacggagaagaagcagaccaaggtggaattcccagaggcccgaatctatgaggagacactcaacgtcctactctatgagactccccgcgtccccgacaactccttgttggaggccacaagccgtagccgcagccaggcttcccccagtgaagatgaggagacctttgaactgcgggaccgtgtccgccgcatccacgtcaagcgctacagcacttacgatgaccggcagctcggccaccagtctacccatcgcgactgaccagaccctcagggagtcagggcacgggaggccctatctcccatcctgtggaacccgccccattggccaccccatgctgctgctgcctgggtctctgctctagcacccagaggcatgacaggccctgctcagaggtcagagggtctgggcagaggagggaccacattcccctgccttgcccctgagcacttctggagactgcgtcctgtcctatctgctcaccatcacccttcctgcccgacggagctgcttctgctccctggggcatatggactgacccacctcctgctgagaaccttcccctaggccctgtgcagaaggctactgccccttaggcctcagctgggggaaaggcagttctggtgctgtagaggccctggtgcagaaagtgggacgtcttttttcctaaggtgtttaagcacaggcttgataagtttggtttttaaaaaataatctaggaaatgaataattctaaatctagtaatgaggaaactgagcatttcttttgccctccagggtgccaagaccctacatatgacagaacccttggcccttctccatgcctgtgggatctgtttctttaaagcactttgtactgttattcaggaggttgataatctccttgacccatgtctttctaccctaatccccacttccctgcagaatcaatctgagggaggggataaagaggaagcaataaaaaaaaaacatccgacagagcagctctggctttgcagcctggccagcagctcagagtgcaccgaggagggaaggatggctaagctgggaccggcagtcctcacagggtgcctgtgagaaaggacattttacccccacatcatagtcacatcactgactcctaggtctagcacgactgctctttgtgattctcttgagtacccttggcttccagccatgctgtcctcacatacggtaaagccaaagagctgtcacatgggccagaaacatgagccacggcaggaagaccgtggagcccgtgggcactgcatggtgttggctggcatgcccatcagctgaggacagcaaactcccagcagcccctacagaggtggcacatgcttggccacacatctactccctgcccacaccatctatgctcttggttggtgctggctgggatggcggttctgcccagtggtgtctctgagcgcgggatgacaggagcaaccgaagcaccctgaaggccttcactccttgttgggtaactcagccatggagatgccaagcactagccaggaggtgagttcctctttagggctttggttttcattcctttttgtttggcttggccaaaccagaattcagcttatctgaattattttccaaaggaatgctgtcagggagggactgttctgccagcctaacaaagcaacgtagccacgtatagtacccactttctgctctttggagagaacacaggttatcaagttcatctctcttgactactcttatgatagctgatgccacagagcctatgggcaaatgccagacccagggttagacacaaggacctgaagtgacatgacggcgggacaggggaaatgtgactttctaattaggcattttatgttagtcacagtcttgaatgtataaacagcactaagactctcaggtcaggtaccttggtgatcagctactagttcttccagccctcattgaggtaacaagataaagacaaatccacttctttggccaaattcaggctttggctttatgactttcccacagagactggaatgcgtcagcctgagaccactggcctattttctcagctgccctcttgaggtcctttaacactcaaattcccagctccccactgaggtgttgtgatgcttgccttttgacctccccatcccctttagtccctgcttactactttgacattcacatcctcagtgtctcagtcttttttgccgagaaagcacagtagtctgggactgggcatttatcttctctgactgaaaatctctccttggtcttaaggaaaatactaacattgaactcactgacatgatcttagcttctttaatcagactttgtgacttaaaagtttgggggttttctttgaaagtttccagccctattcagaaagcaactcttggctgtgtgcatttttcaactccaagcagcccaggggtaagtaaacaaagtatggatgaaggtcagattttcttgtcagtttctgagaaacctggcagcctgctgttaacaacacaggccagtattgggttttattgaatttggtatgtgaccaaggtcggcctaaaggatggcgcaggtcctgggcaggaaagaatttttcctttatcacataactgtaatatttggttgctcagcataagtgatggaagcaaacactaatttctaataaaattgtgttaaactcaa

SEQ ID NO: 33228 - DNA, 1497 bp, Homo sapiens
  source 1..1497: mol_type = unassigned DNA
acagcttgggactgctgaggggcaggcggctgcaggctaggggcggctcggagtccgctggccacccagctgagaggagaggcgcccccggggacggctggatcctcatagaccgttgtggaaagcactttggcaccattttgaattacctccgagatgacaccatcaccctccctcagaaccggcaagaaatcaaggaattgatggctgaagcaaagtattacctcatccaggggctggtgaatatgtgccagagtgccctgcaggacaagaaggactcctaccagcctgtgtgcaacatccccatcatcacatccctaaaggaggaggagcggctcatcgaatcctccaccaagcccgtggtgaagctgctgtacaacagaagcaacaacaagtattcctacaccagcaactctgacgaccacctgctgaaaaacatcgagctgtttgacaagctctccctgcgcttcaacggccgcgtgctcttcatcaaggatgtcattggtgacgagatctgctgctggtccttttatggccagggccgtaagctggcagaggtgtgctgtacctccatcgtgtatgccacggagaagaagcagaccaaggtggaattcccagaggcccgaatctatgaggagacactcaacgtcctactctatgagactccccgcgtccccgacaactccttgttggaggccacaagccgtagccgcagccaggcttcccccagtgaagatgaggagacctttgaactgcgggaccgtgtccgccgcatccacgtcaagcgctacagcacttacgatgaccggcagctcggccaccagtctacccatcgcgactgaccagaccctcagggagtcagggcacgggaggccctatctcccatcctgtggaacccgccccattggccaccccatgctgctgctgcctgggtctctgctctagcacccagaggcatgacaggccctgctcagaggtcagagggtctgggcagaggagggaccacattcccctgccttgcccctgagcacttctggagactgcgtcctgtcctatctgctcaccatcacccttcctgcccgacggagctgcttctgctccctggggcatatggactgacccacctcctgctgagaaccttcccctaggccctgtgcagaaggctactgccccttaggcctcagctgggggaaaggcagttctggtgctgtagaggccctggtgcagaaagtgggacgtcttttttcctaaggtgtttaagcacaggcttgataagtttggtttttaaaaaataatctaggaaatgaataattctaaatctagtaatgaggaaactgagcatttcttttgccctccagggtgccaagaccctacatatgacagaacccttggcccttctccatgcctgtgggatctgtttctttaaagcactttgtactgttattcaggaggttgataatctccttgacccatgtctttctaccctaatccccactt

SEQ ID NO: 33229 - DNA, 4175 bp, Homo sapiens
  source 1..4175: mol_type = unassigned DNA
ccagggtgatgctgaagatgatgaccttcttccaaggcctctagagccatcagcctgtgccaggcaccctcgacttgcctagaggcccccaaaagttgcagtccacatcagaggcagagtcagaggcctccatgtcggaggcctcctctgaggacctggtgccacccctggaggctggggcagccccatatagggaggaggaagaggcggcgaagaagaagaaggagaagaagaagaagtccaaaggcctggccaatgtgttctgcgtcttcaccaaagggaagaagaagaagggtcagcccagctcagcggagcccgaggacgcagccgggtccaggcaggggctggatggcccgccccccacagtggaggagctgaaggcggcgctggagcgcgggcagctggaggcggcgcggccgctgctggcgctggagcgggagctggcggcggcggcggcggcgggcggtgtgagcgaggaggagctggtgcggcgccagagcaaggtggaggcgctgtacgagctgctgcgcgaccaggtgctgggcgtgctgcggcggccgctggaggcgccgcccgagcggctgcgccaggcgctggccgtggtggcggagcaggagcgcgaggaccgccaggcggcggcggcggggccggggacctcggggctggcggccacgcgcccgcggcgctggctgcagctgtggcggcgcggcgtggcggaggcggccgaggagcgcatgggccagcggccggccgcgggcgccgaggtccccgagagcgtctttctgcacttgggccgcaccatgaaggaggacctggaggccgtggtggagcggctgaagccgctgttccccgccgagttcggcgtcgtggcggcctacgccgagagctaccaccagcacttcgcggcccacctggccgccgtggcgcagttcgagctgtgcgagcgcgacacctacatgctgctgctctgggtgcagaacctctaccccaatgacatcatcaacagccccaagctggtgggtgagctgcagggtatggggctcgggagcctcctgccccccaggcagatccgactgctggaggccacattcctgtccagtgaggcggccaatgtgagggagttgatggaccgagctctggagctagaggcacggcgctgggctgaggatgtgcctccccagaggctggacggccactgccacagcgagctggccatcgacatcatccagatcacctcccaggcccaggccaaggccgagagcatcacgctggacttgggctcacagataaagcgggtgctgctggtggagctgcctgcgttcctgaggagctaccagcgcgcctttaatgaatttctggagagaggcaagcagctgacgaattacagggccaatgttattgccaacatcaacaactgcctgtccttccggatgtccatggagcagaattggcaggtaccccaggacaccctgagcctcctgctgggccccctgggtgagctcaagagccacggctttgacaccctgctccagaacctgcatgaggacctgaagccactgttcaagaggttcacgcacacccgctgggcggcccctgtggagaccctggaaaacatcatcgccactgtagacacgaggctgcctgagttctcagagctgcagggctgtttccgggaggagctcatggaggccttgcacctgcacctggtgaaggagtacatcatccaactcagcaaggggcgcctggtcctcaagacggccgagcagcagcagcagctggctgggtacatcctggccaatgctgacaccatccagcacttctgcacccagcacggctccccggcgacctggctgcagcctgctctccctacgctggccgagatcattcgcctgcaggaccccagtgccatcaagattgaggtggccacttatgccacctgctaccctgacttcagcaaaggccacctgagcgctatcctggccatcaaggggaacctatccaacagtgaggtcaagcgcatccggagcatcttggacgtcagcatgggggcgcaggagccctcccggcccctattttcccttataaaggttggttagcttttcctgtggcctgacctgcctgtgagtgcccagcaagccttgggcacaccccgctgggagctgttaagagcagcgctggttctcggttcctcccgggtctcctgtgctctgatgctacttctgcctagccctggcggaggtgcaggccctgtcagctggaactggacagaccttggtttgtttacatgtccgatgggggcaggagctcccatcctgggcagccaaccaggcaacaccaaggactctttgtaaacgatagctgatcgtgtgcacgcaaggaaagaaccaggagggagagtgcagccaggctcagggatccccggacacctctgtccagagcccctccacagtcggcctcatgactgtcctcctcgtgggtggggccgagggccctcttcagctctctggagacaggggccgagcctcacccatctgccctctgcagcccagggccgccgtgagcgggattcagcaatggtggaatggaagacagaactggaagagaaagaaggaaaagatgagctctcgtctggcaggggcttttagggtcctgtggcgagctgtgagcaccgccagcattagacgtcacatccaggtggccccacggcccctacaggctggccctgcaatggggccctgagccctccctcttcatcccccaaggcctcaactagagggtggtcccccgagggcttggtgtctactaccgaagggcccaagacctcctgggtcctctcaggctcccccttccccaaggcagggacaggccctgggggtgccaccgtgggccctgccacccagaagtctggctgaggtctgggcaggggcagggcaagcttgacctctcactgttgaccctttggcctctgtatttgtttcctattgccgtgacaggtttccacaaacttcgtggatcaaaacgaggtcttccagttctgcgggtcagaaggctgacccggggctcaaatctgggtgtcggcagtcctgcactccttctggaggctctaggggagaattcatttctggccttttcatttttagaggctgaccgtaattcttgacttcaggctcctccatcttcagagccagctgtgggtagttgaatctttttcccgtcacctcattgaggcctcccctctcctgcctccctccaccacttttttttttttttttttgagacagggtcttgctgtgttgcccaggctggagtgcagtggcctggtcatggcatcaaggctcactgcagcctggacctcctggttcaagtgatcctcttgtctcagtcccctgagacaatcccccacgcccagctacatattttttgtggatacagggtctcattctgttgcctaggcttgtctggaactcctgggctcaagggatcttgtagccttagcctcctaaagtgctgggattataggcatgagtcactgtacccggcctgctctaccgcttttaaggacgcttatgatcacattgcgcctacccagagaacccaggtcgtctttctattttcaggtcagctgattagccaccttagttccatctgcaactttagttcccactggctgtgtaacctaacatagtcacaggctctggggactgtcacgtggacatctttgggaggccgttattctgcccaccgcaccctccgttcatcccctgccctgccgggcacctcgctctaccccaggaaaatgtgagctcgttttcctgctcggcatgtgctccccctaaggctctgctcctccctgggcctgaaagttccttctcagcctgagagggggcccttcggactcaggcatgactcagcccggctgatgcctctgcagtgctgagtcaggatttggggccggctctcttgggtccgtccccttttcccaggtactgccttacaaagctgtggccaggaagtggccggtataaaggatgcccaaggtctttgtacgtgtgtaggagttagcgtgtttgatattgttaatataataataattattttttagagtactgcttttgtatgtatgttgaacaggatccaggtttttatagcttgatataaaacagaattcaaaagtg

SEQ ID NO: 33230 - DNA, 1334 bp, Homo sapiens
  source 1..1334: mol_type = unassigned DNA
gtgcgagcgcgacacctacatgctgctgctctgggtgcagaacctctaccccaagccaatgtgagggagttgatggaccgagctctggagctagaggcacggcgctgggctgaggatgtgcctccccagaggctggacggccactgccacagcgagctggccatcgacatcatccagatcacctcccaggcccaggccaaggccgagagcatcacgctggacttgggctcacagataaagcgggtgctgctggtggagctgcctgcgttcctgaggagctaccagcgcgcctttaatgaatttctggagagaggcaagcagctgacgaattacagggccaatgttattgccaacatcaacaactgcctgtccttccggatgtccatggagcagaattggcaggtaccccaggacaccctgagcctcctgctgggccccctgggtgagctcaagagccacggctttgacaccctgctccagaacctgcatgaggacctgaagccactgttcaagaggttcacgcacacccgctgggcggcccctgtggagaccctggaaaacatcatcgccactgtagacacgaggctgcctgagttctcagagctgcagggctgtttccgggaggagctcatggaggccttgcacctgcacctggtgaaggagtacatcatccaactcagcaaggggcgcctggtcctcaagacggccgagcagcagcagcagctggctgggtacatcctggccaatgctgacaccatccagcacttctgcacccagcacggctccccggcgacctggctgcagcctgctctccctacgctggccgagatcattcgcctgcaggaccccagtgccatcaagattgaggtggccacttatgccacctgctaccctgacttcagcaaaggccacctgagcgctatcctggccatcaaggggaacctatccaacagtgaggtcaagcgcatccggagcatcttggacgtcagcatgggggcgcaggagccctcccggcccctattttcccttataaaggttggttagcttttcctgtggcctgacctgcctgtgagtgcccagcaagccttgggcacaccccgctgggagctgttaagagcagcgctggttctcggttcctcccgggtctcctgtgctctgatgctacttctgcctagccctggcggaggtgcaggccctgtcagctggaactggacagaccttggtttgtttacatgtccgatgggggcaggagctcccatcctgggcagccaaccaggcaacaccaaggactctttgtaaacgatagctgatcgtgtgcacgcaaggaaagaacc

SEQ ID NO: 33231 - DNA, 1002 bp, Homo sapiens
  source 1..1002: mol_type = unassigned DNA
agccactgttcaagaggttcacgcacacccgctgggcggcccctgtggagaccctggaaaacatcatcgccactgtagacacgaggctgcctgagttctcagagctgcagggctgtttccgggaggagctcatggaggccttgcacctgcacctggtgaaggagtacatcatccaactcagcaaggggcgcctggtcctcaagacggccgagcagcagcagcagctggctgggtacatcctggccaatgctgacaccatccagcacttctgcacccagcacggctccccggcgacctggctgcagcctgctctccctacgctggccgagatcattcgcctgcaggaccccagtgccatcaagattgaggtggccacttatgccacctgctaccctgacttcagcaaaggccacctgagcgctatcctggccatcaaggggaacctatccaacagtgaggtcaagcgcatccggagcatcttggacgtcagcatgggggcgcaggagccctcccggcccctattttcccttataaagcccagggccgccgtgagcgggattcagcaatggtggaatggaagacagaactggaagagaaagaaggaaaagatgagctctcgtctggcaggggcttttagggtcctgtggcgagctgtgagcaccgccagcattagacgtcacatccaggtggccccacggcccctacaggctggccctgcaatggggccctgagccctccctcttcatcccccaaggcctcaactagagggtggtcccccgagggcttggtgtctactaccgaagggcccaagacctcctgggtcctctcaggctcccccttccccaaggcagggacaggccctgggggtgccaccgtgggccctgccacccagaagtctggctgaggtctgggcaggggcagggcaagcttgacctctcactgttgaccctttggcctctgtatttgtttcctattgccgtgacaggtttccacaaacttcgt

SEQ ID NO: 33232 - DNA, 421 bp, Homo sapiens
  source 1..421: mol_type = unassigned DNA
agtggcggccaggccgggacacgctgcctcggagagcggagacctggggcgaggcccagggggctgcagcaggaccttcaggcgctctgggtttcgtgtcacagaggggagaaggcggtgatgctgtgggggtcctgcgggagctgtgcctggaggagcctgcaggcctgaaccagggtgatgctgaagatgatgaccttcttccaaggcctctagagccatcagcctgtgccaggcaccctcgacttgcctagaggcccccaaaagttgcagtccacatcagaggcagagtcagaggcctccatgtcggaggcctcctctgaggacctggtgccacccctggaggctggggcagccccatatagggaggaggaagaggcggcgaagaagaagaaggagaagaagaagaagtccaaaggcc

SEQ ID NO: 33233 - DNA, 4683 bp, Homo sapiens
  source 1..4683: mol_type = unassigned DNA
agtggcggccaggccgggacacggtaagtgacctccgcttccacacgtccattccccgccgctccgcgcggcttctcgcccgcccctaccccgaggccaggccggattccccgaggaaagagcctgtcgccgcggcggggacaggagggggctggacgcttccagggaaactgaggccctggcgcgcccagcgtccgcgcgtccgggcgcagaggggccaaggctggctgagggcccgggcctgccagaggcagggagggcggggctggggcaggcgcaggggtctcccctccattacagcagaaaggccccaggtccggcgtgactccccggccgggcgacacaggccgagtcacttcctcgcccgtgcccgggtgtcctcatcgggggatgggtgcgccttccacatcctgcccaggactgaaggagccgggcccagcgagctcccgggaggtgtgtggacatcagccctgacggggaaggcgagccaggagcctgcaggcctgaaccagggtgatgctgaagatgatgaccttcttccaaggcctctagagccatcagcctgtgccaggcaccctcgacttgcctagaggcccccaaaagttgcagtccacatcagaggcagagtcagaggcctccatgtcggaggcctcctctgaggacctggtgccacccctggaggctggggcagccccatatagggaggaggaagaggcggcgaagaagaagaaggagaagaagaagaagtccaaaggcctggccaatgtgttctgcgtcttcaccaaagggaagaagaagaagggtcagcccagctcagcggagcccgaggacgcagccgggtccaggcaggggctggatggcccgccccccacagtggaggagctgaaggcggcgctggagcgcgggcagctggaggcggcgcggccgctgctggcgctggagcgggagctggcggcggcggcggcggcgggcggtgtgagcgaggaggagctggtgcggcgccagagcaaggtggaggcgctgtacgagctgctgcgcgaccaggtgctgggcgtgctgcggcggccgctggaggcgccgcccgagcggctgcgccaggcgctggccgtggtggcggagcaggagcgcgaggaccgccaggcggcggcggcggggccggggacctcggggctggcggccacgcgcccgcggcgctggctgcagctgtggcggcgcggcgtggcggaggcggccgaggagcgcatgggccagcggccggccgcgggcgccgaggtccccgagagcgtctttctgcacttgggccgcaccatgaaggaggacctggaggccgtggtggagcggctgaagccgctgttccccgccgagttcggcgtcgtggcggcctacgccgagagctaccaccagcacttcgcggcccacctggccgccgtggcgcagttcgagctgtgcgagcgcgacacctacatgctgctgctctgggtgcagaacctctaccccaatgacatcatcaacagccccaagctggtgggtgagctgcagggtatggggctcgggagcctcctgccccccaggcagatccgactgctggaggccacattcctgtccagtgaggcggccaatgtgagggagttgatggaccgagctctggagctagaggcacggcgctgggctgaggatgtgcctccccagaggctggacggccactgccacagcgagctggccatcgacatcatccagatcacctcccaggcccaggccaaggccgagagcatcacgctggacttgggctcacagataaagcgggtgctgctggtggagctgcctgcgttcctgaggagctaccagcgcgcctttaatgaatttctggagagaggcaagcagctgacgaattacagggccaatgttattgccaacatcaacaactgcctgtccttccggatgtccatggagcagaattggcaggtaccccaggacaccctgagcctcctgctgggccccctgggtgagctcaagagccacggctttgacaccctgctccagaacctgcatgaggacctgaagccactgttcaagaggttcacgcacacccgctgggcggcccctgtggagaccctggaaaacatcatcgccactgtagacacgaggctgcctgagttctcagagctgcagggctgtttccgggaggagctcatggaggccttgcacctgcacctggtgaaggagtacatcatccaactcagcaaggggcgcctggtcctcaagacggccgagcagcagcagcagctggctgggtacatcctggccaatgctgacaccatccagcacttctgcacccagcacggctccccggcgacctggctgcagcctgctctccctacgctggccgagatcattcgcctgcaggaccccagtgccatcaagattgaggtggccacttatgccacctgctaccctgacttcagcaaaggccacctgagcgctatcctggccatcaaggggaacctatccaacagtgaggtcaagcgcatccggagcatcttggacgtcagcatgggggcgcaggagccctcccggcccctattttcccttataaaggttggttagcttttcctgtggcctgacctgcctgtgagtgcccagcaagccttgggcacaccccgctgggagctgttaagagcagcgctggttctcggttcctcccgggtctcctgtgctctgatgctacttctgcctagccctggcggaggtgcaggccctgtcagctggaactggacagaccttggtttgtttacatgtccgatgggggcaggagctcccatcctgggcagccaaccaggcaacaccaaggactctttgtaaacgatagctgatcgtgtgcacgcaaggaaagaaccaggagggagagtgcagccaggctcagggatccccggacacctctgtccagagcccctccacagtcggcctcatgactgtcctcctcgtgggtggggccgagggccctcttcagctctctggagacaggggccgagcctcacccatctgccctctgcagcccagggccgccgtgagcgggattcagcaatggtggaatggaagacagaactggaagagaaagaaggaaaagatgagctctcgtctggcaggggcttttagggtcctgtggcgagctgtgagcaccgccagcattagacgtcacatccaggtggccccacggcccctacaggctggccctgcaatggggccctgagccctccctcttcatcccccaaggcctcaactagagggtggtcccccgagggcttggtgtctactaccgaagggcccaagacctcctgggtcctctcaggctcccccttccccaaggcagggacaggccctgggggtgccaccgtgggccctgccacccagaagtctggctgaggtctgggcaggggcagggcaagcttgacctctcactgttgaccctttggcctctgtatttgtttcctattgccgtgacaggtttccacaaacttcgtggatcaaaacgaggtcttccagttctgcgggtcagaaggctgacccggggctcaaatctgggtgtcggcagtcctgcactccttctggaggctctaggggagaattcatttctggccttttcatttttagaggctgaccgtaattcttgacttcaggctcctccatcttcagagccagctgtgggtagttgaatctttttcccgtcacctcattgaggcctcccctctcctgcctccctccaccacttttttttttttttttttgagacagggtcttgctgtgttgcccaggctggagtgcagtggcctggtcatggcatcaaggctcactgcagcctggacctcctggttcaagtgatcctcttgtctcagtcccctgagacaatcccccacgcccagctacatattttttgtggatacagggtctcattctgttgcctaggcttgtctggaactcctgggctcaagggatcttgtagccttagcctcctaaagtgctgggattataggcatgagtcactgtacccggcctgctctaccgcttttaaggacgcttatgatcacattgcgcctacccagagaacccaggtcgtctttctattttcaggtcagctgattagccaccttagttccatctgcaactttagttcccactggctgtgtaacctaacatagtcacaggctctggggactgtcacgtggacatctttgggaggccgttattctgcccaccgcaccctccgttcatcccctgccctgccgggcacctcgctctaccccaggaaaatgtgagctcgttttcctgctcggcatgtgctccccctaaggctctgctcctccctgggcctgaaagttccttctcagcctgagagggggcccttcggactcaggcatgactcagcccggctgatgcctctgcagtgctgagtcaggatttggggccggctctcttgggtccgtccccttttcccaggtactgccttacaaagctgtggccaggaagtggccggtataaaggatgcccaaggtctttgtacgtgtgtaggagttagcgtgtttgatattgttaatataataataattattttttagagtactgcttttgtatgtatgttgaacaggatccaggtttttatagcttgatataaaacagaattcaaaagtg

SEQ ID NO: 33234 - DNA, 4432 bp, Homo sapiens
  source 1..4432: mol_type = unassigned DNA
tgccttgaccaggacttgggactttgcgaaaggatcgcggggcccggagaggtgttggagagcacaatggctgaacaagtccttcctcaggctttgtatttgagcaatatgcggaaagctgtgaagatacgggagagaactccagaagacatttttaaacctactaatgggatcattcatcattttaaaaccatgcaccgatacacactggaaatgttcagaacttgccagttttgtcctcagtttcgggagatcatccacaaagccctcatcgacagaaacatccaggccaccctggaaagccagaagaaactcaactggtgtcgagaagtccggaagcttgtggcgctgaaaacgaacggtgacggcaattgcctcatgcatgccacttctcagtacatgtggggcgttcaggacacagacttggtactgaggaaggcgctgttcagcacgctcaaggaaacagacacacgcaactttaaattccgctggcaactggagtctctcaaatctcaggaatttgttgaaacggggctttgctatgatactcggaactggaatgatgaatgggacaatcttatcaaaatggcttccacagacacacccatggcccgaagtggacttcagtacaactcactggaagaaatacacatatttgtcctttgcaacatcctcagaaggccaatcattgtcatttcagacaaaatgctaagaagtttggaatcaggttccaatttcgcccctttgaaagtgggtggaatttacttgcctctccactggcctgcccaggaatgctacagataccccattgttctcggctatgacagccatcattttgtacccttggtgaccctgaaggacagtgggcctgaaatccgagctgttccacttgttaacagagaccggggaagatttgaagacttaaaagttcactttttgacagatcctgaaaatgagatgaaggagaagctcttaaaagagtacttaatggtgatagaaatccccgtccaaggctgggaccatggcacaactcatctcatcaatgccgcaaagttggatgaagctaacttaccaaaagaaatcaatctggtagatgattactttgaacttgttcagcatgagtacaagaaatggcaggaaaacagcgagcaggggaggagagaggggcacgcccagaatcccatggaaccttccgtgccccagctttctctcatggatgtaaaatgtgaaacgcccaactgccccttcttcatgtctgtgaacacccagcctttatgccatgagtgctcagagaggcggcaaaagaatcaaaacaaactcccaaagctgaactccaagccgggccctgaggggctccctggcatggcgctcggggcctctcggggagaagcctatgagcccttggcgtggaaccctgaggagtccactggggggcctcattcggccccaccgacagcacccagcccttttctgttcagtgagaccactgccatgaagtgcaggagccccggctgccccttcacactgaatgtgcagcacaacggattttgtgaacgttgccacaacgcccggcaacttcacgccagccacgccccagaccacacaaggcacttggatcccgggaagtgccaagcctgcctccaggatgttaccaggacatttaatgggatctgcagtacttgcttcaaaaggactacagcagaggcctcctccagcctcagcaccagcctccctccttcctgtcaccagcgttccaagtcagatccctcgcggctcgtccggagcccctccccgcattcttgccacagagctggaaacgacgcccctgctggctgcctgtctcaagctgcacggactcctggggacaggacggggacgagcaagtgcagaaaagccggctgcgtgtattttgggactccagaaaacaagggcttttgcacactgtgtttcatcgagtacagagaaaacaaacattttgctgctgcctcagggaaagtcagtcccacagcgtccaggttccagaacaccattccgtgcctggggagggaatgcggcacccttggaagcaccatgtttgaaggatactgccagaagtgtttcattgaagctcagaatcagagatttcatgaggccaaaaggacagaagagcaactgagatcgagccagcgcagagatgtgcctcgaaccacacaaagcacctcaaggcccaagtgcgcccgggcctcctgcaagaacatcctggcctgccgcagcgaggagctctgcatggagtgtcagcatcccaaccagaggatgggccctggggcccaccggggtgagcctgcccccgaagacccccccaagcagcgttgccgggcccccgcctgtgatcattttggcaatgccaagtgcaacggctactgcaacgaatgctttcagttcaagcagatgtatggctaaccggaaacaggtgggtcacctcctgcaagaagtggggcctcgagctgtcagtcatcatggtgctatcctctgaacccctcagctgccactgcaacagtgggcttaagggtgtctgagcaggagaggaaagataagctcttcgtggtgcccacgatgctcaggtttggtaacccgggagtgttcccaggtggccttagaaagcaaagcttgtaactggcaagggatgatgtcagattcagcccaaggttcctcctctcctaccaagcaggaggccaggaacttctttggacttggaaggtgtgcggggactggccgaggcccctgcaccctgcgcatcaggactgcttcatcgtcttggctgagaaagggaaaagacacacaagtcgcgtgggttggagaagccagagccattccacctcccctcccccagcatctctcagagatgtgaagccagatcctcatggcagcgaggccctctgcaagaagctcaaggaagctcagggaaaatggacgtattcagagagtgtttgtagttcatggtttttccctacctgcccggttcctttcctgaggacccggcagaaatgcagaaccatccatggactgtgattctgaggctgctgagactgaacatgttcacattgacagaaaaacaagctgctctttataatatgcaccttttaaaaaattagaatattttactgggaagacgtgtaactctttgggttattactgtctttacttctaaagaagttagcttgaactgaggagtaaaagtgtgtacatatataatatacccttacattatgtatgagggatttttttaaattatattgaaatgctgccctagaagtacaataggaaggctaaataataataacctgttttctggttgttgttggggcatgagcttgtgtatacactgcttgcataaactcaaccagctgcctttttaaagggagctctagtcctttttgtgtaattcactttatttattttattacaaacttcaagattatttaagtgaagatatttcttcagctctggggaaaatgccacagtgttctcctgagagaacatccttgctttgagtcaggctgtgggcaagttcctgaccacagggagtaaattggcctctttgatacacttttgcttgcctccccaggaaagaaggaattgcatccaaggtatacatacatattcatcgatgtttcgtgcttctccttatgaaactccagctatgtaataaaaaactatactctgtgttctgttaatgcctctgagtgtcctacctccttggagatgagatagggaaggagcagggatgagactggcaatggtcacagggaaagatgtggccttttgtgatggttttattttctgttaacactgtgtcctgggggggctgggaagtcccctgcatcccatggtaccctggtattgggacagcaaaagccagtaaccatgagtatgaggaaatctctttctgttgctggcttacagtttctctgtgtgctttgtggttgctgtcatatttgctctagaagaaaaaaaaaaaaggaggggaaatgcattttccccagagataaaggctgccattttgggggtctgtacttatggcctgaaaatatttgtgatccataactctacacagcctttactcatactattaggcacactttccccttagagccccctaagtttttcccagacgaatctttataatttctttccaaagataccaaataaacttcagtgttttcatctaattctcttaaagttgatatcttaatattttgtgttgatcattatttccattcttaatgtgaaaaaaagtaattatttatacttattataaaaagtatttgaaatttgcacatttaattgtccctaatagaaagccacctattctttgttggatttcttcaagtttttctaaataaatgtaacttttcacaagagtcaacattaaaaaataaattatttaagaaca

SEQ ID NO: 33235 - DNA, 698 bp, Homo sapiens
  source 1..698: mol_type = unassigned DNA
gcggccgccaagagagatcacacccccagccgaccctgccagcgagcgagcccgaccccaggcgtccatggagcgtcgcctccgcccggtccctgccccgacccccgcctgcggcgcgctcctgccttgaccaggacttgggactttgcgaaaggatcgcggggcccggagaggtaaccgccgcgcctcccggagaggtgttggagagcacaatggctgaacaagtccttcctcaggctttgtatttgagcaatatgcggaaagctgtgaagatacgggagagaactccagaagacatttttaaacctactaatgggatcattcatcattttaaaaccatgcaccgatacacactggaaatgttcagaacttgccagttttgtcctcagtttcgggagatcatccacaaagccctcatcgacagaaacatccaggccaccctggaaagccagaagaaactcaactggtgtcgagaagtccggaagcttgtggcgctgaaaacgaacggtgacggcaattgcctcatgcatgccacttctcagtacatgtggggcgttcaggacacagacttggtactgaggaaggcgctgttcagcacgctcaaggaaacagacacacgcaactttaaattccgctggcaactggagtctctcaaatctcaggaatttgttgaaacggggctttgctatgatactcgg

SEQ ID NO: 33236 - DNA, 421 bp, Homo sapiens
  source 1..421: mol_type = unassigned DNA
gggcctacaacccgcatacaactgaaacggggcaaagcagactgcgcagtctgcagtcttcgtggcgggccaagcgagcttggagcccgcgggggcggagcggtgagagcggccgccaagagagatcacacccccagccgaccctgccagcgagcgagcccgaccccaggcgtccatggagcgtcgcctccgcccggtccctgccccgacccccgcctgcggcgcgctcctgccttgaccaggacttgggactttgcgaaaggatcgcggggcccggagaggtaaccgccgcgcctcccggagaggtaaccgccgcgcctcccggagaggtgttggagagcacaatggctgaacaagtccttcctcaggctttgtatttgagcaatatgcggaaagctgtgaagatacgggagagaactcc

SEQ ID NO: 33237 - DNA, 465 bp, Homo sapiens
  source 1..465: mol_type = unassigned DNA
accgcagtcaagggctgcgggtgcatgttgggcagcgacccccgggctggcaccgtctacctggcgttggttttgcagcgctcctggactgggagtttgttggacgtttctgtctgggttttgaagtgctgggagttgaggtcactgctgcagaggtgttggagagcacaatggctgaacaagtccttcctcaggctttgtatttgagcaatatgcggaaagctgtgaagatacgggagagaactccagaagacatttttaaacctactaatgggatcattcatcattttaaaaccatgcaccgatacacactggaaatgttcagaacttgccagttttgtcctcagtttcgggagatcatccacaaagccctcatcgacagaaacatccaggccaccctggaaagccagaagaaactcaactggtgtcgagaagtccggaagcttgtggcgctgaaaacgaacg

SEQ ID NO: 33238 - DNA, 827 bp, Homo sapiens
  source 1..827: mol_type = unassigned DNA
aggtgttggagagcacaatggctgaacaagtccttcctcaggctttgtatttgagcaatatgcggaaagctgtgaagatacgggagagaactccagaagacatttttaaacctactaatgggatcattcatcattttaaaaccatgcaccgatacacactggaaatgttcagaacttgccagttttgtcctcagtttcgggagatcatccacaaagccctcatcgacagaaacatccaggccaccctggaaagccagaagaaactcaactggtgtcgagaagtccggaagcttgtggcgctgaaaacgaacggtgacggcaattgcctcatgcatgccacttctcagtacatgtggggcgttcaggacacagacttggtactgaggaaggcgctgttcagcacgctcaaggaaacagacacacgcaactttaaattccgctggcaactggagtctctcaaatctcaggaatttgttgaaacggggctttgctatgatactcggaactggaatgatgaatgggacaatcttatcaaaatggcttccacagacacacccatggcccgaagtggacttcagtacaactcactggaagaaatacacatatttgtcctttgcaacatcctcagaaggccaatcattgtcatttcagacaaaatgctaagaagtttggaatcaggttccaatttcgcccctttgaaagtgggtggaatttacttgcctctccactggcctgcccaggaatgctacagataccccattgttctcggctatgacagccatcattttgtacccttggtgaccctgaaggacagtgggcctgatata

SEQ ID NO: 33239 - DNA, 3817 bp, Homo sapiens
  source 1..3817: mol_type = unassigned DNA
aggtgttggagagcacaatggctgaacaagtccttcctcaggctttgtatttgagcaatatgcggaaagctgtgaagatacgggagagaactccagaagacatttttaaacctactaatgggatcattcatcattttaaaaccatgcaccgatacacactggaaatgttcagaacttgccagttttgtcctcagtttcgggagatcatccacaaagccctcatcgacagaaacatccaggccaccctggaaagccagaagaaactcaactggtgtcgagaagtccggaagcttgtggcgctgaaaacgaacggtgacggcaattgcctcatgcatgccacttctcagtacatgtggggcgttcaggacacagacttggtactgaggaaggcgctgttcagcacgctcaaggaaacagacacacgcaactttaaattccgctggcaactggagtctctcaaatctcaggaatttgttgaaacggggctttgctatgatactcggaactggaatgatgaatgggacaatcttatcaaaatggcttccacagacacacccatggcccgaagtggacttcagtacaactcactggaagaaatacacatatttgtcctttgcaacatcctcagaaggccaatcattgtcatttcagacaaaatgctaagaagtttggaatcaggttccaatttcgcccctttgaaagtgggtggaatttacttgcctctccactggcctgcccaggaatgctacagataccccattgttctcggctatgacagccatcattttgtacccttggtgaccctgaaggacagtgggcctgaaatccgagctgttccacttgttaacagagaccggggaagatttgaagacttaaaagttcactttttgacagatcctgaaaatgagatgaaggagaagctcttaaaagagtacttaatggtgatagaaatccccgtccaaggctgggaccatggcacaactcatctcatcaatgccgcaaagttggatgaagctaacttaccaaaagaaatcaatctggtagatgattactttgaacttgttcagcatgagtacaagaaatggcaggaaaacagcgagcaggggaggagagaggggcacgcccagaatcccatggaaccttccgtgccccagctttctctcatggatgtaaaatgtgaaacgcccaactgccccttcttcatgtctgtgaacacccagcctttatgccatgagtgctcagagaggcggcaaaagaatcaaaacaaactcccaaagctgaactccaagccgggccctgaggggctccctggcatggcgctcggggcctctcggggagaagcctatgagcccttggcgtggaaccctgaggagtccactggggggcctcattcggccccaccgacagcacccagcccttttctgttcagtgagaccactgccatgaagtgcaggagccccggctgccccttcacactgaatgtgcagcacaacggattttgtgaacgttgccacaacgcccggcaacttcacgccagccacgccccagaccacacaaggcacttggatcccgggaagtgccaagcctgcctccaggatgttaccaggacatttaatgggatctgcagtacttgcttcaaaaggactacagcagaggcctcctccagcctcagcaccagcctccctccttcctgtcaccagcgttccaagtcagatccctcgcggctcgtccggagcccctccccgcattcttgccacagagctggaaacgacgcccctgctggctgcctgtctcaagctgcacggactcctggggacaggacggggacgagcaagtgcagaaaagccggctgcgtgtattttgggactccagaaaacaagggcttttgcacactgtgtttcatcgagtacagagaaaacaaacattttgctgctgcctcagggaaagtcagtcccacagcgtccaggttccagaacaccattccgtgcctggggagggaatgcggcacccttggaagcaccatgtttgaaggatactgccagaagtgtttcattgaagctcagaatcagagatttcatgaggccaaaaggacagaagagcaactgagatcgagccagcgcagagatgtgcctcgaaccacacaaagcacctcaaggcccaagtgcgcccgggcctcctgcaagaacatcctggcctgccgcagcgaggagctctgcatggagtgtcagcatcaaccagaggatgggccctggggcccaccggggtgagcctgcccccgaagacccccccaagcagcgttgccgggcccccgcctgtgatcattttggcaatgccaagtgcaacggctactgcaacgaatgctttcagttcaagcagatgtatggctaaccggaaacaggtgggtcacctcctgcaagaagtggggcctcgagctgtcagtcatcatggtgctatcctctgaacccctcagctgccactgcaacagtgggcttaagggtgtctgagcaggagaggaaagataagctcttcgtggtgcccacgatgctcaggtttggtaacccgggagtgttcccaggtggccttagaaagcaaagcttgtaactggcaagggatgatgtcagattcagcccaaggttcctcctctcctaccaagcaggaggccaggaacttctttggacttggaaggtgtgcggggactggccgaggcccctgcaccctgcgcatcaggactgcttcatcgtcttggctgagaaagggaaaagacacacaagtcgcgtgggttggagaagccagagccattccacctcccctcccccagcatctctcagagatgtgaagccagatcctcatggcagcgaggccctctgcaagaagctcaaggaagctcagggaaaatggacgtattcagagagtgtttgtagttcatggtttttccctacctgcccggttcctttcctgaggacccggcagaaatgcagaaccatccatggactgtgattctgaggctgctgagactgaacatgttcacattgacagaaaaacaagctgctctttataatatgcaccttttaaaaaattagaatattttactgggaagacgtgtaactctttgggttattactgtctttacttctaaagaagttagcttgaactgaggagtaaaagtgtgtacatatataatatacccttacattatgtatgagggatttttttaaattatattgaaatgctgccctagaagtacaataggaaggctaaataataataacctgttttctggttgttgttggggcatgagcttgtgtatacactgcttgcataaactcaaccagctgcctttttaaagggagctctagtcctttttgtgtaattcactttatttattttattacaaacttcaagattatttaagtgaagatatttcttcagctctggggaaaatgccacagtgttctcctgagagaacatccttgctttgagtcaggctgtgggcaagttcctgaccacagggagtaaattggcctctttgatacacttttgcttgcctccccaggaaagaaggaattgcatccaaggtatacatacatattcatcgatgtttcgtgcttctccttatgaaactccagctatgtaataaaaaactatactctgtgttctgttaatgcctctgagtgtcctacctccttggagatgagatagggaaggagcagggatgagactggcaatggtcacagggaaagatgtggccttttgtgatggttttattttctgttaacactgtgtcctgggggggctgggaagtcccctgcatcccatg

SEQ ID NO: 33240 - DNA, 459 bp, Homo sapiens
  source 1..459: mol_type = unassigned DNA
atggctgaacaagtccttcctcaggctttgtatttgagcaatatgcggaaagctgtgaagatacgggagagaactccagaagacatttttaaacctactaatgggatcattcatcattttaaaaccatgcaccgatacacactggaaatgttcagaacttgccagttttgtcctcagtttcgggagatcatccacaaagccctcatcgacagaaacatccaggccaccctggaaagccagaagaaactcaactggtgtcgagaagtccggaagcttgtggcgctgaaaacgaacggtgacggcaattgcctcatgcatgccacttctcagtacatgtggggcgttcaggacacagacttggtactgaggaaggcgctgttcagcacgctcaaggaaacagacacacgcaactttaaattccgctggcaactggagtctcaaatctcaggaatttgttga

SEQ ID NO: 33241 - DNA, 3818 bp, Homo sapiens
  source 1..3818: mol_type = unassigned DNA
aggtgttggagagcacaatggctgaacaagtccttcctcaggctttgtatttgagcaatatgcggaaagctgtgaagatacgggagagaactccagaagacatttttaaacctactaatgggatcattcatcattttaaaaccatgcaccgatacacactggaaatgttcagaacttgccagttttgtcctcagtttcgggagatcatccacaaagccctcatcgacagaaacatccaggccaccctggaaagccagaagaaactcaactggtgtcgagaagtccggaagcttgtggcgctgaaaacgaacggtgacggcaattgcctcatgcatgccacttctcagtacatgtggggcgttcaggacacagacttggtactgaggaaggcgctgttcagcacgctcaaggaaacagacacacgcaactttaaattccgctggcaactggagtctctcaaatctcaggaatttgttgaaacggggctttgctatgatactcggaactggaatgatgaatgggacaatcttatcaaatggcttccacagacacacccatggcccgaagtggacttcagtacaactcactggaagaaatacacatatttgtcctttgcaacatcctcagaaggccaatcattgtcatttcagacaaaatgctaagaagtttggaatcaggttccaatttcgcccctttgaaagtgggtggaatttacttgcctctccactggcctgcccaggaatgctacagataccccattgttctcggctatgacagccatcattttgtacccttggtgaccctgaaggacagtgggcctgaaatccgagctgttccacttgttaacagagaccggggaagatttgaagacttaaaagttcactttttgacagatcctgaaaatgagatgaaggagaagctcttaaaagagtacttaatggtgatagaaatccccgtccaaggctgggaccatggcacaactcatctcatcaatgccgcaaagttggatgaagctaacttaccaaaagaaatcaatctggtagatgattactttgaacttgttcagcatgagtacaagaaatggcaggaaaacagcgagcaggggaggagagaggggcacgcccagaatcccatggaaccttccgtgccccagctttctctcatggatgtaaaatgtgaaacgcccaactgccccttcttcatgtctgtgaacacccagcctttatgccatgagtgctcagagaggcggcaaaagaatcaaaacaaactcccaaagctgaactccaagccgggccctgaggggctccctggcatggcgctcggggcctctcggggagaagcctatgagcccttggcgtggaaccctgaggagtccactggggggcctcattcggccccaccgacagcacccagcccttttctgttcagtgagaccactgccatgaagtgcaggagccccggctgccccttcacactgaatgtgcagcacaacggattttgtgaacgttgccacaacgcccggcaacttcacgccagccacgccccagaccacacaaggcacttggatcccgggaagtgccaagcctgcctccaggatgttaccaggacatttaatgggatctgcagtacttgcttcaaaaggactacagcagaggcctcctccagcctcagcaccagcctccctccttcctgtcaccagcgttccaagtcagatccctcgcggctcgtccggagcccctccccgcattcttgccacagagctggaaacgacgcccctgctggctgcctgtctcaagctgcacggactcctggggacaggacggggacgagcaagtgcagaaaagccggctgcgtgtattttgggactccagaaaacaagggcttttgcacactgtgtttcatcgagtacagagaaaacaaacattttgctgctgcctcagggaaagtcagtcccacagcgtccaggttccagaacaccattccgtgcctggggagggaatgcggcacccttggaagcaccatgtttgaaggatactgccagaagtgtttcattgaagctcagaatcagagatttcatgaggccaaaaggacagaagagcaactgagatcgagccagcgcagagatgtgcctcgaaccacacaaagcacctcaaggcccaagtgcgcccgggcctcctgcaagaacatcctggcctgccgcagcgaggagctctgcatggagtgtcagcatcccaaccagaggatgggccctggggcccaccggggtgagcctgcccccgaagacccccccaagcagcgttgccgggcccccgcctgtgatcattttggcaatgccaagtgcaacggctactgcaacgaatgctttcagttcaagcagatgtatggctaaccggaaacaggtgggtcacctcctgcaagaagtggggcctcgagctgtcagtcatcatggtgctatcctctgaacccctcagctgccactgcaacagtgggcttaagggtgtctgagcaggagaggaaagataagctcttcgtggtgcccacgatgctcaggtttggtaacccgggagtgttcccaggtggccttagaaagcaaagcttgtaactggcaagggatgatgtcagattcagcccaaggttcctcctctcctaccaagcaggaggccaggaacttctttggacttggaaggtgtgcggggactggccgaggcccctgcaccctgcgcatcaggactgcttcatcgtcttggctgagaaagggaaaagacacacaagtcgcgtgggttggagaagccagagccattccacctcccctcccccagcatctctcagagatgtgaagccagatcctcatggcagcgaggccctctgcaagaagctcaaggaagctcagggaaaatggacgtattcagagagtgtttgtagttcatggtttttccctacctgcccggttcctttcctgaggacccggcagaaatgcagaaccatccatggactgtgattctgaggctgctgagactgaacatgttcacattgacagaaaaacaagctgctctttataatatgcaccttttaaaaaattagaatattttactgggaagacgtgtaactctttgggttattactgtctttacttctaaagaagttagcttgaactgaggagtaaaagtgtgtacatatataatatacccttacattatgtatgagggatttttttaaattatattgaaatgctgccctagaagtacaataggaaggctaaataataataacctgttttctggttgttgttggggcatgagcttgtgtatacactgcttgcataaactcaaccagctgcctttttaaagggagctctagtcctttttgtgtaattcactttatttattttattacaaacttcaagattatttaagtgaagatatttcttcagctctggggaaaatgccacagtgttctcctgagagaacatccttgctttgagtcaggctgtgggcaagttcctgaccacagggagtaaattggcctctttgatacacttttgcttgcctccccaggaaagaaggaattgcatccaaggtatacatacatattcatcgatgtttcgtgcttctccttatgaaactccagctatgtaataaaaaactatactctgtgttctgttaatgcctctgagtgtcctacctccttggagatgagatagggaaggagcagggatgagactggcaatggtcacagggaaagatgtggccttttgtgatggttttattttctgttaacactgtgtcctgggggggctgggaagtcccctgcatcccatg

SEQ ID NO: 33242 - DNA, 2010 bp, Homo sapiens
  source 1..2010: mol_type = unassigned DNA
atggctgaacaagtccttcctcaggctttgtatttgagcaatatgcggaaagctgtgaagatacgggagagaactccagaagacatttttaaacctactaatgggatcattcatcattttaaaaccatgcaccgatacacactggaaatgttcagaacttgccagttttgtcctcagtttcgggagatcatccacaaagccctcatcgacagaaacatccaggccaccctggaaagccagaagaaactcaactggtgtcgagaagtccggaagcttgtggcgctgaaaacgaacggtgacggcaattgcctcatgcatgccacttctcagtacatgtggggcgttcaggacacagacttggtactgaggaaggcgctgttcagcacgctcaaggaaacagacacacgcaactttaaattccgctggcaactggagtctctcaaatctcaggaatttgttgaaacggggctttgctatgatactcggaactggaatgatgaatgggacaatcttatcaaaatggcttccacagacacacccatggcccgaagtggacttcagtacaactcactggaagaaatacacatatttgtcctttgcaacatcctcagaaggccaatcattgtcatttcagacaaaatgctaagaagtttggaatcaggttccaatttcgcccctttgaaagtgggtggaatttacttgcctctccactggcctgcccaggaatgctacagataccccattgttctcggctatgacagccatcattttgtacccttggtgaccctgaaggacagtgggcctgaaatccgagctgttccacttgttaacagagaccggggaagatttgaagacttaaaagttcactttttgacagatcctgaaaatgagatgaaggagaagctcttaaaagagtacttaatggtgatagaaatccccgtccaaggctgggaccatggcacaactcatctcatcaatgccgcaaagttggatgaagctaacttaccaaaagaaatcaatctggtagatgattactttgaacttgttcagcatgagtacaagaaatggcaggaaaacagcgagcaggggaggagagaggggcacgcccagaatcccatggaaccttccgtgccccagctttctctcatggatgtaaaatgtgaaacgcccaactgccccttcttcatgtctgtgaacacccagcctttatgccatgagtgctcagagaggcggcaaaagaatcaaaacaaactcccaaagctgaactccaagccgggccctgaggggctccctggcatggcgctcggggcctctcggggagaagcctatgagcccttggcgtggaaccctgaggagtccactggggggcctcattcggccccaccgacagcacccagcccttttctgttcagtgagaccactgccatgaagtgcaggagccccggctgccccttcacactgaatgtgcagcacaacggattttgtgaacgttgccacaacgcccggcaacttcacgccagccacgccccagaccacacaaggcacttggatcccgggaagtgccaagcctgcctccaggatgttaccaggacatttaatgggatctgcagtacttgcttcaaaaggactacagcagaggcctcctccagcctcagcaccagcctccctccttcctgtcaccagcgttccaagtcagatccctcgcggctcgtccggagcccctccccgcattcttgccacagagctggaaacgacgcccctgctggctgcctgtctcaagctgcacggactcctggggacaggacggggacgagcaagtgcagaaaagccggctgcgtgtattttgggactccagaaaacaagggcttttgcacactgtttcatcgagtacagagaaaacaaacattttgctgctgcctcagggaaagtcagtcccacagcgtccaggttccagaacaccattccgtgcctggggagggaatgcggcacccttggaagcaccatgtttga

SEQ ID NO: 33243 - DNA, 1422 bp, Homo sapiens
  source 1..1422: mol_type = unassigned DNA
agtcacatttcagccactgctctgagaatttgtgagcagcccctaacaggctgttacttcactacaactgacgatatgatcatcttaatttacttatttctcttgctatgggaagacactcaaggatggggattcaaggatggaatttttcataactccatatggcttgaacgagcagccggtgtgtaccacagagaagcacggtctggcaaatacaagctcacctacgcagaagctaaggcggtgtgtgaatttgaaggcggccatctcgcaacttacaagcagctagaggcagccagaaaaattggatttcatgtctgtgctgctggatggatggctaagggcagagttggataccccattgtgaagccagggcccaactgtggatttggaaaaactggcattattgattatggaatccgtctcaataggagtgaaagatgggatgcctattgctacaacccacacgcaaaggagtgtggtggcgtctttacagatccaaagcaaatttttaaatctccaggcttcccaaatgagtacgaagataaccaaatctgctactggcacattagactcaagtatggtcagcgtattcacctgagttttttagattttgaccttgaagatgacccaggttgcttggctgattatgttgaaatatatgacagttacgatgatgtccatggctttgtgggaagatactgtggagatgagcttccagatgacatcatcagtacaggaaatgtcatgaccttgaagtttctaagtgatgcttcagtgacagctggaggtttccaaatcaaatatgttgcaatggatcctgtatccaaatccagtcaaggaaaaaatacaagtactacttctactggaaataaaaactttttagctggaagatttagccacttataaaaaaaaaaaaaaggatgatcaaaacacacagtgtttatgttggaatcttttggaactcctttgatctcactgttattattaacatttatttattatttttctaaatgtgaaagcaatacataatttagggaaaattggaaaatataggaaactttaaacgagaaaatgaaacctctcataatcccactgcatagaaataacaagcgttaacattttcatatttttttctttcagtcatttttctatttgtggtatatgtatatatgtacctatatgtatttgcatttgaaattttggaatcctgctctatgtacagttttgtattatactttttaaatcttgaactttataaacattttctgaaatcattgattattctacaaaaacatgattttaaacagctgtaaaatattctatgatatgaatgttttatgcattatttaagcctgtctctattgttggaatttcaggtcattttcataaatattgttgcaataaatatccttgaacaca

SEQ ID NO: 33244 - DNA, 795 bp, Homo sapiens
  source 1..795: mol_type = unassigned DNA
gacctcccggctcctccccggcctgcccgccacacccttggtccctcctgcaagttccgcccctggcctctgcctccttttctcccgccggctctaacccgcgcttggctaaggtccgcgggaacccgtgagccaccgagagagcagagaactcggcgccgccaaacagcccagctcgcgcttcagcgtcccggcgccgtcgcgccactcctccgatggccacagatgtctttaattccaaaaacctggccgttcaggcacaaaagaagatcttgggtaaaatggtgtccaaatccatcgccaccaccttaatagacgacacaagtagtgaggtgctggatgagctctacagagtgaccagggagtacacccaaaacaagaaggaggcagagaagatcatcaagaacctcatcaagacagtcatcaagctggccattctttataggaataatcagtttaatcaagatgagctagcattgatggagaaatttaagaagaaagttcatcagcttgctatgaccgtggtcagtttccatcaggtggattatacctttgaccggaatgtgttatccaggctgttaaatgaatgcagagagatgctgcaccaaatcattcagcgccacctcactgccaagtcacatggacgggttaataatgtgtttgatcatttttcagattgtgaatttttggctgccttgtataatccttttgggaattttaaaccccacttacaaaaactatgtgatggtatcaacaaaatgttggatgaagagaacatatgagcacatgagttaa

SEQ ID NO: 33245 - DNA, 2502 bp, Homo sapiens
  source 1..2502: mol_type = unassigned DNA
agactccttaaatccatgtcttttgtacgttcttttcactaaatttgccatagtgtttctattggtttttgcctatataaaatcggaaacgaagaaaaagaaacgaactggaaaataaatttgtcaaaagagtatatttttttctcataatttccaagcggatctttcagatatgttatttgaggactttttgcctcagactggcgataaaacaagtgttctacaaaatacctccgtaagacaggcctatcagtggcagctcttgtccccgctttgcagaagggaaaaccaaggctccacagagctaaggggacttcctctcagccaatttgtaggggcctgtgggccagacccgggggcagaattgagatctgttgtgaaggctgtccggcttctttattctatcagcatttcaaatcctgaaaacctcccctttggcattttgaaggaattcatccccagtttttgctggtagccgggagggaaccgtgctctccccctgaggaaggccctttggagtaactgcagcaatgagtgcccgggctgtgcttggagtaccagtgctcgcccggggctatactgaatgagtaagcagccccgtctgcttttgctgtgcaaagagcgaacttgcggctcgtccgagtacatgtgagcggtaatcgcccctgcagctggttatcctgacattatgcactccgaagcagaagaatccaaggaagtggccacagatgtctttaattccaaaaacctggccgttcaggcacaaaagaagatcttgggtaaaatggtgtccaaatccatcgccaccaccttaatagacgacacaagtagtgaggtgctggatgagctctacagagtgaccagggagtacacccaaaacaagaaggaggcagagaagatcatcaagaacctcatcaagacagtcatcaagctggccattctttataggaataatcagtttaatcaagatgagctagcattgatggagaaatttaagaagaaagttcatcagcttgctatgaccgtggtcagtttccatcaggtggattatacctttgaccggaatgtgttatccaggctgttaaatgaatgcagagagatgctgcaccaaatcattcagcgccacctcactgccaagtcacatggacgggttaataatgtgtttgatcatttttcagattgtgaatttttggctgccttgtataatccttttgggaattttaaaccccacttacaaaaactatgtgatggtatcaacaaaatgttggatgaagagaacatatgagcacatgagttaagattgtgactgatcatgatttatttgaagatggagcactgctgatttatgaaggaaaaaagaagaattttctaaagattacacatatttcagaaagactttacccaattcagttgtcagacataatgatttatttgaaggcttgttttatttgaagaaaagcatattgccaaaaattctggttaaaagcttcctaacgggtaacagaccatgggagagatatgtggttgggtaatgcaaatgtagttatacaaagaaaaatacagatgtctccagacctgaggactttttaatagggcagttgttgtgttggtggcacattggatatttctaacatgtacaaagctatgtattttgatttactttcatttcttgctatgtatatgtacttttcttaaaatgccaagaactttctcttgctatcattgctccttttgaaacaattcaattttcatgtctacagctgactgttttgttaagattgagtcatcgacattcaggatttaagtctgaggtagtcaaccctcaggaaaaaaaaaatggcttatctgaaatcagtactgtggaaatgaactatattagctattatgaataatgtccagtataagaatatgcttctggaattgagttctccttttaagtaccaatgatacttaaatttctcagaaatgtaatggtgtgtcattgccttgaaatgcttgcttagggcttcttttatgttatcttaaaaagtgctggtgaattttccattttttacatccatttcacatgtaagagacaaaaaagtctagattggtcttgatattgagataataaaaagtaagtagcattaagaaaggtaacaatcttcattctacagatgaactcattgaaacaatttaggggaatgaggggcaaaaggggagaaatactgctaaagaacatgagcataaaaatgcgtgcgtttcagtgtttaagaaggcttgataaagaatgtcacttttttatttaactgataagatttttgttattttttactttgataagtaaaccaaagaatatttgtatttcaagcagtttgtgtggtgtttctatataattttctgtgtataaataataaagtaggcatttgtttattttgtaaaaaagaaatgaaaatctgctggccagctatgtcctctaggaaatgacagacccaaccaccagcaataaacatttccattgtc

SEQ ID NO: 33246 - DNA, 3591 bp, Homo sapiens
  source 1..3591: mol_type = unassigned DNA
ttctcctcttctcccttctctggctggctatatcttcctcccttcatcctgctctttcagtgaaattgagataacatgttagaatcttaggcaggttagaatctctcagcagtaggatgtgatttaatatctagacctcttacattaatatttataatagccttcactgcttgtgaatagcataagcactcttttctgttcaaagtcaatactgaaataaaacccaagagtatgttttataaaaatttacttttaatggtgcaatggtaataatctatgtagtccttatggttttcaaatccctttgtgcttatattaccttatttaatacagacataaatctgtgaagtaaataatactatttttatcttcattttacaaatgaggaactggaggctcagagaggttaatttgcataaggtcatacaaatgatagatggcagaactggatttaagttcagactccttaaatccatgtcttttgtacgttcttttcactaaatttgccatagtgtttctattggtttttgcctatataaaatcggaaacgaagaaaaagaaacgaactggaaaataaatttgtcaaaagagtatatttttttctcataatttccaagcggatctttcagatatgttatttgaggactttttgcctcagactggcgataaaacaagtgttctacaaaatacctccgtaagacaggcctatcagtggcagctcttgtccccgctttgcagaagggaaaaccaaggctccacagagctaaggggacttcctctcagccaatttgtaggggcctgtgggccagacccgggggcagaattgagatctgttgtgaaggctgtccggcttctttattctatcagcatttcaaatcctgaaaacctcccctttggcattttgaaggaattcatccccagtttttgctggtagccgggagggaaccgtgctctccccctgaggaaggccctttggagtaactgcagcaatgagtgcccgggctgtgcttggagtaccagtgctcgcccggggctatactgaatgagtaagcagccccgtctgcttttgctgtgcaaaggtaagggtggaggccgctccactttcttcaaaaggccccgctctgggacttgtgaaattgtgctctcttaagctggtccttgcaaccccatggacgatatccatgcgactttcctacaaaaataacataccaaagccgctttaaaatccgtaatttttgggttgcaagactccaagacaaagtcaaatgggcatcaaaaaatgtaatccaaaaatacagaggcattggttctaccctatatgcatttgctatttatgtaaaactacagtgtgctctgagatgagactttttttttctttttatacctttttttccgcccgtctggtgcgtttgccgacggttcttctcggccctgtgtctcgggagagtcggctgccgtctgggcctgtgccccacctgcgtgcgcccgggccgagccagccccgccaggtcgcctccgcccggctgccggcccgagcgcgcggctccgggggcggactcccgccgcccagctgacacgcgattcgtcactcttgcagaactttccccctgaaaatccctgcaccagaacccgctctcccgccccggggaggttttgattttagtggctttcttccttttattttccgtcgtgtgcggatttcgctgcagagcgaacttgcggctcgtccgagtacatgtgagcggtaatcgcccctgcagctggttatcctgacattatgcactccgaagcagaagaatccaaggaagtggccacagatgtctttaattccaaaaacctggccgttcaggcacaaaagaagatcttgggtaaaatggtgtccaaatccatcgccaccaccttaatagacgacacaagtagtgaggtgctggatgagctctacagagtgaccagggagtacacccaaaacaagaaggaggcagagaagatcatcaagaacctcatcaagacagtcatcaagctggccattctttataggaataatcagtttaatcaagatgagctagcattgatggagaaatttaagaagaaagttcatcagcttgctatgaccgtggtcagtttccatcaggtggattatacctttgaccggaatgtgttatccaggctgttaaatgaatgcagagagatgctgcaccaaatcattcagcgccacctcactgccaagtcacatggacgggttaataatgtgtttgatcatttttcagattgtgaatttttggctgccttgtataatccttttgggaattttaaaccccacttacaaaaactatgtgatggtatcaacaaaatgttggatgaagagaacatatgagcacatgagttaagattgtgactgatcatgatttatttgaagatggagcactgctgatttatgaaggaaaaaagaagaattttctaaagattacacatatttcagaaagactttacccaattcagttgtcagacataatgatttatttgaaggcttgttttatttgaagaaaagcatattgccaaaaattctggttaaaagcttcctaacgggtaacagaccatgggagagatatgtggttgggtaatgcaaatgtagttatacaaagaaaaatacagatgtctccagacctgaggactttttaatagggcagttgttgtgttggtggcacattggatatttctaacatgtacaaagctatgtattttgatttactttcatttcttgctatgtatatgtacttttcttaaaatgccaagaactttctcttgctatcattgctccttttgaaacaattcaattttcatgtctacagctgactgttttgttaagattgagtcatcgacattcaggatttaagtctgaggtagtcaaccctcaggaaaaaaaaaatggcttatctgaaatcagtactgtggaaatgaactatattagctattatgaataatgtccagtataagaatatgcttctggaattgagttctccttttaagtaccaatgatacttaaatttctcagaaatgtaatggtgtgtcattgccttgaaatgcttgcttagggcttcttttatgttatcttaaaaagtgctggtgaattttccattttttacatccatttcacatgtaagagacaaaaaagtctagattggtcttgatattgagataataaaaagtaagtagcattaagaaaggtaacaatcttcattctacagatgaactcattgaaacaatttaggggaatgaggggcaaaaggggagaaatactgctaaagaacatgagcataaaaatgcgtgcgtttcagtgtttaagaaggcttgataaagaatgtcacttttttatttaactgataagatttttgttattttttactttgataagtaaaccaaagaatatttgtatttcaagcagtttgtgtggtgtttctatataattttctgtgtataaataataaagtaggcatttgtttattttgtaaaaaagaaatgaaaatctgctggccagctatgtcctctaggaaatgacagacccaaccaccagcaataaacatttccattgtc

SEQ ID NO: 33247 - DNA, 1178 bp, Homo sapiens
  source 1..1178: mol_type = unassigned DNA
ggccaagccaaagggctctcacactaagtgaagcttctccattctgtaagctttccgggaacatccaaggcaagactggcacccagcacagcagtgactgaccacataccccactctccaggacccatggagtccttcagctcaaagagcctggcactgcaagcagagaagaagctactgagtaagatggcgggtcgctctgtggctcatctcttcatagatgagacaagcagtgaggtgctagatgagctctaccgtgtgtccaaggagtacacgcacagccggccccaggcccagcgcgtgatcaaggacctgatcaaagtggccatcaaggtggctgtgctgcaccgcaatggctcctttggccccagtgagctggccctggctacccgctttcgccagaagctgcggcagggtgccatgacggcacttagctttggtgaggtagacttcaccttcgaggctgctgttctggctggcctgctgaccgagtgccgggatgtgctgctagagttggtggaacaccacctcacgcccaagtcacatggccgcatccgccacgtgtttgatcacttctctgacccaggtctgctcacggccctctatgggcctgacttcactcagcaccttggcaagatctgtgacggactcaggaagctgctagacgaagggaagctctgagagccctgagcctagcacattccaccttgacaaaatggttgactgagaaaacacagataatgggcttcctaaccctgctcacctggcactaacacttttcaatcttcaggcttcattccttcccaagagtgcttttgactctgagaccagcccacccccaaacagctagtggagaaggagcaatgctgaggggtgaggcctctctcccactccagccccaggacaggaaacagaactgcctgaaaaaggtgaagtgaaacttggatctctatttctcccataagggacttctgaaacagggaagccccctcccatgtgaaccaaggaaaggaggcacagcccagagaacccctttggggatactaaagacagaagaggggaaggtggcccttagagacagagcttggacagatgccagaggctctgttccagagtgcaggaagaaggggctagggcaggggagattctcataggggaaataaaactactaaaatatg

SEQ ID NO: 33248 - DNA, 2362 bp, Homo sapiens
  source 1..2362: mol_type = unassigned DNA
ggcgagcttctcccggcgccgcccgctcggctcccatagcgcccgcgacagcggtccggacgccgcccgaacatggactccgccggccaagatatcaacctgaattctcctaacaaaggtctgctgtctgactccatgacggatgttcctgtcgacacaggtgtggctgcccggactcctgctgttgagggtctgacagaggctgaggaggaggagctcagggctgagcttaccaaggtggaagaggaaattgtcactctgcgccaggtcctggcagccaaggagaggcactgtggagagctcaagaggaggctgggcctctccaccctgggggagctgaaacagaacctgtccaggagctggcatgacgtgcaggtctctagcgcctatgtgaaaacttctgagaaacttggagagtggaatgagaaagtgacccagtcagacctctacaagaagactcaggaaactctttcacaggcaggacagaagacttcagctgccctgtccacagtgggctctgccatcagcaggaagcttggagacatgagggctcatccattttcacactcctttagcagctactccatccgccactcaataagtatgccagccatgaggaactctgcgaccttcaagtcgtttgaggaccgagttgggaccataaagtctaaggttgtgggtgacagagagaacggcagtgacaacctcccttcctcagcggggagtggtgacaagcccctgtcggatcccgcacctttctaagcctgtggttgcttcacccgctgcagagcacacgcaacccagcctcagcatcacagccgcagctctgttcagcggagcagccagccagggcggatgagcagagccggccctgaggacagtcctgcccatccacgcggagatgtggctgccgcgtttgcatgaatttgaagaacacaggcttgtacacagatgttttacactcacgtttgtagatgaaacagatcactgtgctgtccttcctaggggtgcaggaagtggacagggcggagggtttgaaagaatattgagccaaagcccaggctccctttgggaatcatgttagcccatcagaatgttgaaggattgaagagttctaagcataaaataagtggcattttctgacttcttcctcctcctccttccctgactcacagaaggaatgcaatcacccagcaagtcctacctgttacgcaattttttatctcaaaatgccgaacgagaaaactgtccattttctgagacccccagaaaggaaactgaccctcagcagctgcctgattgttacgcgaatctagctttaacggaagcaaattcattattttttaaatgcagtggacttttcaaaaagtttaaattaggcaaagcagctttagcctcatagaatattatttctttggactcaagctgaaatacaagccttacattgccttatgctttatttctttctaatttttatatgtatatagatgagggttccttaatggttgtgagcattgtgtggaattttacacctggcctgcgtggcagcctcttccagttgaggtgttttatgtcacgcacactccatcccagtgtacaaaacctgcttctcttctcaaccgtggcagctcccgctggctcctatgccctgccctaaagggctcttgagcctctgggaatgggaggggccaagagaaggaaaaccctgtctttagcaccctttaaaagaactgtgccccccttctcagtgctgcctttgcatgggcctggcccggctcacattcgtcagtgactccaaccctcctgcttgctgtacttgggatgaaacgaccccacaggtcaggtggagggtggggcgtgggcatcagccaggattgccgttacagtctttttctcaggagctacaaagatctcttcctgttactaaatagtcgcaccccagcagcctctctcgcacaccggggccctgcatgtcagatggcgtggtctgcagggggagctctgtgccttagtggctcttggcaggacactgagggcctgcctgtggtgtgcccggctctgccactcccgggaggggaagggctgctcagctcaaggtgtcctgttcggtagagcaagtgtcctctgacagccgtgtccccggacagttcagacacccttggggatggcactccacacacgacagagatgcaggggccagggaagcccagcgctcggtgcccttcgtccagggttaaaatcggcctgtggggtgtggtgagaaggcaggttgtgcgggtgttgaccgatgtatcttttccttaaagttattataataatgggtaatttgtcaataaagcattcctttgggggaaagtccgcc

SEQ ID NO: 33249 - DNA, 2297 bp, Homo sapiens
  source 1..2297: mol_type = unassigned DNA
acgcggcgagcttctcccggcgccgcccgctcggctcccatagcgcccgcgacagcggtccggacgccgcccgaacatggactccgccggccaagatatcaacctgaattctcctaacaaaggtctgctgtctgactccatgacggatgttcctgtcgacacaggtgtggctgcccggactcctgctgttgagggtctgacagaggctgaggaggaggagctcagggctgagcttaccaaggtggaagaggaaattgtcactctgcgccaggtcctggcagccaaggagaggcactgtggagagctcaagaggaggctgggcctctccaccctgggggagctgaaacagaacctgtccaggagctggcatgacgtgcaggtctctagcgcctatgtgaaaacttctgagaaacttggagagtggaatgagaaagtgacccagtcagacctctacaagaagactcaggaaactctttcacaggcaggacagaagacttcagctgccctgtccacagtgggctctgccatcagcaggaagcttggagacatgaggaactctgcgaccttcaagtcgtttgaggaccgagttgggaccataaagtctaaggttgtgggtgacagagagaacggcagtgacaacctcccttcctcagcggggagtggtgacaagcccctgtcggatcccgcacctttctaagcctgtggttgcttcacccgctgcagagcacacgcaacccagcctcagcatcacagccgcagctctgttcagcggagcagccagccagggcggatgagcagagccggccctgaggacagtcctgcccatccacgcggagatgtggctgccgcgtttgcatgaatttgaagaacacaggcttgtacacagatgttttacactcacgtttgtagatgaaacagatcactgtgctgtccttcctaggggtgcaggaagtggacagggcggagggtttgaaagaatattgagccaaagcccaggctccctttgggaatcatgttagcccatcagaatgttgaaggattgaagagttctaagcataaaataagtggcattttctgacttcttcctcctcctccttccctgactcacagaaggaatgcaatcacccagcaagtcctacctgttacgcaattttttatctcaaaatgccgaacgagaaaactgtccattttctgagacccccagaaaggaaactgaccctcagcagctgcctgattgttacgcgaatctagctttaacggaagcaaattcattattttttaaatgcagtggacttttcaaaaagtttaaattaggcaaagcagctttagcctcatagaatattatttctttggactcaagctgaaatacaagccttacattgccttatgctttatttctttctaatttttatatgtatatagatgagggttccttaatggttgtgagcattgtgtggaattttacacctggcctgcgtggcagcctcttccagttgaggtgttttatgtcacgcacactccatcccagtgtacaaaacctgcttctcttctcaaccgtggcagctcccgctggctcctatgccctgccctaaagggctcttgagcctctgggaatgggaggggccaagagaaggaaaaccctgtctttagcaccctttaaaagaactgtgccccccttctcagtgctgcctttgcatgggcctggcccggctcacattcgtcagtgactccaaccctcctgcttgctgtacttgggatgaaacgaccccacaggtcaggtggagggtggggcgtgggcatcagccaggattgccgttacagtctttttctcaggagctacaaagatctcttcctgttactaaatagtcgcaccccagcagcctctctcgcacaccggggccctgcatgtcagatggcgtggtctgcagggggagctctgtgccttagtggctcttggcaggacactgagggcctgcctgtggtgtgcccggctctgccactcccgggaggggaagggctgctcagctcaaggtgtcctgttcggtagagcaagtgtcctctgacagccgtgtccccggacagttcagacacccttggggatggcactccacacacgacagagatgcaggggccagggaagcccagcgctcggtgcccttcgtccagggttaaaatcggcctgtggggtgtggtgagaaggcaggttgtgcgggtgttgaccgatgtatcttttccttaaagttattataataatgggtaatttgtcaataaagcattcctttgggggaaagtccgcc

SEQ ID NO: 33250 - DNA, 2237 bp, Homo sapiens
  source 1..2237: mol_type = unassigned DNA
acgcggcgagcttctcccggcgccgcccgctcggctcccatagcgcccgcgacagcggtccggacgccgcccgaacatggactccgccggccaagatatcaacctgaattctcctaacaaaggtctgctgtctgactccatgacggatgttcctgtcgacacaggtgtggctgcccggactcctgctgttgagggtctgacagaggctgaggaggaggagctcagggctgagcttaccaaggtggaagaggaaattgtcactctgcgccaggtcctggcagccaaggagaggcactgtggagagctcaagaggaggctgggcctctccaccctgggggagctgaaacagaacctgtccaggagctggcatgacgtgcaggtctctagcgcctacaagaagactcaggaaactctttcacaggcaggacagaagacttcagctgccctgtccacagtgggctctgccatcagcaggaagcttggagacatgaggaactctgcgaccttcaagtcgtttgaggaccgagttgggaccataaagtctaaggttgtgggtgacagagagaacggcagtgacaacctcccttcctcagcggggagtggtgacaagcccctgtcggatcccgcacctttctaagcctgtggttgcttcacccgctgcagagcacacgcaacccagcctcagcatcacagccgcagctctgttcagcggagcagccagccagggcggatgagcagagccggccctgaggacagtcctgcccatccacgcggagatgtggctgccgcgtttgcatgaatttgaagaacacaggcttgtacacagatgttttacactcacgtttgtagatgaaacagatcactgtgctgtccttcctaggggtgcaggaagtggacagggcggagggtttgaaagaatattgagccaaagcccaggctccctttgggaatcatgttagcccatcagaatgttgaaggattgaagagttctaagcataaaataagtggcattttctgacttcttcctcctcctccttccctgactcacagaaggaatgcaatcacccagcaagtcctacctgttacgcaattttttatctcaaaatgccgaacgagaaaactgtccattttctgagacccccagaaaggaaactgaccctcagcagctgcctgattgttacgcgaatctagctttaacggaagcaaattcattattttttaaatgcagtggacttttcaaaaagtttaaattaggcaaagcagctttagcctcatagaatattatttctttggactcaagctgaaatacaagccttacattgccttatgctttatttctttctaatttttatatgtatatagatgagggttccttaatggttgtgagcattgtgtggaattttacacctggcctgcgtggcagcctcttccagttgaggtgttttatgtcacgcacactccatcccagtgtacaaaacctgcttctcttctcaaccgtggcagctcccgctggctcctatgccctgccctaaagggctcttgagcctctgggaatgggaggggccaagagaaggaaaaccctgtctttagcaccctttaaaagaactgtgccccccttctcagtgctgcctttgcatgggcctggcccggctcacattcgtcagtgactccaaccctcctgcttgctgtacttgggatgaaacgaccccacaggtcaggtggagggtggggcgtgggcatcagccaggattgccgttacagtctttttctcaggagctacaaagatctcttcctgttactaaatagtcgcaccccagcagcctctctcgcacaccggggccctgcatgtcagatggcgtggtctgcagggggagctctgtgccttagtggctcttggcaggacactgagggcctgcctgtggtgtgcccggctctgccactcccgggaggggaagggctgctcagctcaaggtgtcctgttcggtagagcaagtgtcctctgacagccgtgtccccggacagttcagacacccttggggatggcactccacacacgacagagatgcaggggccagggaagcccagcgctcggtgcccttcgtccagggttaaaatcggcctgtggggtgtggtgagaaggcaggttgtgcgggtgttgaccgatgtatcttttccttaaagttattataataatgggtaatttgtcaataaagcattcctttgggggaaagtccgcc

SEQ ID NO: 33251 - DNA, 2302 bp, Homo sapiens
  source 1..2302: mol_type = unassigned DNA
ggcgagcttctcccggcgccgcccgctcggctcccatagcgcccgcgacagcggtccggacgccgcccgaacatggactccgccggccaagatatcaacctgaattctcctaacaaaggtctgctgtctgactccatgacggatgttcctgtcgacacaggtgtggctgcccggactcctgctgttgagggtctgacagaggctgaggaggaggagctcagggctgagcttaccaaggtggaagaggaaattgtcactctgcgccaggtcctggcagccaaggagaggcactgtggagagctcaagaggaggctgggcctctccaccctgggggagctgaaacagaacctgtccaggagctggcatgacgtgcaggtctctagcgcctacaagaagactcaggaaactctttcacaggcaggacagaagacttcagctgccctgtccacagtgggctctgccatcagcaggaagcttggagacatgagggctcatccattttcacactcctttagcagctactccatccgccactcaataagtatgccagccatgaggaactctgcgaccttcaagtcgtttgaggaccgagttgggaccataaagtctaaggttgtgggtgacagagagaacggcagtgacaacctcccttcctcagcggggagtggtgacaagcccctgtcggatcccgcacctttctaagcctgtggttgcttcacccgctgcagagcacacgcaacccagcctcagcatcacagccgcagctctgttcagcggagcagccagccagggcggatgagcagagccggccctgaggacagtcctgcccatccacgcggagatgtggctgccgcgtttgcatgaatttgaagaacacaggcttgtacacagatgttttacactcacgtttgtagatgaaacagatcactgtgctgtccttcctaggggtgcaggaagtggacagggcggagggtttgaaagaatattgagccaaagcccaggctccctttgggaatcatgttagcccatcagaatgttgaaggattgaagagttctaagcataaaataagtggcattttctgacttcttcctcctcctccttccctgactcacagaaggaatgcaatcacccagcaagtcctacctgttacgcaattttttatctcaaaatgccgaacgagaaaactgtccattttctgagacccccagaaaggaaactgaccctcagcagctgcctgattgttacgcgaatctagctttaacggaagcaaattcattattttttaaatgcagtggacttttcaaaaagtttaaattaggcaaagcagctttagcctcatagaatattatttctttggactcaagctgaaatacaagccttacattgccttatgctttatttctttctaatttttatatgtatatagatgagggttccttaatggttgtgagcattgtgtggaattttacacctggcctgcgtggcagcctcttccagttgaggtgttttatgtcacgcacactccatcccagtgtacaaaacctgcttctcttctcaaccgtggcagctcccgctggctcctatgccctgccctaaagggctcttgagcctctgggaatgggaggggccaagagaaggaaaaccctgtctttagcaccctttaaaagaactgtgccccccttctcagtgctgcctttgcatgggcctggcccggctcacattcgtcagtgactccaaccctcctgcttgctgtacttgggatgaaacgaccccacaggtcaggtggagggtggggcgtgggcatcagccaggattgccgttacagtctttttctcaggagctacaaagatctcttcctgttactaaatagtcgcaccccagcagcctctctcgcacaccggggccctgcatgtcagatggcgtggtctgcagggggagctctgtgccttagtggctcttggcaggacactgagggcctgcctgtggtgtgcccggctctgccactcccgggaggggaagggctgctcagctcaaggtgtcctgttcggtagagcaagtgtcctctgacagccgtgtccccggacagttcagacacccttggggatggcactccacacacgacagagatgcaggggccagggaagcccagcgctcggtgcccttcgtccagggttaaaatcggcctgtggggtgtggtgagaaggcaggttgtgcgggtgttgaccgatgtatcttttccttaaagttattataataatgggtaatttgtcaataaagcattcctttgggggaaagtccgcc

SEQ ID NO: 33252 - DNA, 2339 bp, Homo sapiens
  source 1..2339: mol_type = unassigned DNA
acgcggcgagcttctcccggcgccgcccgctcggctcccatagcgcccgcgacagcggtccggacgccgcccgaacatggactccgccggccaagatatcaacctgaattctcctaacaaaggtctgctgtctgactccatgacggatgttcctgtcgacacaggtgtggctgcccggactcctgctgttgagggtctgacagaggctgaggaggaggagctcagggctgagcttaccaaggtggaagaggaaattgtcactctgcgccaggtcctggcagccaaggagaggcactgtggagagctcaagaggaggctgggcctctccaccctgggggagctgaaacagaacctgtccaggagctggcatgacgtgcaggtctctagcgcctatgtgaaaacttctgagaaacttggagagtggaatgagaaagtgacccagtcagacctctacaagaagactcaggaaactctttcacaggcaggacagaagacttcagctgccctgtccacagtgggctctgccatcagcaggaagcttggagacatgagcagctactccatccgccactcaataagtatgccagccatgaggaactctgcgaccttcaagtcgtttgaggaccgagttgggaccataaagtctaaggttgtgggtgacagagagaacggcagtgacaacctcccttcctcagcggggagtggtgacaagcccctgtcggatcccgcacctttctaagcctgtggttgcttcacccgctgcagagcacacgcaacccagcctcagcatcacagccgcagctctgttcagcggagcagccagccagggcggatgagcagagccggccctgaggacagtcctgcccatccacgcggagatgtggctgccgcgtttgcatgaatttgaagaacacaggcttgtacacagatgttttacactcacgtttgtagatgaaacagatcactgtgctgtccttcctaggggtgcaggaagtggacagggcggagggtttgaaagaatattgagccaaagcccaggctccctttgggaatcatgttagcccatcagaatgttgaaggattgaagagttctaagcataaaataagtggcattttctgacttcttcctcctcctccttccctgactcacagaaggaatgcaatcacccagcaagtcctacctgttacgcaattttttatctcaaaatgccgaacgagaaaactgtccattttctgagacccccagaaaggaaactgaccctcagcagctgcctgattgttacgcgaatctagctttaacggaagcaaattcattattttttaaatgcagtggacttttcaaaaagtttaaattaggcaaagcagctttagcctcatagaatattatttctttggactcaagctgaaatacaagccttacattgccttatgctttatttctttctaatttttatatgtatatagatgagggttccttaatggttgtgagcattgtgtggaattttacacctggcctgcgtggcagcctcttccagttgaggtgttttatgtcacgcacactccatcccagtgtacaaaacctgcttctcttctcaaccgtggcagctcccgctggctcctatgccctgccctaaagggctcttgagcctctgggaatgggaggggccaagagaaggaaaaccctgtctttagcaccctttaaaagaactgtgccccccttctcagtgctgcctttgcatgggcctggcccggctcacattcgtcagtgactccaaccctcctgcttgctgtacttgggatgaaacgaccccacaggtcaggtggagggtggggcgtgggcatcagccaggattgccgttacagtctttttctcaggagctacaaagatctcttcctgttactaaatagtcgcaccccagcagcctctctcgcacaccggggccctgcatgtcagatggcgtggtctgcagggggagctctgtgccttagtggctcttggcaggacactgagggcctgcctgtggtgtgcccggctctgccactcccgggaggggaagggctgctcagctcaaggtgtcctgttcggtagagcaagtgtcctctgacagccgtgtccccggacagttcagacacccttggggatggcactccacacacgacagagatgcaggggccagggaagcccagcgctcggtgcccttcgtccagggttaaaatcggcctgtggggtgtggtgagaaggcaggttgtgcgggtgttgaccgatgtatcttttccttaaagttattataataatgggtaatttgtcaataaagcattcctttgggggaaagtccgcc

SEQ ID NO: 33253 - DNA, 2275 bp, Homo sapiens
  source 1..2275: mol_type = unassigned DNA
ggcgagcttctcccggcgccgcccgctcggctcccatagcgcccgcgacagcggtccggacgccgcccgaacatggactccgccggccaagatatcaacctgaattctcctaacaaaggtctgctgtctgactccatgacggatgttcctgtcgacacaggtgtggctgcccggactcctgctgttgagggtctgacagaggctgaggaggaggagctcagggctgagcttaccaaggtggaagaggaaattgtcactctgcgccaggtcctggcagccaaggagaggcactgtggagagctcaagaggaggctgggcctctccaccctgggggagctgaaacagaacctgtccaggagctggcatgacgtgcaggtctctagcgcctacaagaagactcaggaaactctttcacaggcaggacagaagacttcagctgccctgtccacagtgggctctgccatcagcaggaagcttggagacatgagcagctactccatccgccactcaataagtatgccagccatgaggaactctgcgaccttcaagtcgtttgaggaccgagttgggaccataaagtctaaggttgtgggtgacagagagaacggcagtgacaacctcccttcctcagcggggagtggtgacaagcccctgtcggatcccgcacctttctaagcctgtggttgcttcacccgctgcagagcacacgcaacccagcctcagcatcacagccgcagctctgttcagcggagcagccagccagggcggatgagcagagccggccctgaggacagtcctgcccatccacgcggagatgtggctgccgcgtttgcatgaatttgaagaacacaggcttgtacacagatgttttacactcacgtttgtagatgaaacagatcactgtgctgtccttcctaggggtgcaggaagtggacagggcggagggtttgaaagaatattgagccaaagcccaggctccctttgggaatcatgttagcccatcagaatgttgaaggattgaagagttctaagcataaaataagtggcattttctgacttcttcctcctcctccttccctgactcacagaaggaatgcaatcacccagcaagtcctacctgttacgcaattttttatctcaaaatgccgaacgagaaaactgtccattttctgagacccccagaaaggaaactgaccctcagcagctgcctgattgttacgcgaatctagctttaacggaagcaaattcattattttttaaatgcagtggacttttcaaaaagtttaaattaggcaaagcagctttagcctcatagaatattatttctttggactcaagctgaaatacaagccttacattgccttatgctttatttctttctaatttttatatgtatatagatgagggttccttaatggttgtgagcattgtgtggaattttacacctggcctgcgtggcagcctcttccagttgaggtgttttatgtcacgcacactccatcccagtgtacaaaacctgcttctcttctcaaccgtggcagctcccgctggctcctatgccctgccctaaagggctcttgagcctctgggaatgggaggggccaagagaaggaaaaccctgtctttagcaccctttaaaagaactgtgccccccttctcagtgctgcctttgcatgggcctggcccggctcacattcgtcagtgactccaaccctcctgcttgctgtacttgggatgaaacgaccccacaggtcaggtggagggtggggcgtgggcatcagccaggattgccgttacagtctttttctcaggagctacaaagatctcttcctgttactaaatagtcgcaccccagcagcctctctcgcacaccggggccctgcatgtcagatggcgtggtctgcagggggagctctgtgccttagtggctcttggcaggacactgagggcctgcctgtggtgtgcccggctctgccactcccgggaggggaagggctgctcagctcaaggtgtcctgttcggtagagcaagtgtcctctgacagccgtgtccccggacagttcagacacccttggggatggcactccacacacgacagagatgcaggggccagggaagcccagcgctcggtgcccttcgtccagggttaaaatcggcctgtggggtgtggtgagaaggcaggttgtgcgggtgttgaccgatgtatcttttccttaaagttattataataatgggtaatttgtcaataaagcattcctttgggggaaagtccgcc

SEQ ID NO: 33254 - DNA, 1063 bp, Homo sapiens
  source 1..1063: mol_type = unassigned DNA
gattacgaaacgccgcggagctgaggcagttccgctggctagtgtgtacgcggcgagcttctcccggcgccgcccgctcggctcccatagcgcccgcgacagcggtccggacgccgcccgaacatggactccgccggccaaggtgtggctgcccggactcctgctgttgagggtctgacagaggctgaggaggaggagctcagggctgagcttaccaaggtggaagaggaaattgtcactctgcgccaggtcctggcagccaaggagaggcactgtggagagctcaagaggaggctgggcctctccaccctgggggagctgaaacagaacctgtccaggagctggcatgacgtgcaggtctctagcgcctacaagaagactcaggaaactctttcacaggcaggacagaagacttcagctgccctgtccacagtgggctctgccatcagcaggaagcttggagacatgaggaactctgcgaccttcaagtcgtttgaggaccgagttgggaccataaagtctaaggttgtgggtgacagagagaacggcagtgacaacctcccttcctcagcggggagtggtgacaagcccctgtcggatcccgcacctttctaagcctgtggttgcttcacccgctgcagagcacacgcaacccagcctcagcatcacagccgcagctctgttcagcggagcagccagccagggcggatgagcagagccggccctgaggacagtcctgcccatgaatttgaagaacacaggcttgtacacagatgttttacactcacgtttgtagatgaaacagatcactgtgctgtccttcctaggggtgcaggaagtggacagggcggagggtttgaaagaatattgagccaaagcccaggctccctttgggaatcatgttagcccatcagaatgttgaaggattgaagagttctaagcataaaataagtggcattttctgacttcttcctcctcctccttccctgactcacagaaggaatgcaatcacccagcaagtcctacctgttacgcaattttttatctcaaaatgccgaacgag

SEQ ID NO: 33255 - DNA, 4651 bp, Homo sapiens
  source 1..4651: mol_type = unassigned DNA
gctggggcccgacccgggattagttggtttcggagcggaggagggagccccgaccgtcacgagcgtcgaagagacaaagccgcgtcagggggcccggccggggcgggggagcccggggcttgttggtgccccagcccgcgcggagggcccttcggacccgcgcgccgccgctgccgccgccgccgcctcgcaacaggtccgggcggcctcgctctccgctcccctcccccgcatccgcgaccctccggggcacctcagctcggccggggccgcagtctggccacccgcttccatgcggttcgggtccaagatgatgccgatgtttcttaccgtgtatctcagtaacaatgagcagcacttcacagaagttccagttactccagaaacaatatgcagagacgtggtggatctgtgcaaagaacccggcgagagtgattgccatttggctgaagtgtggtgtggctctgaacgtccagttgcggataatgagcgaatgtttgatgttcttcaacgatttggaagtcagaggaacgaagttcgcttcttccttcgtcatgaacgcccccctggcagggacattgtgagtggaccaagatctcaggatccaagtttaaaaagaaatggtgtaaaagttcctggtgaatatcgaagaaaggagaacggtgttaatagtcctaggatggatctgactcttgctgaacttcaggaaatggcatctcgccagcagcaacagattgaagcccagcaacaattgctggcaactaaggaacagcgcttaaagtttttgaaacaacaagatcagcgacaacagcaacaagttgctgagcaggagaaacttaaaaggctaaaagaaatagctgagaatcaggaagctaagctaaaaaaagtgagagcacttaaaggccacgtggaacagaagagactaagcaatgggaaacttgtggaggaaattgaacagatgaataatttgttccagcaaaaacagagggagctcgtcctggctgtgtcaaaagtagaagaactgaccaggcagctagagatgctcaagaacggcaggatcgacagccaccatgacaatcagtctgcagtggctgagcttgatcgcctctataaggagctgcagctaagaaacaaattgaatcaagagcagaatgccaagctacaacaacagagggagtgtttgaataagcgtaattcagaagtggcagtcatggataagcgtgttaatgagctgagggaccggctgtggaagaagaaggcagctctacagcaaaaagaaaatctaccagtttcatctgatggaaatcttccccagcaagccgcgtcagccccaagccgtgtggctgcagtaggtccctatatccagtcgtctactatgcctcggatgccctcaaggcctgaattgctggtgaagccagccctgccggatggttccttggtcattcaggcttcagaggggccgatgaaaatacagacactgcccaacatgagatctggggctgcttcacaaactaaaggctctaaaatccatccagttggccctgattggagtccttcaaatgcagatcttttcccaagccaaggctctgcttctgtacctcaaagcactgggaatgctctggatcaagttgatgatggagaggttccgctgagggagaaagagaagaaagtgcgtccgttctcaatgtttgatgcagtagaccagtccaatgccccaccttcctttggtactctgaggaagaaccagagcagtgaagatatcttgcgggatgctcaggttgcaaataaaaatgtggctaaagtaccacctcctgttcctacaaaaccaaaacagattaatttgccttattttggacaaactaatcagccaccttcagacattaagccagacggaagttctcagcagttgtcaacagttgttccgtccatgggaactaaaccaaaaccagcagggcagcagccgagagtgctgctatctcccagcataccttcggttggccaagaccagaccctttctccaggttctaagcaagaaagtccacctgctgctgccgtccggccctttactccccagccttccaaagacaccttacttccacccttcagaaaaccccagaccgtggcagcaagttcaatatattccatgtatacgcaacagcaggcgccaggaaaaaacttccagcaggctgtgcagagcgcgttgaccaagactcataccagagggccacacttttcaagtgtatatggtaagcctgtaattgctgctgcccagaatcaacagcagcacccagagaacatttattccaatagccagggcaagcctggcagtccagaacctgaaacagagcctgtttcttcagttcaggagaaccatgaaaacgaaagaattcctcggccactcagcccaactaaattactgcctttcttatctaatccttaccgaaaccagagtgatgctgacctagaagccttacgaaagaaactgtctaacgcaccaaggcctctaaagaaacgtagttctattacagagccagagggtcctaatgggccaaatattcagaagcttttatatcagaggaccaccatagcggccatggagaccatctctgtcccatcatacccatccaagtcagcttctgtgactgccagctcagaaagcccagtagaaatccagaatccatatttacatgtggagcccgaaaaggaggtggtctctctggttcctgaatcattgtccccagaggatgtggggaatgccagtacagagaacagtgacatgccagctccttctccaggccttgattatgagcctgagggagtcccagacaacagcccaaatctccagaataacccagaagaaccaaatccagaggctccacatgtgcttgatgtgtacctggaggagtaccctccatacccacccccaccatacccatctggggagcctgaagggcccggagaagactcggtgagcatgcgcccgcctgaaatcaccgggcaggtctctctgcctcctggtaaaaggacaaacttgcgtaaaactggctcagagcgtatcgctcatggaatgagggtgaaattcaacccccttgctttactgctagattcgtctttggagggagaatttgaccttgtacagagaattatttatgaggttgatgacccaagcctccccaatgatgaaggcatcacggctcttcacaatgctgtgtgtgcaggccacacagaaatcgttaagttcctggtacagtttggtgtaaatgtaaatgctgctgatagtgatggatggactccattacattgtgctgcctcatgtaacaacgtccaagtgtgtaagtttttggtggagtcaggagccgctgtgtttgccatgacctacagtgacatgcagactgctgcagataagtgcgaggaaatggaggaaggctacactcagtgctcccaatttctttatggagttcaggagaagatgggcataatgaataaaggagtcatttatgcgctttgggattatgaacctcagaatgatgatgagctgcccatgaaagaaggagactgcatgacaatcatccacagggaagacgaagatgaaatcgaatggtggtgggcgcgccttaatgataaggagggatatgttccacgtaacttgctgggactgtacccaagaattaaaccaagacaaaggagcttggcctgaaacttccacacagaattttagtcaatgaagaattaatctctgttaagaagaagtaatacgattatttttggcaaaaatttcacaagacttattttaatgacaatgtagcttgaaagcgatgaagaatgtctctagaagagaatgaaggattgaagaattcaccattagaggacatttagcgtgatgaaataaagcatctacgtcagcaggccatactgtgttggggcaaaggtgtcccgtgtagcactcagataagtatacagcgacaatcctgttttctacaagaatcctgtctagtaaataggatcatttattgggcagttgggaaatcagctctctgtcctgttgagtgttttcagcagctgctcctaaaccagtcctcctgccagaaaggaccagtgccgtcacatcgctgtctctgattgtccccggcaccagcaggcccttggggggctcacctgaaggctcgaaggcactgcacacttgtatattgtcagtgaagaactgttagttggttgtcagtgaacaataactttattatatgagtttttgtagcatcttaagaattatacatatgtttgaaatattgaaactaagctacggtaccagtaattagatgtagaatcttgtttgtaggctgaattttaatctgtatttattgtcttttgtatctcagaaattagaaacttgctacagacttacccgtaatatttgtcaagatcatagctgactttaaaaacagttgtaataaactttttgatgctagctgtttactggtttttgtttttgatgtcataaatagaccttgtttaatagtcacaagccgttgggatatcatacccagctgaaaaagaacaaactgcttaacataagtatatgtatcgtaataagagttttttaccagctaagtgattcaatgtaagtggtttttaaaataaaatactgtagagatca

SEQ ID NO: 33256 - DNA, 4741 bp, Homo sapiens
  source 1..4741: mol_type = unassigned DNA
gggagccccgaccgtcacgagcgtcgaagagacaaagccgcgtcagggggcccggccggggcgggggagcccggggcttgttggtgccccagcccgcgcggagggcccttcggacccgcgcgccgccgctgccgccgccgccgcctcgcaacaggtccgggcggcctcgctctccgctcccctcccccgcatccgcgaccctccggggcacctcagctcggccggggccgcagtctggccacccgcttccatgcggttcgggtccaagatgatgccgatgtttcttaccgtgtatctcagtaacaatgagcagcacttcacagaagttccagttactccagaaacaatatgcagagacgtggtggatctgtgcaaagaacccggcgagagtgattgccatttggctgaagtgtggtgtggctctgtagagatagagtttcatcatgttggccaggatggtctcgatctcctgaccttgtgatccgcctgcctcggcctcccaaagtgctggattacaggtgtgagccaccacgatcagcctctagtgtttaaaaaagaacgtccagttgcggataatgagcgaatgtttgatgttcttcaacgatttggaagtcagaggaacgaagttcgcttcttccttcgtcatgaacgcccccctggcagggacattgtgagtggaccaagatctcaggatccaagtttaaaaagaaatggtgtaaaagttcctggtgaatatcgaagaaaggagaacggtgttaatagtcctaggatggatctgactcttgctgaacttcaggaaatggcatctcgccagcagcaacagattgaagcccagcaacaattgctggcaactaaggaacagcgcttaaagtttttgaaacaacaagatcagcgacaacagcaacaagttgctgagcaggagaaacttaaaaggctaaaagaaatagctgagaatcaggaagctaagctaaaaaaagtgagagcacttaaaggccacgtggaacagaagagactaagcaatgggaaacttgtggaggaaattgaacagatgaataatttgttccagcaaaaacagagggagctcgtcctggctgtgtcaaaagtagaagaactgaccaggcagctagagatgctcaagaacggcaggatcgacagccaccatgacaatcagtctgcagtggctgagcttgatcgcctctataaggagctgcagctaagaaacaaattgaatcaagagcagaatgccaagctacaacaacagagggagtgtttgaataagcgtaattcagaagtggcagtcatggataagcgtgttaatgagctgagggaccggctgtggaagaagaaggcagctctacagcaaaaagaaaatctaccagtttcatctgatggaaatcttccccagcaagccgcgtcagccccaagccgtgtggctgcagtaggtccctatatccagtcgtctactatgcctcggatgccctcaaggcctgaattgctggtgaagccagccctgccggatggttccttggtcattcaggcttcagaggggccgatgaaaatacagacactgcccaacatgagatctggggctgcttcacaaactaaaggctctaaaatccatccagttggccctgattggagtccttcaaatgcagatcttttcccaagccaaggctctgcttctgtacctcaaagcactgggaatgctctggatcaagttgatgatggagaggttccgctgagggagaaagagaagaaagtgcgtccgttctcaatgtttgatgcagtagaccagtccaatgccccaccttcctttggtactctgaggaagaaccagagcagtgaagatatcttgcgggatgctcaggttgcaaataaaaatgtggctaaagtaccacctcctgttcctacaaaaccaaaacagattaatttgccttattttggacaaactaatcagccaccttcagacattaagccagacggaagttctcagcagttgtcaacagttgttccgtccatgggaactaaaccaaaaccagcagggcagcagccgagagtgctgctatctcccagcataccttcggttggccaagaccagaccctttctccaggttctaagcaagaaagtccacctgctgctgccgtccggccctttactccccagccttccaaagacaccttacttccacccttcagaaaaccccagaccgtggcagcaagttcaatatattccatgtatacgcaacagcaggcgccaggaaaaaacttccagcaggctgtgcagagcgcgttgaccaagactcataccagagggccacacttttcaagtgtatatggtaagcctgtaattgctgctgcccagaatcaacagcagcacccagagaacatttattccaatagccagggcaagcctggcagtccagaacctgaaacagagcctgtttcttcagttcaggagaaccatgaaaacgaaagaattcctcggccactcagcccaactaaattactgcctttcttatctaatccttaccgaaaccagagtgatgctgacctagaagccttacgaaagaaactgtctaacgcaccaaggcctctaaagaaacgtagttctattacagagccagagggtcctaatgggccaaatattcagaagcttttatatcagaggaccaccatagcggccatggagaccatctctgtcccatcatacccatccaagtcagcttctgtgactgccagctcagaaagcccagtagaaatccagaatccatatttacatgtggagcccgaaaaggaggtggtctctctggttcctgaatcattgtccccagaggatgtggggaatgccagtacagagaacagtgacatgccagctccttctccaggccttgattatgagcctgagggagtcccagacaacagcccaaatctccagaataacccagaagaaccaaatccagaggctccacatgtgcttgatgtgtacctggaggagtaccctccatacccacccccaccatacccatctggggagcctgaagggcccggagaagactcggtgagcatgcgcccgcctgaaatcaccgggcaggtctctctgcctcctggtaaaaggacaaacttgcgtaaaactggctcagagcgtatcgctcatggaatgagggtgaaattcaacccccttgctttactgctagattcgtctttggagggagaatttgaccttgtacagagaattatttatgaggttgatgacccaagcctccccaatgatgaaggcatcacggctcttcacaatgctgtgtgtgcaggccacacagaaatcgttaagttcctggtacagtttggtgtaaatgtaaatgctgctgatagtgatggatggactccattacattgtgctgcctcatgtaacaacgtccaagtgtgtaagtttttggtggagtcaggagccgctgtgtttgccatgacctacagtgacatgcagactgctgcagataagtgcgaggaaatggaggaaggctacactcagtgctcccaatttctttatggagttcaggagaagatgggcataatgaataaaggagtcatttatgcgctttgggattatgaacctcagaatgatgatgagctgcccatgaaagaaggagactgcatgacaatcatccacagggaagacgaagatgaaatcgaatggtggtgggcgcgccttaatgataaggagggatatgttccacgtaacttgctgggactgtacccaagaattaaaccaagacaaaggagcttggcctgaaacttccacacagaattttagtcaatgaagaattaatctctgttaagaagaagtaatacgattatttttggcaaaaatttcacaagacttattttaatgacaatgtagcttgaaagcgatgaagaatgtctctagaagagaatgaaggattgaagaattcaccattagaggacatttagcgtgatgaaataaagcatctacgtcagcaggccatactgtgttggggcaaaggtgtcccgtgtagcactcagataagtatacagcgacaatcctgttttctacaagaatcctgtctagtaaataggatcatttattgggcagttgggaaatcagctctctgtcctgttgagtgttttcagcagctgctcctaaaccagtcctcctgccagaaaggaccagtgccgtcacatcgctgtctctgattgtccccggcaccagcaggcccttggggggctcacctgaaggctcgaaggcactgcacacttgtatattgtcagtgaagaactgttagttggttgtcagtgaacaataactttattatatgagtttttgtagcatcttaagaattatacatatgtttgaaatattgaaactaagctacggtaccagtaattagatgtagaatcttgtttgtaggctgaattttaatctgtatttattgtcttttgtatctcagaaattagaaacttgctacagacttacccgtaatatttgtcaagatcatagctgactttaaaaacagttgtaataaactttttgatgctagctgtttactggtttttgtttttgatgtcataaatagaccttgtttaatagtcacaagccgttgggatatcatacccagctgaaaaagaacaaactgcttaacataagtatatgtatcgtaataagagttttttaccagctaagtgattcaatgtaagtggtttttaaaataaaatactgtagagatca

SEQ ID NO: 33257 - DNA, 1841 bp, Homo sapiens
  source 1..1841: mol_type = unassigned DNA
aaagcactgggaatgctctggatcaagttgatgatggagaggttccgctgagggagaaagagaagaaagtgcgtccgttctcaatgtttgatgcagtagaccagtccaatgccccaccttcctttggtactctgaggaagaaccagagcagtgaagatatcttgcgggatgctcagtatatggtaagcctgtaattgctgctgcccagaatcaacagcagcacccagagaacatttattccaatagccagggcaagcctggcagtccagaacctgaaacagagcctgtttcttcagttcaggagaaccatgaaaacgaaagaattcctcggccactcagcccaactaaattactgcctttcttatctaatccttaccgaaaccagagtgatgctgacctagaagccttacgaaagaaactgtctaacgcaccaaggcctctaaagaaacgtagttctattacagagccagagggtcctaatgggccaaatattcagaagcttttatatcagaggaccaccatagcggccatggagaccatctctgtcccatcatacccatccaagtcagcttctgtgactgccagctcagaaagcccagtagaaatccagaatccatatttacatgtggagcccgaaaaggaggtggtctctctggttcctgaatcattgtccccagaggatgtggggaatgccagtacagagaacagtgacatgccagctccttctccaggccttgattatgagcctgagggagtcccagacaacagcccaaatctccagaataacccagaagaaccaaatccagaggctccacatgtgcttgatgtgtacctggaggagtaccctccatacccacccccaccatacccatctggggagcctgaagggcccggagaagactcggtgagcatgcgcccgcctgaaatcaccgggcaggtctctctgcctcctggtaaaaggacaaacttgcgtaaaactggctcagagcgtatcgctcatggaatgagggtgaaattcaacccccttgctttactgctagattcgtctttggagggagaatttgaccttgtacagagaattatttatgaggttgatgacccaagcctccccaatgatgaaggcatcacggctcttcacaatgctgtgtgtgcaggccacacagaaatcgttaagttcctggtacagtttggtgtaaatgtaaatgctgctgatagtgatggatggactccattacattgtgctgcctcatgtaacaacgtccaagtgtgtaagtttttggtggagtcaggagccgctgtgtttgccatgacctacagtgacatgcagactgctgcagataagtgcgaggaaatggaggaaggctacactcagtgctcccaatttctttatggagttcaggagaagatgggcataatgaataaaggagtcatttatgcgctttgggattatgaacctcagaatgatgatgagctgcccatgaaagaaggagactgcatgacaatcatccacagggaagacgaagatgaaatcgaatggtggtgggcgcgccttaatgataaggagggatatgttccacgtaacttgctgggactgtacccaagaattaaaccaagacaaaggagcttggcctgaaacttccacacagaattttagtcaatgaagaattaatctctgttaagaagaagtaatacgattatttttggcaaaaatttcacaagacttattttaatgacaatgtagcttgaaagcgatgaagaatgtctctagaagagaatgaaggattgaagaattcaccattagaggacatttagcgtgatgaaataaagcatctacgtcagca

SEQ ID NO: 33258 - DNA, 4909 bp, Homo sapiens
  source 1..4909: mol_type = unassigned DNA
cccggctttatatctatatatacacaggtatatgtgtatattttatataattgttctccgttcgttgatatcaaagacagttgaaggaaatgaattttgaaacttcacggtgtgccaccctacagtactgccctgacccttacatccagcgtttcgtagaaaccccagctcatttctcttggaaagaaagttattaccgatccaccatgtcccagagcacacagacaaatgaattcctcagtccagaggttttccagcatatctgggattttctggaacagcctatatgttcagttcagcccattgacttgaactttgtggatgaaccatcagaagatggtgcgacaaacaagattgagattagcatggactgtatccgcatgcaggactcggacctgagtgaccccatgtggccacagtacacgaacctggggctcctgaacagcatggaccagcagattcagaacggctcctcgtccaccagtccctataacacagaccacgcgcagaacagcgtcacggcgccctcgccctacgcacagcccagctccaccttcgatgctctctctccatcacccgccatcccctccaacaccgactacccaggcccgcacagtttcgacgtgtccttccagcagtcgagcaccgccaagtcggccacctggacgtattccactgaactgaagaaactctactgccaaattgcaaagacatgccccatccagatcaaggtgatgaccccacctcctcagggagctgttatccgcgccatgcctgtctacaaaaaagctgagcacgtcacggaggtggtgaagcggtgccccaaccatgagctgagccgtgaattcaacgagggacagattgcccctcctagtcatttgattcgagtagaggggaacagccatgcccagtatgtagaagatcccatcacaggaagacagagtgtgctggtaccttatgagccaccccaggttggcactgaattcacgacagtcttgtacaatttcatgtgtaacagcagttgtgttggagggatgaaccgccgtccaattttaatcattgttactctggaaaccagagatgggcaagtcctgggccgacgctgctttgaggcccggatctgtgcttgcccaggaagagacaggaaggcggatgaagatagcatcagaaagcagcaagtttcggacagtacaaagaacggtgatggtacgaagcgcccgtttcgtcagaacacacatggtatccagatgacatccatcaagaaacgaagatccccagatgatgaactgttatacttaccagtgaggggccgtgagacttatgaaatgctgttgaagatcaaagagtccctggaactcatgcagtaccttcctcagcacacaattgaaacgtacaggcaacagcaacagcagcagcaccagcacttacttcagaaacagacctcaatacagtctccatcttcatatggtaacagctccccacctctgaacaaaatgaacagcatgaacaagctgccttctgtgagccagcttatcaaccctcagcagcgcaacgccctcactcctacaaccattcctgatggcatgggagccaacattcccatgatgggcacccacatgccaatggctggagacatgaatggactcagccccacccaggcactccctcccccactctccatgccatccacctcccactgcacacccccacctccgtatcccacagattgcagcattgtcagtttcttagcgaggttgggctgttcatcatgtctggactatttcacgacccaggggctgaccaccatctatcagattgagcattactccatggatgatctggcaagtctgaaaatccctgagcaatttcgacatgcgatctggaagggcatcctggaccaccggcagctccacgaattctcctccccttctcatctcctgcggaccccaagcagtgcctctacagtcagtgtgggctccagtgagacccggggtgagcgtgttattgatgctgtgcgattcaccctccgccagaccatctctttcccaccccgagatgagtggaatgacttcaactttgacatggatgctcgccgcaataagcaacagcgcatcaaagaggagggggagtgagcctcaccatgtgagctcttcctatccctctcctaactgccagccccctaaaagcactcctgcttaatcttcaaagccttctccctagctcctccccttcctcttgtctgatttcttaggggaaggagaagtaagaggctacctcttacctaacatctgacctggcatctaattctgattctggctttaagccttcaaaactatagcttgcagaactgtagctgccatggctaggtagaagtgagcaaaaaagagttgggtgtctccttaagctgcagagatttctcattgacttttataaagcatgttcacccttatagtctaagactatatatataaatgtataaatatacagtatagatttttgggtggggggcattgagtattgtttaaaatgtaatttaaatgaaagaaaattgagttgcacttattgaccattttttaatttacttgttttggatggcttgtctatactccttcccttaaggggtatcatgtatggtgataggtatctagagcttaatgctacatgtgagtgacgatgatgtacagattctttcagttctttggattctaaatacatgccacatcaaacctttgagtagatccatttccattgcttattatgtaggtaagactgtagatatgtattcttttctcagtgttggtatattttatattactgacatttcttctagtgatgatggttcacgttggggtgatttaatccagttataagaagaagttcatgtccaaacgtcctctttagtttttggttgggaatgaggaaaattcttaaaaggcccatagcagccagttcaaaaacacccgacgtcatgtatttgagcatatcagtaacccccttaaatttaataccagataccttatcttacaatattgattgggaaaacatttgctgccattacagaggtattaaaactaaatttcactactagattgactaactcaaatacacatttgctactgttgtaagaattctgattgatttgattgggatgaatgccatctatctagttctaacagtgaagttttactgtctattaatattcagggtaaataggaatcattcagaaatgttgagtctgtactaaacagtaagatatctcaatgaaccataaattcaactttgtaaaaatcttttgaagcatagataatattgtttggtaaatgtttcttttgtttggtaaatgtttcttttaaagaccctcctattctataaaactctgcatgtagaggcttgtttacctttctctctctaaggtttacaataggagtggtgatttgaaaaatataaaattatgagattggttttcctgtggcataaattgcatcactgtatcattttcttttttaaccggtaagagtttcagtttgttggaaagtaactgtgagaacccagtttcccgtccatctcccttagggactacccatagacatgaaaggtccccacagagcaagagataagtctttcatggctgctgttgcttaaaccacttaaacgaagagttcccttgaaactttgggaaaacatgttaatgacaatattccagatctttcagaaatataacacatttttttgcatgcatgcaaatgagctctgaaatcttcccatgcattctggtcaagggctgtcattgcacataagcttccattttaattttaaagtgcaaaagggccagcgtggctctaaaaggtaatgtgtggattgcctctgaaaagtgtgtatatattttgtgtgaaattgcatactttgtattttgattattttttttttcttcttgggatagtgggatttccagaaccacacttgaaacctttttttatcgtttttgtattttcatgaaaataccatttagtaagaataccacatcaaataagaaataatgctacaattttaagaggggagggaagggaaagtttttttttattatttttttaaaattttgtatgttaaagagaatgagtccttgatttcaaagttttgttgtacttaaatggtaataagcactgtaaacttctgcaacaagcatgcagctttgcaaacccattaaggggaagaatgaaagctgttccttggtcctagtaagaagacaaactgcttcccttactttgctgagggtttgaataaacctaggacttccgagctatgtcagtactattcaggtaacactagggccttggaaattcctgtactgtgtctcatggatttggcactagccaaagcgaggcacccttactggcttacctcctcatggcagcctactctccttgagtgtatgagtagccagggtaaggggtaaaaggatagtaagcatagaaaccactagaaagtgggcttaatggagttcttgtggcctcagctcaatgcagttagctgaagaattgaaaagtttttgtttggagacgtttataaacagaaatggaaagcagagttttcattaaatccttttaccttttttttttcttggtaatcccctaaaataacagtatgtgggatattgaatgttaaagggatatttttttctattatttttataattgtacaaaattaagcaaatgttaaaagttttatatgctttattaatgttttcaaaaggtattatacatgtgatacattttttaagcttcagttgcttgtcttctggtactttctgttatgggcttttggggagccagaagccaatctacaatctctttttgtttgccaggacatgcaataaaatttaaaaaataaataaaaactaattaagaaattg

SEQ ID NO: 33259 - DNA, 2032 bp, Homo sapiens
  source 1..2032: mol_type = unassigned DNA
tcgttgatatcaaagacagttgaaggaaatgaattttgaaacttcacggtgtgccaccctacagtactgccctgacccttacatccagcgtttcgtagaaaccccagctcatttctcttggaaagaaagttattaccgatccaccatgtcccagagcacacagacaaatgaattcctcagtccagaggttttccagcatatctgggattttctggaacagcctatatgttcagttcagcccattgacttgaactttgtggatgaaccatcagaagatggtgcgacaaacaagattgagattagcatggactgtatccgcatgcaggactcggacctgagtgaccccatgtggccacagtacacgaacctggggctcctgaacagcatggaccagcagattcagaacggctcctcgtccaccagtccctataacacagaccacgcgcagaacagcgtcacggcgccctcgccctacgcacagcccagctccaccttcgatgctctctctccatcacccgccatcccctccaacaccgactacccaggcccgcacagtttcgacgtgtccttccagcagtcgagcaccgccaagtcggccacctggacgtattccactgaactgaagaaactctactgccaaattgcaaagacatgccccatccagatcaaggtgatgaccccacctcctcagggagctgttatccgcgccatgcctgtctacaaaaaagctgagcacgtcacggaggtggtgaagcggtgccccaaccatgagctgagccgtgaattcaacgagggacagattgcccctcctagtcatttgattcgagtagaggggaacagccatgcccagtatgtagaagatcccatcacaggaagacagagtgtgctggtaccttatgagccaccccaggttggcactgaattcacgacagtcttgtacaatttcatgtgtaacagcagttgtgttggagggatgaaccgccgtccaattttaatcattgttactctggaaaccagagatgggcaagtcctgggccgacgctgctttgaggcccggatctgtgcttgcccaggaagagacaggaaggcggatgaagatagcatcagaaagcagcaagtttcggacagtacaaagaacggtgatggtacgaagcgcccgtttcgtcagaacacacatggtatccagatgacatccatcaagaaacgaagatccccagatgatgaactgttatacttaccagtgaggggccgtgagacttatgaaatgctgttgaagatcaaagagtccctggaactcatgcagtaccttcctcagcacacaattgaaacgtacaggcaacagcaacagcagcagcaccagcacttacttcagaaacagacctcaatacagtctccatcttcatatggtaacagctccccacctctgaacaaaatgaacagcatgaacaagctgccttctgtgagccagcttatcaaccctcagcagcgcaacgccctcactcctacaaccattcctgatggcatgggagccaacagatctggcaagtctgaaaatccctgagcaatttcgacatgcgatctggaagggcatcctggaccaccggcagctccacgaattctcctccccttctcatctcctgcggaccccaagcagtgcctctacagtcagtgtgggctccagtgagacccggggtgagcgtgttattgatgctgtgcgattcaccctccgccagaccatctctttcccaccccgagatgagtggaatgacttcaactttgacatggatgctcgccgcaataagcaacagcgcatcaaagaggagggggagtgagcctcaccatgtgagctcttcctatccctctcctaactgccagccccctaaaagcactcctgcttaatcttcaaagccttctccctagctcctccccttcctcttgtctgatttcttaggggaaggagaagtaagaggctacctcttacctaacatctgacctggcatctaattctgattctggctttaagccttcaaaa

SEQ ID NO: 33260 - DNA, 4668 bp, Homo sapiens
  source 1..4668: mol_type = unassigned DNA
agagagagaaagagagagagggacttgagttctgttatcttcttaagtagattcatattgtaagggtctcggggtgggggggttggcaaaatcctggagccagaagaaaggacagcagcattgatcaatcttacagctaacatgttgtacctggaaaacaatgcccagactcaatttagtgagccacagtacacgaacctggggctcctgaacagcatggaccagcagattcagaacggctcctcgtccaccagtccctataacacagaccacgcgcagaacagcgtcacggcgccctcgccctacgcacagcccagctccaccttcgatgctctctctccatcacccgccatcccctccaacaccgactacccaggcccgcacagtttcgacgtgtccttccagcagtcgagcaccgccaagtcggccacctggacgtattccactgaactgaagaaactctactgccaaattgcaaagacatgccccatccagatcaaggtgatgaccccacctcctcagggagctgttatccgcgccatgcctgtctacaaaaaagctgagcacgtcacggaggtggtgaagcggtgccccaaccatgagctgagccgtgaattcaacgagggacagattgcccctcctagtcatttgattcgagtagaggggaacagccatgcccagtatgtagaagatcccatcacaggaagacagagtgtgctggtaccttatgagccaccccaggttggcactgaattcacgacagtcttgtacaatttcatgtgtaacagcagttgtgttggagggatgaaccgccgtccaattttaatcattgttactctggaaaccagagatgggcaagtcctgggccgacgctgctttgaggcccggatctgtgcttgcccaggaagagacaggaaggcggatgaagatagcatcagaaagcagcaagtttcggacagtacaaagaacggtgatggtacgaagcgcccgtttcgtcagaacacacatggtatccagatgacatccatcaagaaacgaagatccccagatgatgaactgttatacttaccagtgaggggccgtgagacttatgaaatgctgttgaagatcaaagagtccctggaactcatgcagtaccttcctcagcacacaattgaaacgtacaggcaacagcaacagcagcagcaccagcacttacttcagaaacagacctcaatacagtctccatcttcatatggtaacagctccccacctctgaacaaaatgaacagcatgaacaagctgccttctgtgagccagcttatcaaccctcagcagcgcaacgccctcactcctacaaccattcctgatggcatgggagccaacattcccatgatgggcacccacatgccaatggctggagacatgaatggactcagccccacccaggcactccctcccccactctccatgccatccacctcccactgcacacccccacctccgtatcccacagattgcagcattgtcagtttcttagcgaggttgggctgttcatcatgtctggactatttcacgacccaggggctgaccaccatctatcagattgagcattactccatggatgatctggcaagtctgaaaatccctgagcaatttcgacatgcgatctggaagggcatcctggaccaccggcagctccacgaattctcctccccttctcatctcctgcggaccccaagcagtgcctctacagtcagtgtgggctccagtgagacccggggtgagcgtgttattgatgctgtgcgattcaccctccgccagaccatctctttcccaccccgagatgagtggaatgacttcaactttgacatggatgctcgccgcaataagcaacagcgcatcaaagaggagggggagtgagcctcaccatgtgagctcttcctatccctctcctaactgccagccccctaaaagcactcctgcttaatcttcaaagccttctccctagctcctccccttcctcttgtctgatttcttaggggaaggagaagtaagaggctacctcttacctaacatctgacctggcatctaattctgattctggctttaagccttcaaaactatagcttgcagaactgtagctgccatggctaggtagaagtgagcaaaaaagagttgggtgtctccttaagctgcagagatttctcattgacttttataaagcatgttcacccttatagtctaagactatatatataaatgtataaatatacagtatagatttttgggtggggggcattgagtattgtttaaaatgtaatttaaatgaaagaaaattgagttgcacttattgaccattttttaatttacttgttttggatggcttgtctatactccttcccttaaggggtatcatgtatggtgataggtatctagagcttaatgctacatgtgagtgacgatgatgtacagattctttcagttctttggattctaaatacatgccacatcaaacctttgagtagatccatttccattgcttattatgtaggtaagactgtagatatgtattcttttctcagtgttggtatattttatattactgacatttcttctagtgatgatggttcacgttggggtgatttaatccagttataagaagaagttcatgtccaaacgtcctctttagtttttggttgggaatgaggaaaattcttaaaaggcccatagcagccagttcaaaaacacccgacgtcatgtatttgagcatatcagtaacccccttaaatttaataccagataccttatcttacaatattgattgggaaaacatttgctgccattacagaggtattaaaactaaatttcactactagattgactaactcaaatacacatttgctactgttgtaagaattctgattgatttgattgggatgaatgccatctatctagttctaacagtgaagttttactgtctattaatattcagggtaaataggaatcattcagaaatgttgagtctgtactaaacagtaagatatctcaatgaaccataaattcaactttgtaaaaatcttttgaagcatagataatattgtttggtaaatgtttcttttgtttggtaaatgtttcttttaaagaccctcctattctataaaactctgcatgtagaggcttgtttacctttctctctctaaggtttacaataggagtggtgatttgaaaaatataaaattatgagattggttttcctgtggcataaattgcatcactgtatcattttcttttttaaccggtaagagtttcagtttgttggaaagtaactgtgagaacccagtttcccgtccatctcccttagggactacccatagacatgaaaggtccccacagagcaagagataagtctttcatggctgctgttgcttaaaccacttaaacgaagagttcccttgaaactttgggaaaacatgttaatgacaatattccagatctttcagaaatataacacatttttttgcatgcatgcaaatgagctctgaaatcttcccatgcattctggtcaagggctgtcattgcacataagcttccattttaattttaaagtgcaaaagggccagcgtggctctaaaaggtaatgtgtggattgcctctgaaaagtgtgtatatattttgtgtgaaattgcatactttgtattttgattattttttttttcttcttgggatagtgggatttccagaaccacacttgaaacctttttttatcgtttttgtattttcatgaaaataccatttagtaagaataccacatcaaataagaaataatgctacaattttaagaggggagggaagggaaagtttttttttattatttttttaaaattttgtatgttaaagagaatgagtccttgatttcaaagttttgttgtacttaaatggtaataagcactgtaaacttctgcaacaagcatgcagctttgcaaacccattaaggggaagaatgaaagctgttccttggtcctagtaagaagacaaactgcttcccttactttgctgagggtttgaataaacctaggacttccgagctatgtcagtactattcaggtaacactagggccttggaaattcctgtactgtgtctcatggatttggcactagccaaagcgaggcacccttactggcttacctcctcatggcagcctactctccttgagtgtatgagtagccagggtaaggggtaaaaggatagtaagcatagaaaccactagaaagtgggcttaatggagttcttgtggcctcagctcaatgcagttagctgaagaattgaaaagtttttgtttggagacgtttataaacagaaatggaaagcagagttttcattaaatccttttaccttttttttttcttggtaatcccctaaaataacagtatgtgggatattgaatgttaaagggatatttttttctattatttttataattgtacaaaattaagcaaatgttaaaagttttatatgctttattaatgttttcaaaaggtattatacatgtgatacattttttaagcttcagttgcttgtcttctggtactttctgttatgggcttttggggagccagaagccaatctacaatctctttttgtttgccaggacatgcaataaaatttaaaaaataaataaaaactaa

SEQ ID NO: 33261 - DNA, 1788 bp, Homo sapiens
  source 1..1788: mol_type = unassigned DNA
atgaattttgaaacttcacggtgtgccaccctacagtactgccctgacccttacatccagcgtttcgtagaaaccccagctcatttctcttggaaagaaagttattaccgatccaccatgtcccagagcacacagacaaatgaattcctcagtccagaggttttccagcatatctgggattttctggaacagcctatatgttcagttcagcccattgacttgaactttgtggatgaaccatcagaagatggtgcgacaaacaagattgagattagcatggactgtatccgcatgcaggactcggacctgagtgaccccatgtggtattccactgaactgaagaaactctactgccaaattgcaaagacatgccccatccagatcaaggtgatgaccccacctcctcagggagctgttatccgcgccatgcctgtctacaaaaaagctgagcacgtcacggaggtggtgaagcggtgccccaaccatgagctgagccgtgaattcaacgagggacagattgcccctcctagtcatttgattcgagtagaggggaacagccatgcccagtatgtagaagatcccatcacaggaagacagagtgtgctggtaccttatgagccaccccaggttggcactgaattcacgacagtcttgtacaatttcatgtgtaacagcagttgtgttggagggatgaaccgccgtccaattttaatcattgttactctggaaaccagagatgggcaagtcctgggccgacgctgctttgaggcccggatctgtgcttgcccaggaagagacaggaaggcggatgaagatagcatcagaaagcagcaagtttcggacagtacaaagaacggtgatggtacgaagcgcccgtttcgtcagaacacacatggtatccagatgacatccatcaagaaacgaagatccccagatgatgaactgttatacttaccagtgaggggccgtgagacttatgaaatgctgttgaagatcaaagagtccctggaactcatgcagtaccttcctcagcacacaattgaaacgtacaggcaacagcaacagcagcagcaccagcacttacttcagaaacagacctcaatacagtctccatcttcatatggtaacagctccccacctctgaacaaaatgaacagcatgaacaagctgccttctgtgagccagcttatcaaccctcagcagcgcaacgccctcactcctacaaccattcctgatggcatgggagccaacattcccatgatgggcacccacatgccaatggctggagacatgaatggactcagccccacccaggcactccctcccccactctccatgccatccacctcccactgcacacccccacctccgtatcccacagattgcagcattgtcagtttcttagcgaggttgggctgttcatcatgtctggactatttcacgacccaggggctgaccaccatctatcagattgagcattactccatggatgatctggcaagtctgaaaatccctgagcaatttcgacatgcgatctggaagggcatcctggaccaccggcagctccacgaattctcctccccttctcatctcctgcggaccccaagcagtgcctctacagtcagtgtgggctccagtgagacccggggtgagcgtgttattgatgctgtgcgattcaccctccgccagaccatctctttcccaccccgagatgagtggaatgacttcaactttgacatggatgctcgccgcaataagcaacagcgcatcaaagaggagggggagtga

SEQ ID NO: 33262 - DNA, 1668 bp, Homo sapiens
  source 1..1668: mol_type = unassigned DNA
atgaattttgaaacttcacggtgtgccaccctacagtactgccctgacccttacatccagcgtttcgtagaaaccccagctcatttctcttggaaagaaagttattaccgatccaccatgtcccagagcacacagacaaatgaattcctcagtccagaggttttccagcatatctgggattttctggaacagcctatatgttcagttcagcccattgacttgaactttgtggatgaaccatcagaagatggtgcgacaaacaagattgagattagcatggactgtatccgcatgcaggactcggacctgagtgaccccatgtggccacagtacacgaacctggggctcctgaacagcatggaccagcagattcagaacggctcctcgtccaccagtccctataacacagaccacgcgcagaacagcgtcacggcgccctcgccctacgcacagcccagctccaccttcgatgctctctctccatcacccgccatcccctccaacaccgactacccaggcccgcacagtttcgacgtgtccttccagcagtcgagcaccgccaagtcggccacctggacgtattccactgaactgaagaaactctactgccaaattgcaaagacatgccccatccagatcaaggtgatgaccccacctcctcagggagctgttatccgcgccatgcctgtctacaaaaaagctgagcacgtcacggaggtggtgaagcggtgccccaaccatgagctgagccgtgaattcaacgagggacagattgcccctcctagtcatttgattcgagtagaggggaacagccatgcccagtatgtagaagatcccatcacaggaagacagagtgtgctggtaccttatgagccaccccaggttggcactgaattcacgacagtcttgtacaatttcatgtgtaacagcagttgtgttggagggatgaaccgccgtccaattttaatcattgttactctggaaaccagagatgggcaagtcctgggccgacgctgctttgaggcccggatctgtgcttgcccaggaagagacaggaaggcggatgaagatagcatcagaaagcagcaagtttcggacagtacaaagaacggtgatggtacgaagcgcccgtttcgtcagaacacacatggtatccagatgacatccatcaagaaacgaagatccccagatgatgaactgttatacttaccagtgaggggccgtgagacttatgaaatgctgttgaagatcaaagagtccctggaactcatgcagtaccttcctcagcacacaattgaaacgtacaggcaacagcaacagcagcagcaccagcacttacttcagaaacagacctcaatacagtctccatcttcatatggtaacagctccccacctctgaacaaaatgaacagcatgaacaagctgccttctgtgagccagcttatcaaccctcagcagcgcaacgccctcactcctacaaccattcctgatggcatgggagccaacattcccatgatgggcacccacatgccaatggctggagacatgaatggactcagccccacccaggcactccctcccccactctccatgccatccacctcccactgcacacccccacctccgtatcccacagattgcagcattgtcaggatctggcaagtctga

SEQ ID NO: 33263 - DNA, 1251 bp, Homo sapiens
  source 1..1251: mol_type = unassigned DNA
atgttgtacctggaaaacaatgcccagactcaatttagtgagccacagtacacgaacctggggctcctgaacagcatggaccagcagattcagaacggctcctcgtccaccagtccctataacacagaccacgcgcagaacagcgtcacggcgccctcgccctacgcacagcccagctccaccttcgatgctctctctccatcacccgccatcccctccaacaccgactacccaggcccgcacagtttcgacgtgtccttccagcagtcgagcaccgccaagtcggccacctggacgtattccactgaactgaagaaactctactgccaaattgcaaagacatgccccatccagatcaaggtgatgaccccacctcctcagggagctgttatccgcgccatgcctgtctacaaaaaagctgagcacgtcacggaggtggtgaagcggtgccccaaccatgagctgagccgtgaattcaacgagggacagattgcccctcctagtcatttgattcgagtagaggggaacagccatgcccagtatgtagaagatcccatcacaggaagacagagtgtgctggtaccttatgagccaccccaggttggcactgaattcacgacagtcttgtacaatttcatgtgtaacagcagttgtgttggagggatgaaccgccgtccaattttaatcattgttactctggaaaccagagatgggcaagtcctgggccgacgctgctttgaggcccggatctgtgcttgcccaggaagagacaggaaggcggatgaagatagcatcagaaagcagcaagtttcggacagtacaaagaacggtgatggtacgaagcgcccgtttcgtcagaacacacatggtatccagatgacatccatcaagaaacgaagatccccagatgatgaactgttatacttaccagtgaggggccgtgagacttatgaaatgctgttgaagatcaaagagtccctggaactcatgcagtaccttcctcagcacacaattgaaacgtacaggcaacagcaacagcagcagcaccagcacttacttcagaaacagacctcaatacagtctccatcttcatatggtaacagctccccacctctgaacaaaatgaacagcatgaacaagctgccttctgtgagccagcttatcaaccctcagcagcgcaacgccctcactcctacaaccattcctgatggcatgggagccaacagatctggcaagtctgaaaatccctga

SEQ ID NO: 33264 - DNA, 1386 bp, Homo sapiens
  source 1..1386: mol_type = unassigned DNA
atgttgtacctggaaaacaatgcccagactcaatttagtgagccacagtacacgaacctggggctcctgaacagcatggaccagcagattcagaacggctcctcgtccaccagtccctataacacagaccacgcgcagaacagcgtcacggcgccctcgccctacgcacagcccagctccaccttcgatgctctctctccatcacccgccatcccctccaacaccgactacccaggcccgcacagtttcgacgtgtccttccagcagtcgagcaccgccaagtcggccacctggacgtattccactgaactgaagaaactctactgccaaattgcaaagacatgccccatccagatcaaggtgatgaccccacctcctcagggagctgttatccgcgccatgcctgtctacaaaaaagctgagcacgtcacggaggtggtgaagcggtgccccaaccatgagctgagccgtgaattcaacgagggacagattgcccctcctagtcatttgattcgagtagaggggaacagccatgcccagtatgtagaagatcccatcacaggaagacagagtgtgctggtaccttatgagccaccccaggttggcactgaattcacgacagtcttgtacaatttcatgtgtaacagcagttgtgttggagggatgaaccgccgtccaattttaatcattgttactctggaaaccagagatgggcaagtcctgggccgacgctgctttgaggcccggatctgtgcttgcccaggaagagacaggaaggcggatgaagatagcatcagaaagcagcaagtttcggacagtacaaagaacggtgatggtacgaagcgcccgtttcgtcagaacacacatggtatccagatgacatccatcaagaaacgaagatccccagatgatgaactgttatacttaccagtgaggggccgtgagacttatgaaatgctgttgaagatcaaagagtccctggaactcatgcagtaccttcctcagcacacaattgaaacgtacaggcaacagcaacagcagcagcaccagcacttacttcagaaacagacctcaatacagtctccatcttcatatggtaacagctccccacctctgaacaaaatgaacagcatgaacaagctgccttctgtgagccagcttatcaaccctcagcagcgcaacgccctcactcctacaaccattcctgatggcatgggagccaacattcccatgatgggcacccacatgccaatggctggagacatgaatggactcagccccacccaggcactccctcccccactctccatgccatccacctcccactgcacacccccacctccgtatcccacagattgcagcattgtcaggatctggcaagtctga

SEQ ID NO: 33265 - DNA, 2810 bp, Homo sapiens
  source 1..2810: mol_type = unassigned DNA
tcgttgatatcaaagacagttgaaggaaatgaattttgaaacttcacggtgtgccaccctacagtactgccctgacccttacatccagcgtttcgtagaaaccccagctcatttctcttggaaagaaagttattaccgatccaccatgtcccagagcacacagacaaatgaattcctcagtccagaggttttccagcatatctgggattttctggaacagcctatatgttcagttcagcccattgacttgaactttgtggatgaaccatcagaagatggtgcgacaaacaagattgagattagcatggactgtatccgcatgcaggactcggacctgagtgaccccatgtggccacagtacacgaacctggggctcctgaacagcatggaccagcagattcagaacggctcctcgtccaccagtccctataacacagaccacgcgcagaacagcgtcacggcgccctcgccctacgcacagcccagctccaccttcgatgctctctctccatcacccgccatcccctccaacaccgactacccaggcccgcacagtttcgacgtgtccttccagcagtcgagcaccgccaagtcggccacctggacgtattccactgaactgaagaaactctactgccaaattgcaaagacatgccccatccagatcaaggtgatgaccccacctcctcagggagctgttatccgcgccatgcctgtctacaaaaaagctgagcacgtcacggaggtggtgaagcggtgccccaaccatgagctgagccgtgaattcaacgagggacagattgcccctcctagtcatttgattcgagtagaggggaacagccatgcccagtatgtagaagatcccatcacaggaagacagagtgtgctggtaccttatgagccaccccaggttggcactgaattcacgacagtcttgtacaatttcatgtgtaacagcagttgtgttggagggatgaaccgccgtccaattttaatcattgttactctggaaaccagagatgggcaagtcctgggccgacgctgctttgaggcccggatctgtgcttgcccaggaagagacaggaaggcggatgaagatagcatcagaaagcagcaagtttcggacagtacaaagaacggtgatggtacgaagcgcccgtttcgtcagaacacacatggtatccagatgacatccatcaagaaacgaagatccccagatgatgaactgttatacttaccagtgaggggccgtgagacttatgaaatgctgttgaagatcaaagagtccctggaactcatgcagtaccttcctcagcacacaattgaaacgtacaggcaacagcaacagcagcagcaccagcacttacttcagaaacatctcctttcagcctgcttcaggaatgagcttgtggagccccggagagaaactccaaaacaatctgacgtcttctttagacattccaagcccccaaaccgatcagtgtacccatagagccctatctctatattttaagtgtgtgtgttgtatttccatgtgtatatgtgagtgtgtgtgtgtgtatgtgtgtgcgtgtgtatctagccctcataaacaggacttgaagacactttggctcagagacccaactgctcaaaggcacaaagccactagtgagagaatcttttgaagggactcaaacctttacaagaaaggatgttttctgcagattttgtatccttagaccggccattggtgggtgaggaaccactgtgtttgtctgtgagctttctgttgtttcctgggagggaggggtcaggtggggaaaggggcattaagatgtttattggaacccttttctgtcttcttctgttgtttttctaaaattcacagggaagcttttgagcaggtctcaaacttaagatgtctttttaagaaaaggagaaaaaagttgttattgtctgtgcataagtaagttgtaggtgactgagagactcagtcagacccttttaatgctggtcatgtaataatattgcaagtagtaagaaacgaaggtgtcaagtgtactgctgggcagcgaggtgatcattaccaaaagtaatcaactttgtgggtggagagttctttgtgagaacttgcattatttgtgtcctcccctcatgtgtaggtagaacatttcttaatgctgtgtacctgcctctgccactgtatgttggcatctgttatgctaaagtttttcttgtacatgaaaccctggaagacctactacaaaaaaactgttgtttggcccccatagcaggtgaactcattttgtgcttttaatagaaagacaaatccaccccagtaatattgcccttacgtagttgtttaccattattcaaagctcaaaatagaatttgaagccctctcacaaaatctgtgattaatttgcttaattagagcttctatccctcaagcctacctaccataaaaccagccatattactgatactgttcagtgcatttagccaggagacttacgttttgagtaagtgagatccaagcagacgtgttaaaatcagcactcctggactggaaattaaagattgaaagggtagactacttttcttttttttactcaaaagtttagagaatctctgtttctttccattttaaaaacatattttaagataatagcataaagactttaaaaatgttcctcccctccatcttcccacacccagtcaccagcactgtattttctgtcaccaagacaatgatttcttgttattgaggctgttgcttttgtggatgtgtgattttaattttcaataaacttttgcatcttggttta

SEQ ID NO: 33266 - DNA, 2500 bp, Homo sapiens
  source 1..2500: mol_type = unassigned DNA
atgttgtacctggaaaacaatgcccagactcaatttagtgagccacagtacacgaacctggggctcctgaacagcatggaccagcagattcagaacggctcctcgtccaccagtccctataacacagaccacgcgcagaacagcgtcacggcgccctcgccctacgcacagcccagctccaccttcgatgctctctctccatcacccgccatcccctccaacaccgactacccaggcccgcacagtttcgacgtgtccttccagcagtcgagcaccgccaagtcggccacctggacgtattccactgaactgaagaaactctactgccaaattgcaaagacatgccccatccagatcaaggtgatgaccccacctcctcagggagctgttatccgcgccatgcctgtctacaaaaaagctgagcacgtcacggaggtggtgaagcggtgccccaaccatgagctgagccgtgaattcaacgagggacagattgcccctcctagtcatttgattcgagtagaggggaacagccatgcccagtatgtagaagatcccatcacaggaagacagagtgtgctggtaccttatgagccaccccaggttggcactgaattcacgacagtcttgtacaatttcatgtgtaacagcagttgtgttggagggatgaaccgccgtccaattttaatcattgttactctggaaaccagagatgggcaagtcctgggccgacgctgctttgaggcccggatctgtgcttgcccaggaagagacaggaaggcggatgaagatagcatcagaaagcagcaagtttcggacagtacaaagaacggtgatggtacgaagcgcccgtttcgtcagaacacacatggtatccagatgacatccatcaagaaacgaagatccccagatgatgaactgttatacttaccagtgaggggccgtgagacttatgaaatgctgttgaagatcaaagagtccctggaactcatgcagtaccttcctcagcacacaattgaaacgtacaggcaacagcaacagcagcagcaccagcacttacttcagaaacatctcctttcagcctgcttcaggaatgagcttgtggagccccggagagaaactccaaaacaatctgacgtcttctttagacattccaagcccccaaaccgatcagtgtacccatagagccctatctctatattttaagtgtgtgtgttgtatttccatgtgtatatgtgagtgtgtgtgtgtgtatgtgtgtgcgtgtgtatctagccctcataaacaggacttgaagacactttggctcagagacccaactgctcaaaggcacaaagccactagtgagagaatcttttgaagggactcaaacctttacaagaaaggatgttttctgcagattttgtatccttagaccggccattggtgggtgaggaaccactgtgtttgtctgtgagctttctgttgtttcctgggagggaggggtcaggtggggaaaggggcattaagatgtttattggaacccttttctgtcttcttctgttgtttttctaaaattcacagggaagcttttgagcaggtctcaaacttaagatgtctttttaagaaaaggagaaaaaagttgttattgtctgtgcataagtaagttgtaggtgactgagagactcagtcagacccttttaatgctggtcatgtaataatattgcaagtagtaagaaacgaaggtgtcaagtgtactgctgggcagcgaggtgatcattaccaaaagtaatcaactttgtgggtggagagttctttgtgagaacttgcattatttgtgtcctcccctcatgtgtaggtagaacatttcttaatgctgtgtacctgcctctgccactgtatgttggcatctgttatgctaaagtttttcttgtacatgaaaccctggaagacctactacaaaaaaactgttgtttggcccccatagcaggtgaactcattttgtgcttttaatagaaagacaaatccaccccagtaatattgcccttacgtagttgtttaccattattcaaagctcaaaatagaatttgaagccctctcacaaaatctgtgattaatttgcttaattagagcttctatccctcaagcctacctaccataaaaccagccatattactgatactgttcagtgcatttagccaggagacttacgttttgagtaagtgagatccaagcagacgtgttaaaatcagcactcctggactggaaattaaagattgaaagggtagactacttttcttttttttactcaaaagtttagagaatctctgtttctttccattttaaaaacatattttaagataatagcataaagactttaaaaatgttcctcccctccatcttcccacacccagtcaccagcactgtattttctgtcaccaagacaatgatttcttgttattgaggctgttgcttttgtggatgtgtgattttaattttcaataaacttttgcatcttggttta

SEQ ID NO: 33267 - DNA, 2031 bp, Homo sapiens
  source 1..2031: mol_type = unassigned DNA
atgaattttgaaacttcacggtgtgccaccctacagtactgccctgacccttacatccagcgtttcgtagaaaccccagctcatttctcttggaaagaaagttattaccgatccaccatgtcccagagcacacagacaaatgaattcctcagtccagaggttttccagcatatctgggattttctggaacagcctatatgttcagttcagcccattgacttgaactttgtggatgaaccatcagaagatggtgcgacaaacaagattgagattagcatggactgtatccgcatgcaggactcggacctgagtgaccccatgtggccacagtacacgaacctggggctcctgaacagcatggaccagcagattcagaacggctcctcgtccaccagtccctataacacagaccacgcgcagaacagcgtcacggcgccctcgccctacgcacagcccagctccaccttcgatgctctctctccatcacccgccatcccctccaacaccgactacccaggcccgcacagtttcgacgtgtccttccagcagtcgagcaccgccaagtcggccacctggacgtattccactgaactgaagaaactctactgccaaattgcaaagacatgccccatccagatcaaggtgatgaccccacctcctcagggagctgttatccgcgccatgcctgtctacaaaaaagctgagcacgtcacggaggtggtgaagcggtgccccaaccatgagctgagccgtgaattcaacgagggacagattgcccctcctagtcatttgattcgagtagaggggaacagccatgcccagtatgtagaagatcccatcacaggaagacagagtgtgctggtaccttatgagccaccccaggttggcactgaattcacgacagtcttgtacaatttcatgtgtaacagcagttgtgttggagggatgaaccgccgtccaattttaatcattgttactctggaaaccagagatgggcaagtcctgggccgacgctgctttgaggcccggatctgtgcttgcccaggaagagacaggaaggcggatgaagatagcatcagaaagcagcaagtttcggacagtacaaagaacggtgatgcgtttcgtcagaacacacatggtatccagatgacatccatcaagaaacgaagatccccagatgatgaactgttatacttaccagtgaggggccgtgagacttatgaaatgctgttgaagatcaaagagtccctggaactcatgcagtaccttcctcagcacacaattgaaacgtacaggcaacagcaacagcagcagcaccagcacttacttcagaaacagacctcaatacagtctccatcttcatatggtaacagctccccacctctgaacaaaatgaacagcatgaacaagctgccttctgtgagccagcttatcaaccctcagcagcgcaacgccctcactcctacaaccattcctgatggcatgggagccaacattcccatgatgggcacccacatgccaatggctggagacatgaatggactcagccccacccaggcactccctcccccactctccatgccatccacctcccactgcacacccccacctccgtatcccacagattgcagcattgtcagtttcttagcgaggttgggctgttcatcatgtctggactatttcacgacccaggggctgaccaccatctatcagattgagcattactccatggatgatctggcaagtctgaaaatccctgagcaatttcgacatgcgatctggaagggcatcctggaccaccggcagctccacgaattctcctccccttctcatctcctgcggaccccaagcagtgcctctacagtcagtgtgggctccagtgagacccggggtgagcgtgttattgatgctgtgcgattcaccctccgccagaccatctctttcccaccccgagatgagtggaatgacttcaactttgacatggatgctcgccgcaataagcaacagcgcatcaaagaggagggggagtga

SEQ ID NO: 33268 - DNA, 1506 bp, Homo sapiens
  source 1..1506: mol_type = unassigned DNA
atgttgtacctggaaaacaatgcccagactcaatttagtgagtattccactgaactgaagaaactctactgccaaattgcaaagacatgccccatccagatcaaggtgatgaccccacctcctcagggagctgttatccgcgccatgcctgtctacaaaaaagctgagcacgtcacggaggtggtgaagcggtgccccaaccatgagctgagccgtgaattcaacgagggacagattgcccctcctagtcatttgattcgagtagaggggaacagccatgcccagtatgtagaagatcccatcacaggaagacagagtgtgctggtaccttatgagccaccccaggttggcactgaattcacgacagtcttgtacaatttcatgtgtaacagcagttgtgttggagggatgaaccgccgtccaattttaatcattgttactctggaaaccagagatgggcaagtcctgggccgacgctgctttgaggcccggatctgtgcttgcccaggaagagacaggaaggcggatgaagatagcatcagaaagcagcaagtttcggacagtacaaagaacggtgatggtacgaagcgcccgtttcgtcagaacacacatggtatccagatgacatccatcaagaaacgaagatccccagatgatgaactgttatacttaccagtgaggggccgtgagacttatgaaatgctgttgaagatcaaagagtccctggaactcatgcagtaccttcctcagcacacaattgaaacgtacaggcaacagcaacagcagcagcaccagcacttacttcagaaacagacctcaatacagtctccatcttcatatggtaacagctccccacctctgaacaaaatgaacagcatgaacaagctgccttctgtgagccagcttatcaaccctcagcagcgcaacgccctcactcctacaaccattcctgatggcatgggagccaacattcccatgatgggcacccacatgccaatggctggagacatgaatggactcagccccacccaggcactccctcccccactctccatgccatccacctcccactgcacacccccacctccgtatcccacagattgcagcattgtcagtttcttagcgaggttgggctgttcatcatgtctggactatttcacgacccaggggctgaccaccatctatcagattgagcattactccatggatgatctggcaagtctgaaaatccctgagcaatttcgacatgcgatctggaagggcatcctggaccaccggcagctccacgaattctcctccccttctcatctcctgcggaccccaagcagtgcctctacagtcagtgtgggctccagtgagacccggggtgagcgtgttattgatgctgtgcgattcaccctccgccagaccatctctttcccaccccgagatgagtggaatgacttcaactttgacatggatgctcgccgcaataagcaacagcgcatcaaagaggagggggagtga

SEQ ID NO: 33269 - DNA, 1749 bp, Homo sapiens
  source 1..1749: mol_type = unassigned DNA
atgttgtacctggaaaacaatgcccagactcaatttagtgagccacagtacacgaacctggggctcctgaacagcatggaccagcagattcagaacggctcctcgtccaccagtccctataacacagaccacgcgcagaacagcgtcacggcgccctcgccctacgcacagcccagctccaccttcgatgctctctctccatcacccgccatcccctccaacaccgactacccaggcccgcacagtttcgacgtgtccttccagcagtcgagcaccgccaagtcggccacctggacgtattccactgaactgaagaaactctactgccaaattgcaaagacatgccccatccagatcaaggtgatgaccccacctcctcagggagctgttatccgcgccatgcctgtctacaaaaaagctgagcacgtcacggaggtggtgaagcggtgccccaaccatgagctgagccgtgaattcaacgagggacagattgcccctcctagtcatttgattcgagtagaggggaacagccatgcccagtatgtagaagatcccatcacaggaagacagagtgtgctggtaccttatgagccaccccaggttggcactgaattcacgacagtcttgtacaatttcatgtgtaacagcagttgtgttggagggatgaaccgccgtccaattttaatcattgttactctggaaaccagagatgggcaagtcctgggccgacgctgctttgaggcccggatctgtgcttgcccaggaagagacaggaaggcggatgaagatagcatcagaaagcagcaagtttcggacagtacaaagaacggtgatgcgtttcgtcagaacacacatggtatccagatgacatccatcaagaaacgaagatccccagatgatgaactgttatacttaccagtgaggggccgtgagacttatgaaatgctgttgaagatcaaagagtccctggaactcatgcagtaccttcctcagcacacaattgaaacgtacaggcaacagcaacagcagcagcaccagcacttacttcagaaacagacctcaatacagtctccatcttcatatggtaacagctccccacctctgaacaaaatgaacagcatgaacaagctgccttctgtgagccagcttatcaaccctcagcagcgcaacgccctcactcctacaaccattcctgatggcatgggagccaacattcccatgatgggcacccacatgccaatggctggagacatgaatggactcagccccacccaggcactccctcccccactctccatgccatccacctcccactgcacacccccacctccgtatcccacagattgcagcattgtcagtttcttagcgaggttgggctgttcatcatgtctggactatttcacgacccaggggctgaccaccatctatcagattgagcattactccatggatgatctggcaagtctgaaaatccctgagcaatttcgacatgcgatctggaagggcatcctggaccaccggcagctccacgaattctcctccccttctcatctcctgcggaccccaagcagtgcctctacagtcagtgtgggctccagtgagacccggggtgagcgtgttattgatgctgtgcgattcaccctccgccagaccatctctttcccaccccgagatgagtggaatgacttcaactttgacatggatgctcgccgcaataagcaacagcgcatcaaagaggagggggagtga

SEQ ID NO: 33270 - DNA, 1008 bp, Homo sapiens
  source 1..1008: mol_type = unassigned DNA
tcccttcagtcgccatcatgattatctaccgggacctcatcagccacgatgagatgttctccgacatctacaagatccgggagatcgcggacgggttgtgcctggaggtggaggggaagatggtcagtaggacagaaggtaacattgatgactcgctcattggtggaaatgcctccgctgaaggccccgagggcgaaggtaccgaaagcacagtaatcactggtgtcgatattgtcatgaaccatcacctgcaggaaacaagtttcacaaaagaagcctacaagaagtacatcaaagattacatgaaatcaatcaaagggaaacttgaagaacagagaccagaaagagtaaaaccttttatgacaggggctgcagaacaaatcaagcacatccttgctaatttcaaaaactaccagttctttattggtgaaaacatgaatccagatggcatggttgctctattggactaccgtgaggatggtgtgaccccatatatgattttctttaaggatggtttagaaatggaaaaatgtgtaagtacaaggaagtgggttaaaataaataatgtaaaaaagacattttagatgtgatttgcaattgttttgtgacactgagaatgagttttacagcgttctgaaacatggttttagttttctctttggggatcaagagaattgtgtttcatatgtaaaaaattcttagggtataaaaaggcttagaatcttatttgtggaaaacgttgagtgcagatggggcataataaagtacagtttaggctgggtgtggtggctcacacctgtaatttcagcacttgggacgccgaggtgggtgcatcacctgaggttgggagttcgagaccagcctggccaacatggcgaaaccctatctctgctaaaaatacaaaaattagccaggcatggcagcgggcacctgtaatcccagctaatcgagagcctgaggcaggaaaatcacttaaacctgggaggggggttgcagtgagcagagatc

SEQ ID NO: 33271 - DNA, 948 bp, Homo sapiens
  source 1..948: mol_type = unassigned DNA
ccgagcgccgctccggctgcaccgcgctcgctccgagtttcaggctcgtgctaagctagcgccgtcgtcgtctcccttcagtcgccatcatgattatctaccgggacctcatcagccgtgagtcctcactgcactatccttactgccgcacacgggggtctggggtgcgggtgggggcggggaaggcgcagccgtcgcgggcctaggggacgccggcggtcttagccgagcgcggaggggtcggtgcccggggctcgcgcccagctctggtgtgctacggaggggcagatcccgcgtgcggccgccggcgcgggaaatgcgggaaatggcggcgccaggcgcacggtgatgggcggctctgtgtatccggcagacgatgagatgttctccgacatctacaagatccgggagatcgcggacgggttgtgcctggaggtggaggggaagatggtcagtaggacagaaggtaacattgatgactcgctcattggtggaaatgcctccgctgaaggccccgagggcgaaggtaccgaaagcacagtaatcactggtgtcgatattgtcatgaaccatcacctgcaggaaacaagtttcacaaaagaagcctacaagaagtacatcaaagattacatgaaatcaatcaaagggaaacttgaagaacagagaccagaaagagtaaaaccttttatgacaggggctgcagaacaaatcaagcacatccttgctaatttcaaaaactaccagttctttattggtgaaaacatgaatccagatggcatggttgctctattggactaccgtgaggatggtgtgaccccatatatgattttctttaaggatggtttagaaatggaaaaatgttaacaaatgtggcaattattttggatctatcacctgtcatcataactggcttctgcttgtcatccacacaacaccaggacttaagac

SEQ ID NO: 33272 - DNA, 1101 bp, Homo sapiens
  source 1..1101: mol_type = unassigned DNA
atatgaggttggggagcggctgagtcggccttttccgcccgctcccccctccccccgagcgccgctccggctgcaccgcgctcgctccgagtttcaggctcgtgctaagctagcgccgtcgtcgtctcccttcagtcgccatcatgattatctaccgggacctcatcagccatggtcagtaggacagaaggtaacattgatgactcgctcattggtggaaatgcctccgctgaaggccccgagggcgaaggtaccgaaagcacagtaatcactggtgtcgatattgtcatgaaccatcacctgcaggaaacaagtttcacaaaagaagcctacaagaagtacatcaaagattacatgaaatcaatcaaagggaaacttgaagaacagagaccagaaagagtaaaaccttttatgacaggggctgcagaacaaatcaagcacatccttgctaatttcaaaaactaccagttctttattggtgaaaacatgaatccagatggcatggttgctctattggactaccgtgaggatggtgtgaccccatatatgattttctttaaggatggtttagaaatggaaaaatgttaacaaatgtggcaattattttggatctatcacctgtcatcataactggcttctgcttgtcatccacacaacaccaggacttaagacaaatgggactgatgtcatcttgagctcttcatttattttgactgtgatttatttggagtggaggcattgtttttaagaaaaacatgtcatgtaggttgtctaaaaataaaatgcatttaaactcatttgagagaatgccttttagtttaatgcatatttaaactaaattgatcctgtagtgttcctggagaagctagagcctgattgtaggctactactcatcaattaacttctacagtggagactacttctgggactggaatataaaaaagaatcaaaggttctgattttgagttgcaataaagggaaagaccatgctcatagcagtgccaacatctgaagtgtggagccttacccatttcatcacctacaacggaagtagttaactggaagagattaccaagagaataaaaagagactcattcagtg

SEQ ID NO: 33273 - DNA, 764 bp, Homo sapiens
  source 1..764: mol_type = unassigned DNA
gtttcaggctcgtgctaagctagcgccgtcgtcgtctcccttcagtcgccatcatgattatctaccgggacctcatcagccgtgaacgatgagatgttctccgacatctacaagatccgggagatcgcggacgggttgtgcctggaggtggaggggaagatggtcagtaggacagaaggtaacattgatgactcgctcattggtggaaatgcctccgctgaaggccccgagggcgaaggtaccgaaagcacagtaatcactggtgtcgatattgtcatgaaccatcacctgcaggaaacaagtttcacaaaagaagcctacaagaagtacatcaaagattacatgaaatcaatcaaagggaaacttgaagaacagagaccagaaagagtaaaaccttttatgacaggggctgcagaacaaatcaagcacatccttgctaatttcaaaaactaccagttctttattggtgaaaacatgaatccagatggcatggttgctctattggactaccgtgaggatggtgtgaccccatatatgattttctttaaggatggtttagaaatggaaaaatgttaacaaatgtggcaattattttggatctatcacctgtcatcataactggcttctgcttgtcatccacacaacaccaggacttaagacaaatgggactgatgtcatcttgagctcttcatttattttgactgtgatttatttggagtggaggcattgtttttaagaaaaacatgtcatgtaggttgtctaaa

SEQ ID NO: 33274 - DNA, 1028 bp, Homo sapiens
  source 1..1028: mol_type = unassigned DNA
ggaacggagccttgtgtctccgcctcaagtccccggatgctcacctccccgactcgcccccgctgtggccccgcccccgcgcggctcttcgtgccacgtcaccgcctgcgtcgcttccggaggcgcagcgggcgatgacgtagagggacgtgccctctatatgaggttggggagcggctgagtcggccttttccgcccgctcccccctccccccgagcgccgctccggctgcaccgcgctcgctccgagtttcaggctcgtgctaagctagcgccgtcgtcgtctcccttcagtcgccatcatgattatctaccgggacctcatcagccacgatgagatgttctccgacatctacaagatccgggagatcgcggacgggttgtgcctggaggtggaggggaagatggtcagtaggacagaaggtaacattgatgactcgctcattggtggaaatgcctccgctgaaggccccgagggcgaaggtaccgaaagcacagtaatcactggtgtcgatattgtcatgaaccatcacctgcaggaaacaagtttcacaaaagaagcctacaagaagtacatcaaagattacatgaaatcaatcaaagggaaacttgaagaacagagaccagaaagagtaaaaccttttatgacaggggctgcagaacaaatcaagcacatccttgctaatttcaaaaactaccagttctttattggtgaaaacatgaatccagatggcatggttgctctattggactaccgtgaggatggtgtgaccccatatatgattttctttaaggatggtttagaaatggaaaaatgttaacaaatgtggcaattattttggatctatcacctgtcatcataactggcttctgcttgtcatccacacaacaccaggacttaagacaaatgggactgatgtcatcttgagctcttcatttattttgactgtgatttatttggagtggaggcattgtttttaagaaaaacatgtcatgtaggttgtctaaaaataaaatgcatttaaactc

SEQ ID NO: 33275 - DNA, 1766 bp, Homo sapiens
  source 1..1766: mol_type = unassigned DNA
gatgacacatccgaaaaataggaagtggccactacggaagctgttctgggccagaaagacttccagtttggagtcgtttgctgcggggagggaatgaatgggcgctgggaacacgcccgcgaggtggggacgcgccggccgtagcgaggtccttagcgtgtgagtggccggggtcgggtcgcttccccgcagcatggaggacgatgcaccagtgatctacgggctggagttccaggcacgtgccttaacacctcaaactgcagaaacagatgccattcggtttttggttgggacgcagtctcttaaatatgataatcagatccatatcatagattttgacgatgaaaacaacattataaataaaaatgtcctcctccatcaagcgggtgaaatctggcatattagcgctagccctgcagacagaggtgtgctgacgacctgctacaacagaacttcagacagcaaagtcctgacatgtgcagccgtgtggaggatgccgaaggaattggaatcaggcagccacgagtcccctgatgattcatccagcactgcacagaccctggagctgctctgtcaccttgacaacacagcccatggcaacatggcctgtgtcgtgtgggagccaatgggagatgggaagaaaatcatttccttggctgataaccatatcctgctgtgggatttacaggaaagctcgagccaggctgtgctggccagctcagcgtccctggaagggaagggacaactgaagttcacctcaggacggtggagcccacatcataactgcacccaggtggccacagcgaacgacaccaccctccgtggctgggacacccggagcatgagccagatctactgcatagagaatgcccacggacagctggtgcgggaccttgactttaatcccaataagcagtactacttggccagctgcggagacgactgtaaggtgaagttctgggacacccgaaatgtcaccgaacccgtgaagaccctggaggagcactcccactgggtgtggaacgtccgctacaaccactctcatgaccagctggtcctcacgggcagcagtgacagcagagtcatcctttccaacatggtgtccatctcgtcggagcccttcggccacttggtagacgacgatgacatcagtgaccaggaggaccaccgttctgaagagaagagcaaggagcccctgcaggacaacgtgatcgccacctacgaggagcacgaggacagcgtctatgccgtggactggtcctcggctgacccgtggctgtttgcctccctgagctatgacgggaggctcgtgatcaacagggtgcccagggccctgaagtaccacatcctgctatgactcccgggcctgggttatccaggtcccattgagtggttttcctcttggcagattctcaaacagtcgcagctctttggaggtgactcgtgttccaggtggatccctctctgggagagccgctgttcccttcctgtagcagcagcatttatgaatggggtgaatggggctattgtcgacggcacagctaatgcccgaacccagcccctgtcggcagagacagagccccacattattatgtgaataacaatgttttctgttttaagggtgtcaggagtttcgctttttaaaaaaatgtctgttcctgcaatagtaactcttctttctcttgagagtaaaaaatgaaataaaataaatccacgctgcacaggtgctcggctcattctttcaggagctctgccctgtgacccca

SEQ ID NO: 33276 - DNA, 1686 bp, Homo sapiens
  source 1..1686: mol_type = unassigned DNA
atgccgtcgtttccggggctgcttccgagccggacccaagggccggggcgtggaggagtagaggggcgagcgcatgcgcacaggactacacgtcccgacaggcgtcgggagcggcggcccagttccttgtgggagctgtagttctgcaggcgcggaagccgtggtgctcggccggcagagcactcggtttcccagagggctgagcgcgccgcacggaggtgcggcgccgaccaagatggagactgccgagcagccttgagccgttgagcagctgaacagaggccatgccggggcactccgaggcctgagacgaccacgcctgtgccgctgaggaccttcatcagggctccgtccacttggcccgcttggctgtccaatcacactccagtgtcaaccactggcacccagcagccaagagaggtgtggcgtggccctggggacgcatggctgaggcaggaacaggtgagccgtcccccagcgtggagggcgaacacgggacggagtatgacacgctgccttccgacacagtctccctcagtgactcggactctgacctcagcttgcccggtggtgctgaagtggaagcactgtccccgatggggctgcctggggaggaggattcaggtcctgatgagccgccctcacccccgtcaggcctcctcccagccacggtgcagccattccatctgagaggcatgagctccaccttctcccagcgcagccgtgacatctttgactgcctggagggggcggccagacgggctccatcctctgtggcccacaccagcatgagtgacaacggaggcttcaagcggcccctagcgccctcaggccggtctccagtggaaggcctgggcagggcccatcggagccctgcctcaccaagggtgcctccggtccccgactacgtggcacaccccgagcgctggaccaagtacagcctggaagatgtgaccgaggtcagcgagcagagcaatcaggccaccgccctggccttcctgggctcccagagcctggctgcccccactgactgcgtgtcctccttcaaccaggatccctccagctgtggggaggggagggtcatcttcaccaaaccagtccgaggggtcgaagccagacacgagaggaagagggtcctggggaaggtgggagagccaggcaggggcggccttgggaatcctgccacagacaggggcgagggccctgtggagctggcccatctggccgggcccgggagcccagaggctgaggagtggggcagccaccatggaggcctgcaggaggtggaggcactgtcagggtctgtccacagtgggtctgtgccaggtctcccgccggtggaaactgttggcttccatggcagcaggaagcggagtcgagaccacttccggaacaagagcagcagccccgaggacccaggtgctgaggtctgagagggagatggcccagcctgaccccactggccactgccatcctgctgccttcccagtggggctggtcagggggcagcctggccactgcctagctggaatgggaggaagcctgcaggtggcaccggtggccctggctgcagttctgggcagcatcctcccaagcagagaccttgctgaagctcctggggtgtggggtgtgggctggaagcactggctccctggtagggacaataaaggttttgggtctttctga

SEQ ID NO: 33277 - DNA, 1542 bp, Homo sapiens
  source 1..1542: mol_type = unassigned DNA
ccctcctcttcctgttcttggtcaattccggtcttgtttccccaacaaatgccgtcgtttccggggctgcttccgagccggacccaagggccggggcgtggaggagtagaggggcgagcgcatgcgcacaggactacacgtcccgacaggcgtcgggagcggcggcccagttccttgtgggagctgtagttctgcaggcgcggaagccgtggtgctcggccggcagagcactcggtttcccagagggctgagcgcgccgcacggaggtgcggcgccgaccaagatggagactgccgagcagccttgagccgttgagcagctgaacagaggccatgccggggcactccgaggcctgagacgaccacgcctgtgccgctgaggaccttcatcagggctccgtccacttggcccgcttggctgtccaatcacactccagtgtcaaccactggcacccagcagccaagagaggtgtggcgtggccctggggacgcatggctgaggcaggaacaggcctcctcccagccacggtgcagccattccatctgagaggcatgagctccaccttctcccagcgcagccgtgacatctttgactgcctggagggggcggccagacgggctccatcctctgtggcccacaccagcatgagtgacaacggaggcttcaagcggcccctagcgccctcaggccggtctccagtggaaggcctgggcagggcccatcggagccctgcctcaccaagggtgcctccggtccccgactacgtggcacaccccgagcgctggaccaagtacagcctggaagatgtgaccgaggtcagcgagcagagcaatcaggccaccgccctggccttcctgggctcccagagcctggctgcccccactgactgcgtgtcctccttcaaccaggatccctccagctgtggggaggggagggtcatcttcaccaaaccagtccgaggggtcgaagccagacacgagaggaagagggtcctggggaaggtgggagagccaggcaggggcggccttgggaatcctgccacagacaggggcgagggccctgtggagctggcccatctggccgggcccgggagcccagaggctgaggagtggggcagccaccatggaggcctgcaggaggtggaggcactgtcagggtctgtccacagtgggtctgtgccaggtctcccgccggtggaaactgttggcttccatggcagcaggaagcggagtcgagaccacttccggaacaagagcagcagccccgaggacccaggtgctgaggtctgagagggagatggcccagcctgaccccactggccactgccatcctgctgccttcccagtggggctggtcagggggcagcctggccactgcctagctggaatgggaggaagcctgcaggtggcaccggtggccctggctgcagttctgggcagcatcctcccaagcagagaccttgctgaagctcctggggtgtggggtgtgggctggaagcactggctccctggtagggacaataaaggttttgggtctttctga

SEQ ID NO: 33278 - DNA, 863 bp, Homo sapiens
  source 1..863: mol_type = unassigned DNA
cgaccaagatggagactgccgagcagccttgagccgggctgctcaaggtgatggtcgacaccccactttcctgagagcttgaccctcagatgccagggccttggctgcagattccttgggagctcccggggatcttccagcaaataggagcaaatcttttccccgtggatcaggaaggtgcacgctctttgtggaatacgactgctcaccccgcacagcaagcagcttataagtggccctcctgcctgatttcagccctgggttcaagccctgggtggctgcttactaccaaaatcgctcagtagctccaagcctgcctgcagagggttggcaccattaaatgagttgagcagctgaacagaggccatgccggggcactccgaggcctgagacgaccacgcctgtgccgctgaggaccttcatcagggctccgtccacttggcccgcttggctgtccaatcacactccagtgtcaaccactggcacccagcagccaagagaggtgtggcgtggccctggggacgcatggctgaggcaggaacaggtgagccgtcccccagcgtggagggcgaacacgggacggagtatgacacgctgccttccgacacagtctccctcagtgactcggactctgacctcagcttgcccggtggtgctgaagtggaagcactgtccccgatggggctgcctggggaggaggattcaggtcctgatgagccgccctcacccccgtcaggcctcctcccagccacggtgcagccattccatctgagaggcatgagctccaccttctcccagcgcagccgtgacatctttgactgcctggagggggcggccagacgggctccatcctctgtggccca

SEQ ID NO: 33279 - DNA, 974 bp, Homo sapiens
  source 1..974: mol_type = unassigned DNA
gcggcgccgaccaagatggagactgccgagcagccttgagccgggctgctcaaggtgatggtcgacaccccactttcctgagagcttgaccctcagatgccagggccttggctgcagattccttgggagctcccggggatcttccagcaaataggagcaaatcttttccccgtggatcaggaagttgagcagctgaacagaggccatgccggggcactccgaggcctgagacgaccacgcctgtgccgctgaggaccttcatcagggctccgtccacttggcccgcttggctgtccaatcacactccagtgtcaaccactggcacccagcagccaagagaggtgtggcgtggccctggggacgcatggctgaggcaggaacaggtgagccgtcccccagcgtggagggcgaacacgggacggagtatgacacgctgccttccgacacagtctccctcagtgactcggactctgacctcagcttgcccggtggtgctgaagtggaagcactgtccccgatggggctgcctggggaggaggattcaggtcctgatgagccgccctcacccccgtcaggcctcctcccagccacggtgcagccattccatctgagaggcatgagctccaccttctcccagcgcagccgtgacatctttgactgcctggagggggcggccagacgggctccatcctctgtggcccacaccagcatgagtgacaacggaggcttcaagcggcccctagcgccctcaggccggtctccagtggaaggcctgggcagggcccatcggagccctgcctcaccaagggtgcctccggtccccgactacgtggcacaccccgagcgctggaccaagtacagcctggaagatgtgaccgaggtcagcgagcagagcaatcaggccaccgccctggccttcctgggctcccagagcctggctgcccccactgactgcgtgtcctccttcaaccagg

SEQ ID NO: 33280 - DNA, 851 bp, Homo sapiens
  source 1..851: mol_type = unassigned DNA
ctcagtagctccaagcctgcctgcagagggttggcaccattaaatgagttgagcagctgaacagaggccatgccggggcactccgaggcctgagacgaccacgcctgtgccgctgaggaccttcatcagggctccgtccacttggcccgcttggctgtccaatcacactccagtgtcaaccactggcacccagcagccaagagaggtgtggcgtggccctggggacgcatggctgaggcaggaacaggcctcctcccagccacggtgcagccattccatctgagaggcatgagctccaccttctcccagcgcagccgtgacatctttgactgcctggagggggcggccagacgggctccatcctctgtggcccacaccagcatgagtgacaacggaggcttcaagcggcccctagcgccctcaggccggtctccagtggaaggcctgggcagggcccatcggagccctgcctcaccaagggtgcctccggtccccgactacgtggcacaccccgagcgctggaccaagtacagcctggaagatgtgaccgaggtcagcgagcagagcaatcaggccaccgccctggccttcctgggctcccagagcctggctgcccccactgactgcgtgtcctccttcaaccaggatccctccagctgtggggaggggagggtcatcttcaccaaaccagtccgaggggtcgaagccagacacgagaggaagagggtcctggggaaggtgggagagccaggcaggggcggccttgggaatcctgccacagacaggggcgagggccctgtggagctggcccatctggccgggcccgggagcccagaggctgaggagtgggg

SEQ ID NO: 33281 - DNA, 1423 bp, Homo sapiens
  source 1..1423: mol_type = unassigned DNA
gttgagcagctgaacagaggccatgccggggcactccgaggcctgagacgaccacgcctgtgccgctgaggaccttcatcagggctccgtccacttggcccgcttggctgtccaatcacactccagtgtcaaccactggcacccagcagccaagagaggtgtggcgtggccctggggacgcatggctgaggcaggaacaggtgagccgtcccccagcgtggagggcgaacacgggacggagtatgacacgctgccttccgacacagtctccctcagtgactcggactctgacctcagcttgcccggtggtgctgaagtggaagcactgtccccgatggggctgcctggggaggaggattcaggtcctgatgagccgccctcacccccgtcaggcctcctcccagccacggtgcagccattccatctgagaggcatgagctccaccttctcccagcgcagccgtgacatctttgactgcctggagggggcggccagacgggctccatcctctgtggcccacaccagcatgagtgacaacggaggcttcaagcggcccctagcgccctcaggccggtctccagtggaaggcctgggcagggcccatcggagccctgcctcaccaagggtgcctccggtccccgactacgtggcacaccccgagcgctggaccaagtacagcctggaagatgtgaccgaggtcagcgagcagagcaatcaggccaccgccctggccttcctgggctcccagagcctggctgcccccactgactgcgtgtcctccttcaaccaggatccctccagctgtggggaggggagggtcatcttcaccaaaccagtccgaggggtcgaagccagacacgagaggaagagggtcctggggaaggtgggagagccaggcaggggcggccttgggaatcctgccacagacaggggcgagggccctgtggagctggcccatctggccgggcccgggagcccagaggctgaggagtggggcagccaccatggaggcctgcaggaggtggaggcactgtcagggtctgtccacagtgggtctgtgccaggtctcccgccggtggaaactgttggcttccatggcagcaggaagcggagtcgagaccacttccggaacaagagcagcagccccgaggacccaggtgctgaggtctgagagggagatggcccagcctgaccccactggccactgccatcctgctgccttcccagtggggctggtcagggggcagcctggccactgcctagctggaatgggaggaagcctgcaggtggcaccggtggccctggctgcagttctgggcagcatcctcccaagcagagaccttgctgaagctcctggggtgtggggtgtgggctggaagcactggctccctggtagggacaataaaggttttgggtctttctg

SEQ ID NO: 33282 - DNA, 979 bp, Homo sapiens
  source 1..979: mol_type = unassigned DNA
cgagagttcgtttgttctctggcggggaggtcttgctggcacatatagtggagaaaggccgggctctgcgttcatgtggagaaagagacggcttccttcagcctacggacatgaaggagtcaactctaccttccactcgttgccggctttcgccgagaaccccgagaaacggactaccggagtccctatcttgcagcccgatccccgctacccgtcggagtgccccgctgaccaggctgcttctggccgcggcggcgttccgctgcagaggacgggagtgcgaatctgggaagcagggttctggttgaactccagcttcgtctgcaacatactgtgtgacttgggcaaattatttcccccgccccgttcctgccagctttaaaacggtcatcagtggggggtgctgcgtatcccctttcactggggtggcttcttcactgaggagagtcgcgcctcagaggaactgagttgagcagctgaacagaggccatgccggggcactccgaggcctgagacgaccacgcctgtgccgctgaggaccttcatcagggctccgtccacttggcccgcttggctgtccaatcacactccagtgtcaaccactggcacccagcagccaagagaggtgtggcgtggccctggggacgcatggctgaggcaggaacaggtgagccgtcccccagcgtggagggcgaacacgggacggagtatgacacgctgccttccgacacagtctccctcagtgactcggactctgacctcagcttgcccggtggtgctgaagtggaagcactgtccccgatggggctgcctggggaggaggattcaggtcctgatgagccgccctcacccccgtcaggcctcctcccagccacggtgcagccattccatctgagaggcatgagctccaccttctcccagcgcagccgtgacatctttgactgcctggagggggcggccagacgggctccatcctctg

SEQ ID NO: 33283 - DNA, 912 bp, Homo sapiens
  source 1..912: mol_type = unassigned DNA
ccattaaatgaggtaacgagtcaaaagtccctaccctgggtcctagcctgtcaggggctccgaaaacccaggctcaggtcggtcctgcccggcacctgtttcacacatgtacactccggtctgaggttggtcctctcccccaccccacccacctgcagttgagcagctgaacagaggccatgccggggcactccgaggcctgagacgaccacgcctgtgccgctgaggaccttcatcagggctccgtccacttggcccgcttggctgtccaatcacactccagtgtcaaccactggcacccagcagccaagagaggtgtggcgtggccctggggacgcatggctgaggcaggaacaggtgagccgtcccccagcgtggagggcgaacacgggacggagtatgacacgctgccttccgacacagtctccctcagtgactcggactctgacctcagcttgcccggtggtgctgaagtggaagcactgtccccgatggggctgcctggggaggaggattcaggtcctgatgagccgccctcacccccgtcaggcctcctcccagccacggtgcagccattccatctgagaggcatgagctccaccttctcccagcgcagccgtgacatctttgactgcctggagggggcggccagacgggctccatcctctgtggcccacaccagcatgagtgacaacggaggcttcaagcggcccctagcgccctcaggccggtctccagtggaaggcctgggcagggcccatcggagccctgcctcaccaagggtgcctccggtccccgactacgtggcacaccccgagcgctggaccaagtacagcctggaagatgtgaccgaggtcagcgagcagagcaatcaggccaccgccctggccttcctgggctcccagagcctgg

SEQ ID NO: 33284 - DNA, 2461 bp, Homo sapiens
  source 1..2461: mol_type = unassigned DNA
ttctgtttaatgttttattaaacataggggtgggttaaaccactgggttttaaatgaagcacttagagcttttcaacttgccccatagctttgtctcagaaccgatcattctattatcattagttttgagaatgccgtgtaaagagcaaagtaaccactggtggttgcactccggagcgggcgaggacggctagttcctgcagtgcccaggcctgcacggaagcgccctggcacaactcagctgaggatacacgctttttcccgcgcagccggagggctgaacagcaaagcactccccgggggaactgtgtgtcagcgcagcctggagagagcaggcccagggggcagctccaccacaggagacaggacacgcctcagtctgggcaaattcccggcctcctttggctctaagccagcagccgccgcccgcgacctcctctcctcctccgtcgtcaccccggccgccctgccagccccgaacttgcccgcgcctggccgcgcggcccctcagcccacggggctggcggcgcggttgggatgggaccgatgtggcgcatgcgtggtggcgccactaggcgcgggagttgctgcggcggggacggtgctgcggacggccgagggccaggccgctccggccgggctcgtggtgggggcagccccagcggcggcggcggcggcgtgggctggcgaggccgcgcggacggcgcccgacagcagctggaggagcggtttgccgacctggcggcgagccacttggaggccatccgtgcgcgggacgagtgggaccggcagaacgcgcggctgcgtcaggagaacgcccggctgcggctcgagaaccggcggctgaagcgcgagaaccgcagcctcttccgtcaggctttgcggctccccggcgaaggcggcaacgggacgcccgcggaggcacgccgggtccctgaagaggccagcacgaaccggagggctagagacagcggccgagaggacgagccgggcagccccagggccctgagggcccgacttgagaagctggaagccatgtaccgccgggccctgctgcagctgcacctcgagcagcggggaccacgtccgagcggggacaaggaggagcagcctctacaggaacccgactccggcctccgctcccgggactcggagccctctgggccctggctgtagccgaggccgcagccggtgagaggcggagcctcgagcgggcccctcctcctccgttcccagctacccccgacctcgcgcacgccctggcccgctccctgcccgcggataccttggactacggtgccttcccgcccccaccagtggacacttccgggtggcgcttggccatccgcttggtggaggtcgagtgggtgcaagggccctcaggacctcccacatgtacagttcccctgcctcttgccccggctagtttccctggagagaggcctagccaacaacgaagggacggattttaaaacagcgagaactgggtgccaagaaacacttcatattccctgaacttttctggatgttgtgcgaacctgttgtatttttttttttcctgtattttggttctgagggatgagtaatgtgtttttagttggttgagtttatccattcttcaatcccctaaagccttcagctattctttcatatgtggccaacattttaagtacagtgtttgcttttataagtcggtgttacttggatgtcctataaaatacccactttttataaagatgatatttataacctaggaactcatgcctgtcttggctgcagtccctgtacatctaatatatactgatttgtttgcccccagagaatttttaaggtatctgcctatatcgtgatcttttgaaatggtaaataaatctggtgcattaaaaattatctgaaaggttgcggcgagtattatttgaagtgtgttacatttttatatttttaaaaagatacctttatgaatatactaatttaaatctggttttagttgtccttagtaaactatcatgttcttttagcttcatgtaacagtgatcttttaaaataatctaaagattaggtagtctaaaagttattttaatctttaatgttcaattagcttaattagtacgtagataatttgccttattttgactaaggacttttaagaaattataaattacttgtatatcaaaagttcccctaacaaagtaatttaagtctcagttgttatttcaatggcacaaaaaagtgactagtttagcaataaatgtcctaaaattacttttattgcgcttcgttaataacacttttgccaactaagtaatgaagaggataccattgtgcctgataaaaaaatcataggtccaagagtgtttcaatgatggaaaacatttcaggggaaaaaatcatgaatagaattgtcaagggaataaaatatactagttatggcatagtccaaaagtattaaatattatatatt

SEQ ID NO: 33285 - DNA, 1545 bp, Homo sapiens
  source 1..1545: mol_type = unassigned DNA
tcctcctctgcgtcctcggccgcggcccgggtccctcgcaaagccgctgccatcccggagggcccagccagcgggctcccggaggctggccgggcaggcgtggtgcgcggtaggagctgggcgcgcacggctaccgcgcgtggaggagacactgccctgccgcgatgggggcccggggcgctccttcacgccgtaggcaagcggggcggcggctgcggtacctgcccaccgggagctttcccttccttctcctgctgctgctgctctgcatccagctcgggggaggacagaagaaaaaggagaatcttttagctgaaaaagtagagcagctgatggaatggagttccagacgctcaatcttccgaatgaatggtgataaattccgaaaatttataaaggcaccacctcgaaactattccatgattgttatgttcactgctcttcagcctcagcggcagtgttctgtgtgcaggcaagctaatgaagaatatcaaatactggcgaactcctggcgctattcatctgctttttgtaacaagctcttcttcagtatggtggactatgatgaggggacagacgtttttcagcagctcaacatgaactctgctcctacattcatgcattttcctccaaaaggcagacctaagagagctgatacttttgacctccaaagaattggatttgcagctgagcaactagcaaagtggattgctgacagaacggatgttcatattcgggttttcagaccacccaactactctggtaccattgctttggccctgttagtgtcgcttgttggaggtttgctttatttgagaaggaacaacttggagttcatctataacaagactggttgggccatggtgtctctgtgtatagtctttgctatgacttctggccagatgtggaaccatatccgtggacctccatatgctcataagaacccacacaatggacaagtgagctacattcatgggagcagccaggctcagtttgtggcagaatcacacattattctggtactgaatgccgctatcaccatggggatggttcttctaaatgaagcagcaacttcgaaaggcgatgttggaaaaagacggataatttgcctagtgggattgggcctggtggtcttcttcttcagttttctactttcaatatttcgttccaagtaccacggctatccttatagtgatctggactttgagtgagaagatgtgatttggaccatggcacttaaaaactctataacctcaggcaactttttaattaaatgaagccaagtgggatttgcataaagtgaatgtttaccatgaagataaactgttcctgactttatactattttgaattcattcatttcattgtgatcagctagcttattcttgtgtactttttttaaactgtgggttttcctagtaaatttaatttacagaaatcaatggtagcatttagtaatctacaaaggaaatatcaaagtgtttttcaagcctgttatattcagtgtgtgccacaggattgaaataaatgacaatgtaattatgaa

SEQ ID NO: 33286 - DNA, 3683 bp, Homo sapiens
  source 1..3683: mol_type = unassigned DNA
gcctttccaggtcttctcccggtgaaccggatgctctgtcagtctcctcctctgcgtcctcggccgcggcccgggtccctcgcaaagccgctgccatcccggagggcccagccagcgggctcccggaggctggccgggcaggcgtggtgcgcggtaggagctgggcgcgcacggctaccgcgcgtggaggagacactgccctgccgcgatgggggcccggggcgctccttcacgccgtaggcaagcggggcggcggctgcggtacctgcccaccgggagctttcccttccttctcctgctgctgctgctctgcatccagctcgggggaggacagaagaaaaaggagaatcttttagctgaaaaagtagagcagctgatggaatggagttccagacgctcaatcttccgaatgaatggtgataaattccgaaaatttataaaggcaccacctcgaaactattccatgattgttatgttcactgctcttcagcctcagcggcagtgttctgtgtgcaggcaagctaatgaagaatatcaaatactggcgaactcctggcgctattcatctgctttttgtaacaagctcttcttcagtatggtggactatgatgaggggacagacgtttttcagcagctcaacatgaactctgctcctacattcatgcattttcctccaaaaggcagacctaagagagctgatacttttgacctccaaagaattggatttgcagctgagcaactagcaaagtggattgctgacagaacggatgttcatattcgggttttcagaccacccaactactctggtaccattgctttggccctgttagtgtcgcttgttggaggtttgctttatttgagaaggaacaacttggagttcatctataacaagactggttgggccatggtgtctctgtgtatagtctttgctatgacttctggccagatgtggaaccatatccgtggacctccatatgctcataagaacccacacaatggacaagtgagctacattcatgggagcagccaggctcagtttgtggcagaatcacacattattctggtactgaatgccgctatcaccatggggatggttcttctaaatgaagcagcaacttcgaaaggcgatgttggaaaaagacggataatttgcctagtgggattgggcctggtggtcttcttcttcagttttctactttcaatatttcgttccaagtaccacggctatccttatagctttttaattaaatgaagccaagtgggatttgcataaagtgaatgtttaccatgaagataaactgttcctgactttatactattttgaattcattcatttcattgtgatcagctagcttattcttgtgtactttttttaaactgtgggttttcctagtaaatttaatttacagaaatcaatggtagcatttagtaatctacaaaggaaatatcaaagtgtttttcaagcctgttatattcagtgtgtgccacaggattgaaataaatgacaatgtaattatgaattcatgttttagagctgtttactcattagtaaaggaccgcaatgttagtaaagaaaacctatgaaatgtatgttaaagattcttagtattgtacagggataaagcaaatgcatgaaaatatgtcatgtactgaaaattaaacttacttcagtttcagttataaaggacgtgcactgttacgaatagtgttttgttattaattataactagataaaggtatataggacagggaactggatgaatggtacctacaatttggatgcctaaccaaggactagagctccttcttgagatctaaatctaaagtaaatgtgcattaaagcagtgtgcttcaaaggcatcagacgatgaaagcaacataccacaactaggagttatttctcaaacttaaatgtcctctgggaatccagacttaaaaataagagcaaacttaacacactatccattttcgagcaaacctaacccactatatccattttgctcatgtgttttatgcaaccagctttccatcaaatcctcaatctttgaatccaggtaaaaggttaattatcctaggattagtgaatgattcaatgaagctttcttgaaaacaaacataggagtgtaatgtactattatgtttgtatcctgttttagtttataaagcactttcacatacattatggtatttcttcctcacaataaccttgtaaattagtcaggaaatgtaaattttatctgactcatagaactaatggaagctgaaagccaaaaataaagtttataaccaggccttcaaactctcaaacatggatttttatattctgtggagttatccaaattaattagggtttaggaaagcagttcttcttgagtcagttcaataagtgtttgctttttgtttttaaggtttgttatctaattttcattaagatttgagtaacagaccatggagaattgttttcattgggagttccagctatatagcctcaaacaagaaacgggtgtacaaccattgagtttacttacttaaatctgtgaatttcaatgaagaatgggaatataaaggcctactggggcatgtttatcaagttatatcccagggcaatgtgtatgctagcaggatgaatgctatcttttcaaaacataatattcagtgaaaattacgtaataattgtaagtttataatcatactcccaaatctgttactaaaaataacataaattctcctagttcatgtacttagatgaataaatttagttttggaatgacgtttatggaaaagcaatagatgaacttaatcatttgatcactgcctatcactaggcagaacttgacctgtaattcttaatccattgtagattttttacattttactcaaaacttcatacatagagactctcaggtcaaattttacaagtattaaacatttgttaattataatcacttttgtttgtatccttaaatctcagaattatcttgcagttaatatgcagctgattaaatgatattacaaattatctctaatctcactgtaaatcttttaatcatatcaaagtcaggtcatcctcagacactataactaagatagataaggagtactttactataccatattagtaaaggttttctagctcttattttctaatttcctctgagcatttaaaattacatccagtgataaaaacaatatttttttttcagaatttcatgctttaaaaagctgtggcttctctatagacaactgttacattagggaagtgattctagagcaaaatatactgcctcaacataagtcgttactgactggaaaatgctataggcagaattgcaaagagtggctcaaacatatagtttgcttgcagaatgtaacgtgcaaaatcacatacatgcgatgtatttacctttgctagacaatgagaattgaataattgatttgtacctggtatgttatatcctccagtgtcactttttaaccagattcactgtgcgttccaaactgtcataaaaattgattatatgtttaacaattgtttttctactacagtggagagaaaaatcccaattataaaattccacctaaaggagtttcattttgtaataacatctgattaataacttgttgcattttgcttaacatactgttcctggcattagatattcacatgagtaagcccagtagca

SEQ ID NO: 33287 - DNA, 1498 bp, Homo sapiens
  source 1..1498: mol_type = unassigned DNA
cggccgcggcccgggtccctcgcaaagccgctgccatcccggagggcccagccagcgggctcccggaggctggccgggcaggcgtggtgcgcggtaggagctgggcgcgcacggctaccgcgcgtggaggagacactgccctgccgcgatgggggcccggggcgctccttcacgccgtaggcaagcggggcggcggctgcggtacctgcccaccgggagctttcccttccttctcctgctgctgctgctctgcatccagctcgggggaggacagaagaaaaaggagaatcttttagctgaaaaagtagagcagctgatggaatggagttccagacgctcaatcttccgaatgaatggtgataaattccgaaaatttataaaggcaccacctcgaaactattccatgattgttatgttcactgctcttcagcctcagcggcagtgttctgtgtgcaggcaagctaatgaagaatatcaaatactggcgaactcctggcgctattcatctgctttttgtaacaagctcttcttcagtatggtggactatgatgaggggacagacgtttttcagcagctcaacatgaactctgctcctacattcatgcattttcctccaaaaggcagacctaagagagctgatacttttgacctccaaagaattggatttgcagctgagcaactagcaaagtggattgctgacagaacggatgttcatattcgggttttcagaccacccaactactctggtaccattgctttggccctgttagtgtcgcttgttggaggtttgctttatttgagaaggaacaacttggagttcatctataacaagactggttgggccatggtgtctctgtgtatagtctttgctatgacttctggccagatgtggaaccatatccgtggacctccatatgctcataagaacccacacaatggacaagtgagctacattcatgggagcagccaggctcagtttgtggcagaatcacacattattctggtactgaatgccgctatcaccatggggatggttcttctaaatgaagcagcaacttcgaaaggcgatgttggaaaaagacggataatttgcctagtgggattgggcctggtggtcttcttcttcagttttctactttcaatatttcgttccaagtaccacggctatccttatagtgatctggactttgagtgagaagatgtgatttggaccatggcacttaaaaactctataacctcagctttttaattaaatgaagccaagtgggatttgcataaagtgaatgtttaccatgaagataaactgttcctgactttatactattttgaattcattcatttcattgtgatcagctagcttattcttgtgtactttttttaaactgtgggttttcctagtaaatttaatttacagaaatcaatggtagcatttagtaatctacaaaggaaatatcaaagtgtttttcaagcctgttatattcagtgtgtgccacaggat

SEQ ID NO: 33288 - DNA, 1449 bp, Homo sapiens
  source 1..1449: mol_type = unassigned DNA
ggagggcccagccagcgggctcccggaggctggccgggcaggcgtggtgcgcggtaggagctgggcgcgcacggctaccgcgcgtggaggagacactgccctgccgcgatgggggcccggggcgctccttcacgccgtaggcaagcggggcggcggctgcggtacctgcccaccgggagctttcccttccttctcctgctgctgctgctctgcatccagctcgggggaggacagaagaaaaaggagaatcttttagctgaaaaagtagagcagctgatggaatggagttccagacgctcaatcttccgaatgaatggtgataaattccgaaaatttataaaggcaccacctcgaaactattccatgattgttatgttcactgctcttcagcctcagcggcagtgttctgtgtgcaggcaagctaatgaagaatatcaaatactggcgaactcctggcgctattcatctgctttttgtaacaagctcttcttcagtatggtggactatgatgaggggacagacgtttttcagcagctcaacatgaactctgctcctacattcatgcattttcctccaaaaggcagacctaagagagctgatacttttgacctccaaagaattggatttgcagctgagcaactagcaaagtggattgctgacagaacggatgttcatattcgggttttcagaccacccaactactctggtaccattgctttggccctgttagtgtcgcttgttggaggtttgctttatttgagaaggaacaacttggagttcatctataacaagactggttgggccatggtgtctctgtgtatagtctttgctatgacttctggccagatgtggaaccatatccgtggacctccatatgctcataagaacccacacaatggacaagtgagctacattcatgggagcagccaggctcagtttgtggcagaatcacacattattctggtactgaatgccgctatcaccatggggatggttcttctaaatgaagcagcaacttcgaaaggcgatgttggaaaaagacggataatttgcctagtgggattgggcctggtggtcttcttcttcagttttctactttcaatatttcgttccaagtaccacggctatccttatagtgatctggactttgagtgagaagatgtgatttggaccatggcacttaaaaactctataacctcaggcaaaagtcctcagataaaaatgtctaccaaaagactgacacgtggagttaatcatttgacagatgcaatgcttccacccccaacaaatatactttcttaacttctgtttgttatcacttagggaaaaaaggcagtcaacaaatatatttcattctatctaggaaaaatgtagccaaatcttttttcccattaacaaataatgtaagccttaatattcaagggtaataaaaaatacaagtcttccaaa

SEQ ID NO: 33289 - DNA, 3596 bp, Homo sapiens
  source 1..3596: mol_type = unassigned DNA
cattcttctctctgctctctgagctttccgttgcttccctgcccatctgtgctctcagcagcaccagcaaagttggcctcaaacttgaacaaagctgcaggctccagcgtctttctgggagctccgcgggggcagcaggcaggccccagcctctgaactcagctggcttgagaagctcagcccaacccttccagcacccagccggccctccgtctcctgagggacgcccctgcccccgacctggaggccctcagtctgggctggggaatggcgcgctgaggtccctccagagccccttgtcccagcctggagctgcagccgcgcaaggcccaggcccccatggcccacccggtgcagtccgagtttccttcagcacaggagccaggctccgccgcattcctggacctgccggagatggagatactcctcaccaaggcagagaacaaggatgacaagaccctgaatctgtccaagaccctctcggggcctctggatctggagcagaacagccagggcctacccttcaaggccatctccgaggggcacctggaggccccactgcctcggtccccctcccgggccagctcaaggagggcgtcctccatcgccaccacctcctatgcccaagaccaagaagcccccagagattacctcatcctggccgtcgtcgcctgcttctgccccgtctggcccctcaacctcatccccctcatcatttccatcatgtctcgaagcagcatgcaacagggcaacgtggacggcgcccggaggctgggccgcctggctcggctgctcagcattaccctcatcatcatgggcatcgtcattatcatggtggccgtgaccgtcaacttcacagttcagaagaaataaacttaagcagggagctgggctagcagaggccggccctggccatcgggagagctctgacctgcacaccgcgggaggccagggtgctgactgtcaagcatcccctgtccccaagttccaaaagcacagactcaaagggaaaccccccagtcacccactgtcagcccccatctgacaagaaagcctggagcgaggaaggaaagcacagcgaacccaatgggtaacgtggtttactctcccggacgcgtcctgggatctcaaccccagcagtctggcttgtttctcattcccacaatttcctgggttccaccaagcagcgaaaactgccaggatgaatgaggaaaaaacccagccccacaaacgagacacacgctggcggggagagacgcagcagagctccttcctgtctgtggactcggagcaaagacgtggggccccatcttttgtgttttcctcaagcggggaaagaatggactgtttgcatgcttcgtgccacacgcccgcggtgatcccagccagggccccgagcgcagaggcggagctgtgctcagcacaggcctgggacctcccccggcaggcacctgtggggggtgcagctcccgggaaggaggcaactgcctcacttaacatcctccgctgcaaggtggtggcgccgagaggcgtgtctgtgaagacaggtaccaggatggcaggacccgcacgcctcttcccacacctgtcagcttcggaagcatctctcgaggactctggtcccaggatgtctcccaggacaagccagtctgcctcttcctcctacttctgctgtagcctgggaccagacctggccaaggtcagccagcggggagggccgaggtctgagctctcgtcctgccgtggcccccgcgatggcctggggtgcaagcttggggctccgtctggtgctgcttaggtagtttcaggcttccagcccagccctatgctctgtgcttggccctgggcccctggccatccacaaacagcagaggccttccctggaggaggctttgggaccacccctggggggacttcccaaagggtcccaggctgtcaggggcgtttgcgccacctgcaagggcgtgggtcagagagtttttatgggggtctgttgtttgaccgtcctgagaccgagggaagggctcagctgaaggaccccgtctgcaggagagtcgggggaccaggtttgggaatacacttgcatgtacagagcctggggcctggacgccacggcctctcatcttaggacctaatgggacccccgaaaggagccaagtggggccctcggcctcttccttcgttccaggcccatgattttccctacacttctccctggcccaggctccagccacaggcacctctcctgcccccgcccaccctcctgaccgcagctcccaggccctggagacctccaggctttcctgccctgggcagccccacctcacagccagagtcaatgccttcatgggaagggctcccagccacacccagagtggcccaaagctgttgaagtcagcatcctttgtcccatcaggaccctcctgcctcctctccaggcccttgttcgcctccccaccctcctcagaggcccggggaagggaagagcaggtcagtacagaggttctgtctacagggaggggccctgggtctatgcacagctggagctctgagccttccacagcccgtgtgactgctagagggcaggggtgcagggctcagggggcccgggctggtcctttggggctggtgttcctacgtcagtccccacctggggaataaactccagcctctcctgctcatacagaagggactggttgggtttgctttatgggatctttgagaccaaaacagatgctcctgtttgctgggggagggtgtgagcacggagtatttctgtccctcgtgaagtcacgtcacacaggggagaggcgaggtcgatggaactggccacgcacaggctctggctctggaaggagggatgatgagtgggcgttttcccggcaggcccccggggtcctcagcctcagcaacccagggagaggacagaaacgaaccgatggttgagggattgtcacgggaggaacatgacacccgaagggactctaggtgccctcggagtgccacacatgcccagaccttctcacacccacacaaataggctctgccgtgcactcctacacacacacacacacacacacacgcttgttcacactcagaacccaggacagccacagccaccgcttaggggaagccactgcagatgcccctggaatgggcacagcacagccagggcgctcttccaggcaggcgaggataacttgagagtttcctagggcaccagggacagagctcagaggcccccgaggtgtgtgtaggaggcggaggcccgcagagcacagagcaggagaagggcttgggccctggaggagaaagccattctggacaccaggggacctggacggagggtccccacagcccgtgccccacgccgcctggaggccagaggggtcagtggccctgctgtcccggctccatcttggttctagccgccacctgcatgaacacagtggcccggcttaacgcactaacccagcctctccctgtgtcccacagggagtagcaagacccaccccacactgccttcaccatctacaccagtgacgccgctgtgtgtcttagcatggaaataaataaacctgaatgtacgtgctcgc

SEQ ID NO: 33290 - DNA, 1824 bp, Homo sapiens
  source 1..1824: mol_type = unassigned DNA
aatcagtcattaaggctcactggcaagcccttcgtacttcttccctctccggcactagcttccttaagtcgactctgtgaaatacctgctaatcttatcctgaaccagagtttcgaccctcggaacagtcttgcccacatctttgggacccgattcgtcctgctgattccggcactcgaggggcgggttggttggaacccaccccaccaggcccctctcaatcccacacggtgtccacccttgcccgcaggacggcggcccggaagtgacgtagtggaagcggaagtggtgtagtggtgccgacttcctgttgtttgaggccgggttgggggtgtgcgattgtgtgggacggtctggggcagcccagcagcggctgaccctctgcctgcggggaagggagtcgccaggcggccgtcatggcggtgtcggagagccagctcaagaaaatggtgtccaagtacaaatacagagacctaactgtacgtgaaactgtcaatgttattactctatacaaagatctcaaacctgttttggattcatatgtttttaacgatggcagttccagggaactaatgaacctcactggaacaatccctgtgccttatagaggtaatacatacaatattccaatatgcctatggctactggacacatacccatataatccccctatctgttttgttaagcctactagttcaatgactattaaaacaggaaagcatgttgatgcaaatgggaagatatatcttccttatctacatgaatggaaacacccacagtcagacttgttggggcttattcaggtcatgattgtggtatttggagatgaacctccagtcttctctcgtcctatttcggcatcctatccgccataccaggcaacggggccaccaaatacttcctacatgccaggcatgccaggtggaatctctccatacccatccggataccctcccaatcccagtggttacccaggctgtccttacccacctggtggtccatatcctgccacaacaagttctcagtacccttctcagcctcctgtgaccactgttggtcccagtagggatggcacaatcagcgaggacaccatccgagcctctctcatctctgcggtcagtgacaaactgagatggcggatgaaggaggaaatggatcgtgcccaggcagagctcaatgccttgaaacgaacagaagaagacctgaaaaagggtcaccagaaactggaagagatggttacccgtttagatcaagaagtagccgaggttgataaaaacatagaacttttgaaaaagaaggatgaagaactcagttctgctctggaaaaaatggaaaatcagtctgaaaacaatgatatcgatgaagttatcattcccacagctcccttatacaaacagatcctgaatctgtatgcagaagaaaacgctattgaagacactatcttttacttgggagaagccttgagaaggggcgtgatagacctggatgtcttcctgaagcatgtacgtcttctgtcccgtaaacagttccagctgagggcactaatgcaaaaagcaagaaagactgccggtctcagtgacctctactgacttctctgataccagctggaggttgagctcttcttaaagtattcttctcttccttttatcagtaggtgcccagaataagttattgcagtttatcattcaagtgtaaaatattttgaatcaataatatattttctgttttcttttggtaaagactggcttttattaatgcactttctatcctctgtaaactttttgtgctgaatgttgggactgctaaataaaatttgttgcataa

SEQ ID NO: 33291 - DNA, 1200 bp, Homo sapiens
  source 1..1200: mol_type = unassigned DNA
ctgttgtttgaggccgggttgggggtgtgcgattgtgtgggacggtctggggcagcccagcagcggctgaccctctgcctgcggggaagggagtcgccaggcggccgtcatggcggtgtcggagagccagctcaagaaaatggtgtccaagccacagtcagacttgttggggcttattcaggtcatgattgtggtatttggagatgaacctccagtcttctctcgtcctatttcggcatcctatccgccataccaggcaacggggccaccaaatacttcctacatgccaggcatgccaggtggaatctctccatacccatccggataccctcccaatcccagtggttacccaggctgtccttacccacctggtggtccatatcctgccacaacaagttctcagtacccttctcagcctcctgtgaccactgttggtcccagtagggatggcacaatcagcgaggacaccatccgagcctctctcatctctgcggtcagtgacaaactgagatggcggatgaaggaggaaatggatcgtgcccaggcagagctcaatgccttgaaacgaacagaagaagacctgaaaaagggtcaccagaaactggaagagatggttacccgtttagatcaagaagtagccgaggttgataaaaacatagaacttttgaaaaagaaggatgaagaactcagttctgctctggaaaaaatggaaaatcagtctgaaaacaatgatatcgatgaagttatcattcccacagctcccttatacaaacagatcctgaatctgtatgcagaagaaaacgctattgaagacactatcttttacttgggagaagccttgagaaggggcgtgatagacctggatgtcttcctgaagcatgtacgtcttctgtcccgtaaacagttccagctgagggcactaatgcaaaaagcaagaaagactgccggtctcagtgacctctactgacttctctgataccagctggaggttgagctcttcttaaagtattcttctcttccttttatcagtaggtgcccagaataagttattgcagtttatcattcaagtgtaaaatattttgaatcaataatatattttctgttttcttttggtaaagactggcttttattaatgcactttctatcctctgtaaactttttgtgctgaatgttgggactgctaaataaaatttgttgcat

SEQ ID NO: 33292 - DNA, 2068 bp, Homo sapiens
  source 1..2068: mol_type = unassigned DNA
gcgggtccccagaagcctacaggtgagtatcggttctccccttcccggctttcggtccggaggaggcgggagcagcttccctgttctgatcctatcgcgggcggcgcagggccggcttggccttccgtgggacggggaggggggcgggatgtgtcacccaaataccagtggggacggtcggtggtggaaccagccgggcaggtcgggtagagtataagagccggagggagcggccgggcggcagacgcctgcagaccatcccagacgccggagcccgagccccgacgagtccccgcgcctcatccgcccgcgtccggtccgcgttcctccgccccaccatggctcggggccccggcctcgcgccgccaccgctgcggctgccgctgctgctgctggtgctggcggcggtgaccggccacacggccgcgcaggacaactgcacgtgtcccaccaacaagatgaccgtgtgcagccccgacggccccggcggccgctgccagtgccgcgcgctgggctcgggcatggcggtcgactgctccacgctgacctccaagtgtctgctgctcaaggcgcgcatgagcgcccccaagaacgcccgcacgctggtgcggccgagtgagcacgcgctcgtggacaacgatggcctctacgaccccgactgcgaccccgagggccgcttcaaggcgcgccagtgcaaccagacgtcggtgtgctggtgcgtgaactcggtgggcgtgcgccgcacggacaagggcgacctgagcctacgctgcgatgagctggtgcgcacccaccacatcctcattgacctgcgccaccgccccaccgccggcgccttcaaccactcagacctggacgccgagctgaggcggctcttccgcgagcgctatcggctgcaccccaagttcgtggcggccgtgcactacgagcagcccaccatccagatcgagctgcggcagaacacgtctcagaaggccgccggtgacgtggatatcggcgatgccgcctactacttcgagagggacatcaagggcgagtctctattccagggccgcggcggcctggacttgcgcgtgcgcggagaacccctgcaggtggagcgcacgctcatctattacctggacgagattcccccgaagttctccatgaagcgcctcaccgccggcctcatcgccgtcatcgtggtggtcgtggtggccctcgtcgccggcatggccgtcctggtgatcaccaaccggagaaagtcggggaagtacaagaaggtggagatcaaggaactgggggagttgagaaaggaaccgagcttgtaggtacccggcggggcaggggatggggtggggtaccggatttcggtatcgtcccagacccaagtgagtcacgcttcctgattcctcggcgcaaaggagacgtttatcctttcaaattcctgccttccccctcccttttgcgcacacaccaggtttaatagatcctggcctcagggtctcctttctttctcacttctgtcttgaaggaagcatttctaaaatgtatcccctttcggtccaacaacaggaaacctgactggggcagtgaaggaagggatggcatagcgttatgtgtaaaaaacaagtatctgtatgacaacccgggatcgtttgcaagtaactgaatccattgcgacattgtgaaggcttaaatgagtttagatgggaaatagcgttgttatcgccttgggtttaaattatttgatgagttccacttgtatcatggcctacccgaggagaagaggagtttgttaactgggcctatgtagtagcctcatttaccatcgtttgtattactgaccacatatgcttgtcactgggaaagaagcctgtttcagctgcctgaacgcagtttggatgtctttgaggacagacattgcccggaaactcagtctatttattcttcagcttgcccttactgccactgatattggtaatgttcttttttgtaaaatgtttgtacatatgttgtctttgataatgttgctgtaattttttaaaataaaacacgaatttaataaaatatgggaaaggcacaaacc

SEQ ID NO: 33293 - DNA, 1885 bp, Homo sapiens
  source 1..1885: mol_type = unassigned DNA
gctcccctgagcccagccagaccccgcgccgcccgcgccccgctcgactccggaggctcccgcagccccggcgtccgccccgctgccccctcccccgggggccatgggggcgcccccgggctaccggccctcagcttgggtgcatctcctccaccagctgccccgcgccgacttccagctccgcccggtgcccagcgttttcgcgccccaagagcaggaataccagcaggccttgttgctggtggcggccttggcgggcctgggcttgggcctgagcctcattttcatcgctgtctacctcatccgcttctgctgctgccggccccccgagccccccgggtccaagatcccctcgcccgggggaggctgcgtcacctggagctgcattgtcgcccttctcgccggctgcactggcattggcatcggtttctatggcaacagtgagaccagtgatggggtgtcccagctcagctctgcgctgctgcacgccaaccacacactcagcaccattgaccacctggtgttggagacggtggagaggctgggcgaggcggtgaggacagagctgaccaccctggaggaggtgctcgagccgcgcacggagctggtggctgccgcccgaggggctcgacggcaggcggaggctgcggcccagcagctgcaggggctggccttctggcagggagtgcccctgagccccctgcaggtggctgaaaatgtgtcctttgtggaggagtacaggtggctggcctacgtcctcctgctgctcctggagctgctggtctgcctcttcaccctcctgggcctggcgaagcagagcaagtggctggtgatcgtgatgacagtcatgagtctcctggttctcgtcctgagctggggctccatgggcctggaggcagccacggccgtgggcctcagtgacttctgctccaatccagacccttatgttctgaacctgacccaggaggagacagggctcagctcagacatcctgagctattatctcctctgcaaccgggccgtctccaaccccttccaacagaggctgactctgtcccagcgagctctggccaacatccactcccagctgctgggcctggagcgagaagctgtgcctcagttcccttcagcgcagaagcctctgctgtccttggaggagactctgaatgtgacagaaggaaatttccaccagttggtggcactgctacactgccgcagcctgcacaaggactatggtgcagccctgcggggcctgtgcgaagacgccctggaaggcctgctcttcctgctactcttctccctgctgtctgcaggagcgctggccactgccctctgcagcctgccccgagcctgggccctcttcccacccagtgacgactacgatgacacagacgatgacgaccctttcaaccctcaggaatccaagcgctttgtgcagtggcagtcgtctatctgagcccctcctcccggctggactggagcctggctcccctcttcgttccttccctggctgccggaggagaccccactaacccagcctgcctgggctctgaccactaacactcttggccatggacagcctgcacaggaccgcctccctgctcttggccactgtgctcccatttctgtccttggccttgggagtagctgagggggcagactagggagtagggctggcaggggagggggcagacagcctcgcctcgcacccttcatccctggctgccggtcccatccttggagggactaagctgggggtgggggacatgagtccccctgctgcccctgccacatcccagtgggctctgaccccctgatctcaactcgtggcactaacttggaaaagggttgatttaaaataaaagggaagactattttacaagca

SEQ ID NO: 33294 - DNA, 1763 bp, Homo sapiens
  source 1..1763: mol_type = unassigned DNA
gccccgctgccccctcccccgggggccatgggggcgcccccgggctaccggccctcagcttgggtgcatctcctccaccagctgccccgcgccgacttccagctccgcccggtgcccagcgttttcgcgccccaagagcaggaataccagcaggccttgttgctggtggcggccttggcgggcctgggcttgggcctgagcctcattttcatcgctgtctacctcatccgcttctgctgctgccggccccccgagccccccgggtccaagatcccctcgcccgggggaggctgcgtcacctggagctgcattgtcgcccttctcgccggctgcactggcattggcatcggtttctatggcaacagtgagaccagtgatggggtgtcccagctcagctctgcgctgctgcacgccaaccacacactcagcaccattgaccacctggtgttggagacggtggagaggctgggcgaggcggtgaggacagagctgaccaccctggaggaggtgctcgagccgcgcacggagctggtggctgccgcccgaggggctcgacggcaggcggaggctgcggcccagcagctgcaggggctggccttctggcagggagtgcccctgagccccctgcaggtggctgaaaatgtgtcctttgtggaggagtacaggtggctggcctacgtcctcctgctgctcctggagctgctggtctgcctcttcaccctcctgggcctggcgaagcagagcaagtggctggtgatcgtgatgacagtcatgagtctcctggttctcgtcctgagctggggctccatgggcctggaggcagccacggccgtgggcctcagtgacttctgctccaatccagacccttatgttctgaacctgacccaggaggagacagggctcagctcagacatcctgagctattatctcctctgcaaccgggccgtctccaaccccttccaacagaggctgactctgtcccagcgagctctggccaacatccactcccagctgctgggcctggagcgagaagctgtgcctcagttcccttcagcgcagaagcctctgctgtccttggaggagactctgaatgtgacagaaggaaatttccaccagttggtggcactgctacactgccgcagcctgcacaaggactatggtgcagccctgcggggcctgtgcgaagacgccctggaaggcctgctcttcctgctactcttctccctgctgtctgcaggagcgctggccactgccctctgcagcctgccccgagcctgggccctcttcccacccaggaatccaagcgctttgtgcagtggcagtcgtctatctgagcccctcctcccggctggactggagcctggctcccctcttcgttccttccctggctgccggaggagaccccactaacccagcctgcctgggctctgaccactaacactcttggccatggacagcctgcacaggaccgcctccctgctcttggccactgtgctcccatttctgtccttggccttgggagtagctgagggggcagactagggagtagggctggcaggggagggggcagacagcctcgcctcgcacccttcatccctggctgccggtcccatccttggagggactaagctgggggtgggggacatgagtccccctgctgcccctgccacatcccagtgggctctgaccccctgatctcaactcgtggcactaacttggaaaagggttgatttaaaataaaagggaagactattttacaagca

SEQ ID NO: 33295 - DNA, 1538 bp, Homo sapiens
  source 1..1538: mol_type = unassigned DNA
gctcgactccggaggctcccgcagccccggcgtccgccccgctgccccctcccccgggggccatgggggcgcccccgggctaccggccctcagcttgggtgcatctcctccaccagctgccccgcgccgacttccagctccgcccggtgcccagcgttttcgcgccccaagagcaggaataccagcaggatcagagcagcctcgcggttacacaacggccacctccaacaacgccgctccaccggctccggcctcggcccagactcacgcccgctctggcccggagacctcccgaagccgcacgcggggatccgcggccccagtcaccgccagaggccttgttgctggtggcggccttggcgggcctgggcttgggcctgagcctcattttcatcgctgtctacctcatccgcttctgctgctgccggccccccgagccccccgggtccaagatcccctcgcccgggggaggctgcgtcacctggagctgcattgtcgcccttctcgccggctgcactggcattggcatcggtttctatggcaacagtgagaccagtgatggggtgtcccagctcagctctgcgctgctgcacgccaaccacacactcagcaccattgaccacctggtgttggagacggtggagaggctgggcgaggcggtgaggacagagctgaccaccctggaggaggtgctcgagccgcgcacggagctggtggctgccgcccgaggggctcgacggcaggcggaggctgcggcccagcagctgcaggggctggccttctggcagggagtgcccctgagccccctgcaggtggctgaaaatgtgtcctttgtggaggagtacaggtggctggcctacgtcctcctgctgctcctggagctgctggtctgcctcttcaccctcctgggcctggcgaagcagagcaagtggctggtgatcgtgatgacagtcatgagtctcctggttctcgtcctgagctggggctccatgggcctggaggcagccacggccgtgggcctcagtgacttctgctccaatccagacccttatgttctgaacctgacccaggaggagacagggctcagctcagaggctgactctgtcccagcgagctctggccaacatccactcccagctgctgggcctggagcgagaagctgtgcctcagttcccttcagcgcagaagcctctgctgtccttggaggagactctgaatgtgacagaaggaaatttccaccagttggtggcactgctacactgccgcagcctgcacaaggactatggtgcagccctgcggggcctgtgcgaagacgccctggaaggcctgctcttcctgctactcttctccctgctgtctgcaggagcgctggccactgccctctgcagcctgccccgagcctgggccctcttcccacccagtgacgactacgatgacacagacgatgacgaccctttcaaccctcagcaggaatccaagcgctttgtgcagtggcagtcgtctatctgagcccctcctcccggctggactggagcctg

SEQ ID NO: 33296 - DNA, 2088 bp, Homo sapiens
  source 1..2088: mol_type = unassigned DNA
ctgcctcccccccgctcccgctcccctgagcccagccagaccccgcgccgcccgcgccccgctcgactccggaggctcccgcagccccggcgtccgccccgctgccccctcccccgggggccatgggggcgcccccgggctaccggccctcagcttgggtgcatctcctccaccagctgccccgcgccgacttccagctccgcccggtgcccagcgttttcgcgccccaagagcaggaataccagcaggccttgttgctggtggcggccttggcgggcctgggcttgggcctgagcctcattttcatcgctgtctacctcatccgcttctgctgctgccggccccccgagccccccgggtccaagatcccctcgcccgggggaggctgcgtcacctggagctgcattgtcgcccttctcgccggctgcactggcattggcatcggtttctatggcaacagtgagaccagtgatggggtgtcccagctcagctctgcgctgctgcacgccaaccacacactcagcaccattgaccacctggtgttggagacggtggagaggctgggcgaggcggtgaggacagagctgaccaccctggaggaggtgctcgagccgcgcacggagctggtggctgccgcccgaggggctcgacggcaggcggaggctgcggcccagcagctgcaggggctggccttctggcagggagtgcccctgagccccctgcaggtggctgaaaatgtgtcctttgtggaggagtacaggtggctggcctacgtcctcctgctgctcctggagctgctggtctgcctcttcaccctcctgggcctggcgaagcagagcaagtggctggtgatcgtgatgacagtcatgagtctcctggttctcgtcctgagctggggctccatgggcctggaggcagccacggccgtgggcctcagtgacttctgctccaatccagacccttatgttctgaacctgacccaggaggagacagggctcagctcagacatcctgagctattatctcctctgcaaccgggccgtctccaaccccttccaacagaggctgactctgtcccagcgagctctggccaacatccactcccagctgctgggcctggagcgagaagctgtgcctcagttcccttcagcgcagaagcctctgctgtccttggaggagactctgaatgtgacagaaggaaatttccaccagttggtggcactgctacactgccgcagcctgcacaaggactatggtgcagccctgcggggcctgtgcgaagacgccctggaaggcctgctcttcctgctactcttctccctgctgtctgcaggagcgctggccactgccctctgcagcctgccccgagcctgggccctcttcccacccagtgacgactacgatgacacagacgatgacgaccctttcaaccctcagcaggaatccaagcgctttgtgcagtggcagtcgtctatctgagcccctcctcccggctggactggagcctggctcccctcttcgttccttccctggctgccggaggagaccccactaacccagcctgcctgggctctgaccactaacactcttggccatggacagcctgcacaggaccgcctccctgctcttggccactgtgctcccatttctgtccttggccttgggagtagctgagggggcagactagggagtagggctggcaggggagggggcagacagcctcgcctcgcacccttcatccctggctgccggtcccatccttggagggactaagctgggggtgggggacatgagtccccctgctgcccctgccacatcccagtgggctctgaccccctgatctcaactcgtggcactaacttggaaaagggttgatttaaaataaaagggaagactattttacaagcagctgggtcctccttatttctcctctcccttgattcggcctcctggccagggctgggacatcctccctgctgtcctctctcccccggcctcccagctgccaggaatttctgcgcctgtccaggctcagcaaggggtccaaagacattgttctttaaaaaaaaaaaaaaaaaaatcaaaaaac

SEQ ID NO: 33297 - DNA, 3043 bp, Homo sapiens
  source 1..3043: mol_type = unassigned DNA
gggcggggcggccgcgggtcgcgggcggatgacgcgccggggccggcggaggagcagccacttcctggggccgccggccggggccgctggctgcactcagcgccggagccgggagctagcggccgccgccatgtcccaccagaccggcatccaagcaagtgaagatgttaaagagatctttgccagagccagaaatggaaagtacagacttctgaaaatatctattgaaaatgagcaacttgtgattggatcatatagtcagccttcagattcctgggataaggattatgattcctttgttttacccctgttggaggacaaacaaccatgctatatattattcaggttagattctcagaatgcccagggatatgaatggatattcattgcatggtctccagatcattctcatgttcgtcaaaaaatgttgtatgcagcaacaagagcaactctgaagaaggaatttggaggtggccacattaaagatgaagtatttggaacagtaaaggaagatgtatcattacatggatataaaaaatacttgctgtcacaatcttcccctgccccactgactgcagctgaggaagaactacgacagattaaaatcaatgaggtacagactgacgtgggtgtggacactaagcatcaaacactacaaggagtagcatttcccatttctcgagaagcctttcaggctttggaaaaattgaataatagacagctcaactatgtgcagttggaaatagatataaaaaatgaaattataattttggccaacacaacaaatacagaactgaaagatttgccaaagaggattcccaaggattcagctcgttaccatttctttctgtataaacattcccatgaaggagactatttagagtccatagtttttatttattcaatgcctggatacacatgcagtataagagagcggatgctgtattctagctgcaagagccgtctgctagaaattgtagaaagacaactacaaatggatgtaattagaaagatcgagatagacaatggggatgagttgactgcagacttcctttatgaagaagtacatcccaagcagcatgcacacaagcaaagttttgcaaaaccaaaaggtcctgcaggaaaaagaggaattcgaagactaattaggggcccagcggaaactgaagctactactgattaaagtcatcacattaaacattgtaatactagttttttaaaagtccagcttttagtacaggagaactgaaatcattccatgttgatataaagtagggaaaaaaattgtactttttggaaaatagcacttttcacttctgtgtgtttttaaaattaatgttatagaagactcatgatttctatttttgagttaaagctagaaaagggttcaacataatgtttaattttgtcacactgttttcatagcgttgattccacacttcaaatacttcttaaaattttatacagttgggccagttctagaaagtctgatgtctcaaagggtaaacttactactttcttgtgggacagaaagaccttaaaatattcatattacttaatgaatatgttaaggaccaggctagagtattttctaagctggaaacttagtgtgccttggaaaaggccgcaagttgcttactccgagtagctgtgctagctctgtcagactgtaggatcatgtctgcaacttttagaaatagtgctttatattgcagcagtcttttatatttgacttttttttaatagcattaaaattgcagatcagctcactctgaaactttaagggtaccagatattttctatactgcaggatttctgatgacattgaaagactttaaacagccttagtaaattatctttctaatgctctgtgaggccaaacatttatgttcagattgaaatttaaattaatatcattcaaaaggaaacaaaaaatgttgagttttaaaaatcaggattgacttttttctccaaaaccatacatttatgggcaaattgtgttctttatcacttccgagcaaatactcagatttaaaattactttaaagtcctggtacttaacaggctaacgtagataaacaccttaataatctcagttaatactgtatttcaaaacacatttaactgttttctaatgctttgcattatcagttacaacctagagagattttgagcctcatatttctttgatacttgaaatagagggagctagaacacttaatgtttaatctgttaaacctgctgcaagagccataactttgaggcattttctaaatgaactgtggggatccaggatttgtaatttcttgatctaaactttatgctgcataaatcacttatcggaaatgcacatttcatagtgtgaagcactcatttctaaaccttattatctaaggtaatatatgcacctttcagaaatttgtgttcgagtaagtaaagcatattagaataattgtgggttgacagatttttaaaatagaatttagagtatttggggttttgtttgtttacaaataatcagactataatatttaaacatgcaaaataactgacaataatgttgcacttgtttactaaagatataagttgttccatgggtgtacacgtagacagacacacatacacccaaattattgcattaagaatcctggagcagaccatagctgaagctgttattttcagtcaggaagactacctgtcatgaaggtataaaataatttagaagtgaatgtttttctgtaccatctatgtgcaattatactctaaattccactacactacattaaagtaaatggacattccagaatatagatgtgattatagtcttaaactaattattattaaaccaatgattgctgaaaatcagtgatgcatttgttatagagtataactcatcgtttacagtatgttttagttggcagtatcatacctagatggtgaataacatattcccagtaaatttatatagcagtgaagaattacatgccttctggtggacattttataagtgcattttatatcacaataaaaattttttctcttt

SEQ ID NO: 33298 - DNA, 3045 bp, Homo sapiens
  source 1..3045: mol_type = unassigned DNA
gggcggggcggccgcgggtcgcgggcggatgacgcgccggggccggcggaggagcagccacttcctggggccgccggccggggccgctggctgcactcagcgccggagccgggagctagcggccgccgccatgtcccaccagaccggcatccaagcaagtgaagatgttaaagagatctttgccagagccagaaatggaaagtacagacttctgaaaatatctattgaaaatgagcaacttgtgattggatcatatagtcagccttcagattcctgggataaggattatgattcctttgttttacccctgttggaggacaaacaaccatgctatatattattcaggttagattctcagaatgcccagggatatgaatggatattcattgcatggtctccagatcattctcatgttcgtcaaaaaatgttgtatgcagcaacaagagcaactctgaagaaggaatttggaggtggccacattaaagatgaagtatttggaacagtaaaggaagatgtatcattacatggatataaaaaatacttgctgtcacaatcttcccctgccccactgactgcagctgaggaagaactacgacagattaaaatcaatgaggtacagactgacgtgggtgtggacactaagcatcaaacactacaaggagtagcatttcccatttctcgagaagcctttcaggctttggaaaaattgaataatagacagctcaactatgtgcagttggaaatagatataaaaaatgaaattataattttggccaacacaacaaatacagaactgaaagatttgccaaagaggattcccaaggattcagctcgttaccatttctttctgtataaacattcccatgaaggagactatttagagtccatagtttttatttattcaatgcctggatacacatgcagtataagagagcggatgctgtattctagctgcaagagccgtctgctagaaattgtagaaagacaactacaaatggatgtaattagaaagatcgagatagacaatggggatgagttgactgcagacttcctttatgaagaagtacatcccaagcagcatgcacacaagcaaagttttgcaaaaccaaaaggtcctgcaggaaaaagaggaattcgaagactaattaggggcccagcggaaactgaagctactactgattaaagtcatcacattaaacattgtaatactagttttttaaaagtccagcttttagtacaggagaactgaaatcattccatgttgatataaagtagggaaaaaaattgtactttttggaaaatagcacttttcacttctgtgtgtttttaaaattaatgttatagaagactcatgatttctatttttgagttaaagctagaaaagggttcaacataatgtttaattttgtcacactgttttcatagcgttgattccacacttcaaatacttcttaaaattttatacagttgggccagttctagaaagtctgatgtctcaaagggtaaacttactactttcttgtgggacagaaagaccttaaaatattcatattacttaatgaatatgttaaggaccaggctagagtattttctaagctggaaacttagtgtgccttggaaaaggccgcaagttgcttactccgagtagctgtgctagctctgtcagactgtaggatcatgtctgcaacttttagaaatagtgctttatattgcagcagtcttttatatttgacttttttttaatagcattaaaattgcagatcagctcactctgaaactttaagggtaccagatattttctatactgcaggatttctgatgacattgaaagactttaaacagccttagtaaattatctttctaatgctctgtgaggccaaacatttatgttcagattgaaatttaaattaatatcattcaaaaggaaacaaaaaatgttgagttttaaaaatcaggattgacttttttctccaaaaccatacatttatgggcaaattgtgttctttatcacttccgagcaaatactcagatttaaaattactttaaagtcctggtacttaacaggctaacgtagataaacaccttaataatctcagttaatactgtatttcaaaacacatttaactgttttctaatgctttgcattatcagttacaacctagagagattttgagcctcatatttctttgatacttgaaatagagggagctagaacacttaatgtttaatctgttaaacctgctgcaagagccataactttgaggcattttctaaatgaactgtggggatccaggatttgtaatttcttgatctaaactttatgctgcataaatcacttatcggaaatgcacatttcatagtgtgaagcactcatttctaaaccttattatctaaggtaatatatgcacctttcagaaatttgtgttcgagtaagtaaagcatattagaataattgtgggttgacagatttttaaaatagaatttagagtatttggggttttgtttgtttacaaataatcagactataatatttaaacatgcaaaataactgacaataatgttgcacttgtttactaaagatataagttgttccatgggtgtacacgtagacagacacacatacacccaaattattgcattaagaatcctggagcagaccatagctgaagctgttattttcagtcaggaagactacctgtcatgaaggtataaaataatttagaagtgaatgtttttctgtaccatctatgtgcaattatactctaaattccactacactacattaaagtaaatggacattccagaatatagatgtgattatagtcttaaactaattattattaaaccaatgattgctgaaaatcagtgatgcatttgttatagagtataactcatcgtttacagtatgttttagttggcagtatcatacctagatggtgaataacatattcccagtaaatttatatagcagtgaagaattacatgccttctggtggacattttataagtgcattttatatcacaataaaaattttttctctttaa

SEQ ID NO: 33299 - DNA, 1170 bp, Homo sapiens
  source 1..1170: mol_type = unassigned DNA
cgccatgtcccaccagaccggcatccaagcaagtgaagatgttaaagagatctttgccagagccagaaatggaaagtacagacttctgaaaatatctattgaaaatgagcaacttgtgattggatcatatagtcagccttcagattcctgggataaggattatgattcctttgttttacccctgttggaggacaaacaaccatgctatatattattcaggttagattctcagaatgcccagggatatgaatggatattcattgcatggtctccagatcattctcatgttcgtcaaaaaatgttgtatgcagcaacaagagcaactctgaagaaggaatttggaggtggccacattaaagatgaagtatttggaacagtaaaggaagatgtatcattacatggatataaaaaatacttgctgtcacaatcttcccctgccccactgactgcagctgaggaagaactacgacagattaaaatcaatgagagcccagaggatcatattggggtacagactgacgtgggtgtggacactaagcatcaaacactacaaggagtagcatttcccatttctcgagaagcctttcaggctttggaaaaattgaataatagacagctcaactatgtgcagttggaaatagatataaaaaatgaaattataattttggccaacacaacaaatacagaactgaaagatttgccaaagaggattcccaaggattcagctcgttaccatttctttctgtataaacattcccatgaaggagactatttagagtccatagtttttatttattcaatgcctggatacacatgcagtataagagagcggatgctgtattctagctgcaagagccgtctgctagaaattgtagaaagacaactacaaatggatgtaattagaaagatcgagatagacaatggggatgagttgactgcagacttcctttatgaagaagtacatcccaagcagcatgcacacaagcaaagttttgcaaaaccaaaaggtcctgcaggaaaaagaggaattcgaagactaattaggggcccagcggaaactgaagctactactgattaaagtcatcacattaaacattgtaatactagttttttaaaagtccagcttttagtacaggagaactgaaatcattccatgttgatataaagtag

SEQ ID NO: 33300 - DNA, 1619 bp, Homo sapiens
  source 1..1619: mol_type = unassigned DNA
ggcgggtcctgcggcaccgcccgggaagctgcgcgagggtcgacagcctccgccacatcctccacctctcttggtccagcgagcgttgccgggccagggtcaagcggagggctccgacggcgcggacggagcgaagcgccgagccatggcgcaccaaacgggcatccacgccacggaagagctgaaggaattctttgccaaggcacgggctggctctgtgcggctcatcaaggttgtgattgaggacgagcagctcgtgctgggtgcctcgcaggagccagtaggccgctgggatcaggactatgacagggccgtgctgccactgctggacgcccagcagccctgctacctgctctaccgcctcgactcacagaatgctcagggcttcgaatggctcttcctcgcctggtcgcctgataactcccccgtgcggctgaagatgctgtacgcggccacgcgggccacagtgaaaaaggagtttggaggtggccacatcaaggatgagctcttcgggactgtgaaggatgacctctcttttgctgggtaccagaaacacctgtcgtcctgtgcggcacctgccccgctgacctcggctgagagagagctccagcagatccgcattaacgaggtgaagacagagatcagtgtggaaagcaagcaccagaccctgcagggcctcgccttccccctgcagcctgaggcccagcgggcactccagcagctcaagcagaaaatggtcaactacatccagatgaagctggacctagagcgggaaaccattgagctggtgcacacagagcccacggatgtggcccagctgccctcccgggtgccccgagatgctgcccgctaccacttcttcctctacaagcacacccatgagggcgacccccttgagtctgtagtgttcatctactccatgccggggtacaagtgcagcatcaaggagcgaatgctctactccagctgcaagagccgcctcctcgactccgtggagcaggacttccatctggagatcgccaagaaaattgagattggcgatggggcagagctgacggcagagttcctctacgacgaggtgcaccccaagcaacacgccttcaagcaggccttcgccaagcccaagggcccagggggcaagcggggccataagcgcctcatccgcggcccgggtgaaaatggggatgacagctaggaggctggagcagggccggccacgtgtggactgtggggctgcccaccttccgctccctgccaccatcctccttcctgggctccaggaaagtgtttctgggaggtcaggagggctggcagctgaacgcacttgcagcgtccgagggccaccgggctggcattttgtgacccttccctgttgctgtccctgcatctcgtctgtgtgcccagggtgtccggggaccctgcctggctggcttaagggggctgggtcaggggcctggcatgaacctggcctcccggggagctgagactagggtcccagcacagcccagaaacctttggccacaagaagtggggtcagtcagggctggggcaggggtcactgcagtttgggatggttgaatgctgtattttctaaagaataaaatatttttaaatcaaga

SEQ ID NO: 33301 - DNA, 1176 bp, Homo sapiens
  source 1..1176: mol_type = unassigned DNA
ctagagtttccaaaaaagttagaataacttcctctcccggagacctcggttttgcacaagccggccttgaaatcagagcctttccagcaactccgagagcgtgtgctcggcgaccgcgggcttggccagcggcgcgcgctcggcgccccggcgcccccagccccacgcgcgccgggcgggcgccatggaggagggctccagctcgcccgtgtcccccgtggacagcctgggcaccagcgaggaggagctcgagaggcagcccaagcgcttcggccggaagcggcgctacagcaagaagtcgagcgaagatggcagcccgaccccgggcaagcgcggcaagaagggcagccccagcgcgcagtccttcgaggagctgcagagccagcgcatcctggccaacgtgcgcgagcgccagcgcacccagtcgctcaacgaggccttcgcggcgctgcgcaagatcatccccacgctgccctctgacaagctgagcaagatccagacgctcaagctggccgccaggtacatagacttcctctaccaggtcctgcagagcgacgagatggacaataagatgaccagctgcagctacgtggcccacgagcgcctcagctacgccttctccgtgtggcgcatggagggcgcgtggtccatgtccgcctcccactagcgccgcgccacccacctccggaccggcgcgccaggaggagattctgaatgatgctgccattgccagaccttctgctaccaaacagagcgaagaggaagagggggcagtgtttggtcaagacagcccacgaaacgttggcgggagtgagcacattagcaatggctaagaacatgcttgaatcatttgtaacaacccaggacagagatgccacaagaggactttggggaaaggcgaatccactcatacatcttggagttgttttttcaagttcagaaaatgaaccttcaccaaggtcttggaacatgaagcagagactctggtgctgactctatcatttgagctcctaagggtactcatgcccagtggagcatgcacaccagcaacactgccaacaccatctcggtgtcccaccccttagaggaggaagaggacacagaggggcgcccggtaataaccctcatttcctctcttccaccccaccacatcatcttaataaaacatgaaggtaa

SEQ ID NO: 33302 - DNA, 3942 bp, Homo sapiens
  source 1..3942: mol_type = unassigned DNA
aaaacgagcgccggggacatgggattgtgcttgcgtcaacggcgcgcgccgtgggaaccttgacaagcagcatggctgcaggttgctcagaggcgccgcggccagcggcggcttctgatgggtctctggtagggcaggctggcgtcctgccttgcctagagttgccgacttatgccgctgcttgtgcgctggtgaacagtcgctactcatgcctggtggccgggccgcaccaaaggcacatcgcgctgtcgccccgctaccttaacaggaaacgcaccggcattcgagaacagcttgatgcggagctccttcgctattctgagagccttttaggtgtccctattgcatatgataacatcaaagttgtgggagagcttggagatatttatgatgatcaaggacacattcatcttaacattgaagccgattttgttattttctgccctgaaccagggcagaagcttatgggtatagttaataaagtgtcttctagccacattggctgtttagtacatgggtgtttcaatgcctccattcctaaacctgagcagttgtcagctgagcagtggcaaaccatggagataaacatgggtgatgaactagaatttgaagtatttcgtttagactcagatgctgctggagtattctgcattcggggaaaactaaatatcacaagtttacaattcaagcgctctgaagtttctgaagaagttacagaaaatggcactgaggaagctgctaaaaaacctaaaaagaagaaaaagaagaaagacccagagacatatgaagtggacagtggtaccacaaagctagcagatgatgcagatgacactccaatggaagagtcagccctgcagaatactaataatgcgaatggcatctgggaggaggagccaaagaaaaagaagaagaagaaaaagcaccaggaagttcaggaccaggaccctgttttccaaggcagtgactccagtggttaccaaagtgaccataaaaagaaaaaaaagaaaagaaaacacagtgaagaggccgaatttaccccacctttgaaatgctcaccaaaaagaaaagggaaaagtaattttctttagtgtattttaaacacgattcagtttttaaaagatcgatctacatacaatagatgaataaatgttttcagtgatatgaaaaggttaagtatgccagtagtttacaaaacagaaaatacttaactaggagtaggaggctttatatgctaaaaatgataaaactgactgtaaattaatttggggaaagccagtattgttaaaataccattttatacaaaataaaaagctgctctcactgtcagctctcatattcttccaggttttgcactctacataaaattatttctacaatgtcaagactagccaaaggactttataatacaatattatattactaaagaatgagttaagtttgagattttgatgatttgattttgtgtgtgtttaataggcttcaccttattacatgctattttattttgcttttttaaaaactcaggacattaactaattttaggttttcctttatcatggctttctacagtatttctattgtttaacataaaatagtttgccaaagaagtttctgaagtcttcacagctcttaaaagccaggccagtactgactgtgtggtggtaaatgctattcattattttcttttctttcttccaagtgcatgtgtgtccttgtcttcttaagtctgagaggttgctggaaaggactgttttcttgtacttgttcatttgtgcctcagccattctagttttgttgtgtgttggaggacagtctaatgaagacaggataaatgtgattctgactagtgggaaatttcagattactttttaatgattggaatgggctataagatattgtgctgaagagaaaacagttgttctgttcactgctttcattgagaaaatgtggaatgtctcttgactaattgacaaagtgtaatgaaatgacaagctggttgaagctggtaatcaatgcatggccatatttattcattttccacacacttgaccatctactttgtataacacattctgctaaggcccagggatacaatggcaaacaagatagatgtagttccttcccttgtggcatgtcataagagaaacagatgtgcatatacacacaataaataagaaaattaataattgtattaagtggtatgaaaaaaagggggaggattgttcactcactgttacctgtgttagtatctgcaaatgcatgaatggttgaactcccatgtcagcatttttgttgccatttatttagtaccagacatagtgctggtctcacagcttaatatttggtaatgaataaattctgctagtggtatatgttgatctgaacttacaatgatgggatatagaattggcagagtggcagatgttcacaattgtctacaagtagatgtgctagacaatggaaggatgcaggccaacctctttgattacaattgagattcatgtgactattgagccctggaaatgtagcttgtccaaattgagatgtgctgtcagtataaaatacataccagattttaaagatgtaccaaaaaatgtaaactatctcaatttttatattggtgaaatcaatatgtcttggtatagtggcttaaataaaacaattttagcctttctcagtttatttttctgcaaaaagattaaaaattgtacatgaagctcatgttaactttcttttggtcagtgctattttaaaggaagtatgagttgaaaaaaaattgaaataaactatatcatattactaggacttaatatagtggcatacccaggaaatgcttagtaagtgttcccttcacattttaaaatttgagtatacaatcatgtttgacaatatagaaatttaatttttagtgaaacaattctaaaccccttttccatagacacaagaaagatggcaaatttatgctattcctggaaaaatacattgtggcttagcaaataagcaagttcccacgttacttttgttttgcttcaagtaatacttctgccagttgtgttttatgaattaaacagggaacggcatgctgaacttgaaactagatttgttcctgcttttttcacaatgtgagtagttttgaaaagtcagatctggccatttgtctttcctagaatagcataactttgttcattgttttttttgtttgtctttctgacacagaaagactgatgatggtgtccactatgtattcttcaaaacatttggcacatgctgcactaacctagtctatcttttctatcttggaatttgctcatacaaaccctatagcctagactagatcccttaccctctctccagttcctatcattcacccatttcactgtgcaagacacctcactagtcaccagtgatacagaaatgacttttaagcagtttctgctcttaagggcttaccgttttgtctataagatacacaagtataaatgacaagtacaaataacaatgaatgtttaatgctttacgtttagtgtttaagcttgttgttggaagagcagcattttgacccttggagaagaaaaactagctgtggcattccaggtggagaacctgacagaggactaagaagttatctaatgtaaaagacctcaggcaccaccttcgcataaactttttccagacaaggctaaatgtgcatgcttcataaccataattcttatttttctttaataaatatttttctacttgtaacactgtgcattatttcaaactgtttacctgtttgtaaagcttgtctcttaatcaaatttgtcttgaccaaataagtttcctgagggctggaattatgccttaactatatctatagtatttaacagtgaatcctttgtataatgaaagcatcaacagataattttaaattgataaataaaaagcacagtttcaaatggt

SEQ ID NO: 33303 - DNA, 3756 bp, Homo sapiens
  source 1..3756: mol_type = unassigned DNA
ctctttaaggtgcccgaggctcgcgggcgctgcgctgaggggacggcgggaggcgcggcctggcctcgcactcaaagccgccgcagcgcgccccgggctcggccgacccggcggggatctaggggtgggcgacttcgcgggaccgtggcgcatgtttcctgggagttactgatcatcttctttgaagaaacatgaagttacactatgttgctgtgcttactctagccatcctgatgttcctgacatggcttccagaatcactgagctgtaacaaagcactctgtgctagtgatgtgagcaaatgcctcattcaggagctctgccagtgccggccgggagaaggcaattgctcctgctgtaaggagtgcatgctgtgtcttggggccctttgggacgagtgctgtgactgtgttggtatgtgtaatcctcgaaattatagtgacacacctccaacttcaaagagcacagtggaggagctgcatgaaccgatcccttctctcttccgggcactcacagaaggagatactcagttgaattggaacatcgtttctttccctgttgcagaagaactttcacatcatgagaatctggtttcatttttagaaactgtgaaccagccacaccaccagaatgtgtctgtccccagcaataatgttcacgcgccttattccagtgacaaagaacacatgtgtactgtggtttattttgatgactgcatgtccatacatcagtgtaaaatatcctgtgagtccatgggagcatccaaatatcgctggtttcataatgcctgctgcgagtgcattggtccagaatgtattgactatggtagtaaaactgtcaaatgtatgaactgcatgttttaaagaagacaaatgcaaaccaaagcaacttagtaaaataataggtataaaaagttattctgtaagtctgttggttgtatcttgtatcagaatcccagtaagttaagttgtaaagactttggaataagtttcttttaaaaatatgacatagccagtgatgtgtttaattatataactgttcttactgattttattgccccctagcaataagccctttcctttgaatacatgtacaactttggtcatatgagaagcaggtgcgcagagaattccttgaaagatctgaggtttttaacatgaagtctgacgtggttttcctctagcattccaaaaggtttttgctttgaaagtgttagcagaagcatgttgatgtgaattatgatttcttcatgtgctactgttagcacactgagtttttatagttgcacatcattcctcattgtgccttgttttatccattttataaatagagtagatatttgatataccactctgataactcatataaaaatatcatcataaaaagcttaatttcatcccttttatgttggttttaaaaggtaaatgcttaccatattttataattgagaactcttacatagtagaatccattctataatacatgtgttgacaaagctttagagaaagtttcctattctcttccatttcccctgcccaaagtgctgacataggcagtgatgaagaatctttaccaagattttcagggtgtacctatgaaattgctttaaatgcactgctggtgtaaataattagcaagcaaagcgtttctgtgacttcaggtaccagcttaaagagcactagggatggggaacgaatgccaaatcagactccacctagagcaccaggaaacagcttgtaccctggtagggaaatggtgttgctgaaaggggaggctgagccagtgcgagactgaacttgtgcagccttagccaagacaaagcagtgtttttcagcagacggctgatgggacaggaattgaagaagagaattgactcgtatgaacaggacagggtgaaaatgctgggaattattatgggaaacaaaactatctatgttcatattttgtaatatttcatttgttaagtttatatctggatataatgttctttttaaacaagtataatcatatcgtcggaggttaagattatgaaattttagaatctctattcaagatgatgttcactccaaatacactacagaatttagtcaacattttatataatgtttcaataaatgtttctttcaataaagatactatgtgcccttcatagtaataaaatctcaatcttaaagcatgaatctaaaacataaatatttatattacagactcaattttacaaaattactaattgctctagtgcatatttgaactacaagcaactttttaggaatacctctttatacgtctacatattttagtatataaaaatagataatgctcttggacacattttgtattattcatgatctgaatagtagttagttaaaagatcatttgtaatattatgatcaactgttataaattaaggtcttaataccttttctgctctttcaaataactctaatgaatattcaagatattttagccttttaaaaagttgagatttagctcatggatatattttttggtagggaaacattagggtctccttttcttccttttacctagaatgcctcatttaaaagtgccttgaaaacatttagctccccttcttcatgagcatctgtagagctgaaagtattctggaactttagacagaaagctgaaaggaatctgcagtctcctgctgcagttcaactctgctgtttttcagtcatttcctactgtgagtggagtgatgtttgtgtgtgtgttggcaacatgcctaatgttttcttaatgatgacaacaaatattttaaaactgcatttatcattttttaggtcttcattaaattttaaaatgtaatatctgtttcccaccccctacattaggaggataatttcttaaaccacattgttttaattgatttttcttatcttgatttctttcattagaaactatccctaaatgtaaagatcttttgccttcaaatttggcttattttttctgatttatgagggtttgaaagaaagaattcacctaaaagattccatttccagttttataatgtatttcaggttctgaataacaatatttttccaaattgaaagtaaatattccagaagttgatagcctggttaaaagttagatcctctattaccattctaagcacattcacttctatattgaagttttggtaaaaattcttttttcttttttaataaaaaattaggttattactttttttataaccagatttttaaagcactaggttttaaatcagtgggtatcataaaagccatatataaaagatcctttcttatagtaagacttgtgcttgttagcaggtttttctgttagtttttcccccataacatttaattattactaaaattgtatttacaatagtggtgccaaatcaaatggtaatttaaataaaatctattctgtgtttatgtagggtggtataaaaaagaggtcttcatttagacatgtgatttctaaaattccagaaagcaaaattgataagatgttagaaatttggaccattatttataatcagggtagcattaaaatggagaaaagaaagttttctgaaaaaatgcagtaaatataagccacatttctaaagtttatttttatgaaagcttcttttaagattttgaaatctattctgcattcccaagagtttatgtttattgtattttatatgatctacaacatataaaattgtgtatttttctttggttgtccctattaacaaaaaagtattttaataaaaaattgaaatga

SEQ ID NO: 33304 - DNA, 5274 bp, Homo sapiens
  source 1..5274: mol_type = unassigned DNA
gagaggacggtaggcggtggataggagagctggcgcagctgccctggtggcagtggctgaagtggcggcggcttcggcggctgcggcggctgcaacagcttcgggctcggggttttggcggcggcgccggcgggctaggctgcgcggtgcggaccccggcgcgcggtccgggttgctggggcggcgcgtaagatgcctctaatggaggagtttctgagcagcacccctggcccagtggctttgaaagggagctcaaaccagagactatttcaagccctggatatcatatcctgagggccacaggagaagagaacatggctgtgagtttggatgacgacgtgccgctcatcctgaccttggatgagggtggcagtgccccactggctccctccaacggcctgggccaagaagagctacctagcaaaaatggcggcagctatgccatccacgactcccaggcccccagtctcagctctgggggtgagagttccccctccagccccgcacacaactgggagatgaattaccaagaggcagcaatctacctccaggaaggcgagaacaacgacaagttcttcacccaccccaaggatgccaaggcgctggcggcctacctctttgcacacaatcacctcttctacctgatggagctggccacggccctgctgctgctgctgctctccctgtgcgaggcccccgccgtccccgcactccggcttggcatctatgtccacgccaccctggagctgtttgccctgatggtggtagtgtttgaactctgcatgaagttacgctggctgggcctccacaccttcatccggcacaagcggaccatggtcaagacctcggtgctggtggtgcagtttgtcgaggccatcgtggtgttggtacggcagatgtcccatgtgcgggtgacccgagcactgcgctgcattttcctggtggactgtcggtattgcggtggcgtccggcgcaacctgcggcagatcttccagtccctgccgcccttcatggacatcctcctgctgctgctgttcttcatgatcatctttgccatcctcggtttctacttgttctcccctaacccttcagacccctacttcagcaccctggagaacagcatcgtcagtctgtttgtccttctgaccacagccaatttcccagatgtgatgatgccctcctactcccggaacccctggtcctgcgtcttcttcatcgtgtacctctccatcgagctgtatttcatcatgaacctgcttctggctgtggtgttcgacaccttcaatgacattgagaaacgcaagttcaagtctttgctactgcacaagcgaaccgctatccagcatgcctaccgcctgctcatcagccagaggaggcctgccggcatctcctacaggcagtttgaaggcctcatgcgcttctacaagccccggatgagtgccagggagcgctatcttaccttcaaggccctgaatcagaacaacacacccctgctcagcctaaaggacttttacgatatctacgaagttgctgctttgaagtggaaggccaagaaaaacagagagcactggtttgatgagcttcccaggacggcgctcctcatcttcaaaggtattaatatccttgtgaagtccaaggccttccagtatttcatgtacttggtggtggcagtcaacggggtctggatcctcgtggagacatttatgctgaaaggtgggaacttcttctccaagcacgtgccctggagttacctcgtctttctaactatctatggggtggagctgttcctgaaggttgccggcctgggccctgtggagtacttgtcttccggatggaacttgtttgacttctccgtgacagtgttcgccttcctgggactgctggcgctggccctcaacatggagcccttctatttcatcgtggtcctgcgccccctccagctgctgaggttgtttaagttgaaggagcgctaccgcaacgtgctggacaccatgttcgagctgctgccccggatggccagcctgggcctcaccctgctcatcttttactactccttcgccatcgtgggcatggagttcttctgcgggatcgtcttccccaactgctgcaacacgagtacagtggcagatgcctaccgctggcgcaaccacaccgtgggcaacaggaccgtggtggaggaaggctactattatctcaataattttgacaacatcctcaacagctttgtgaccctgtttgagctcacagttgtcaacaactggtacatcatcatggaaggcgtcacctctcagacctcccactggagccgcctctacttcatgaccttttacattgtgaccatggtggtgatgacgatcattgtcgcctttatcctcgaggccttcgtcttccgaatgaactacagccgcaagaaccaggactcggaagttgatggtggcatcacccttgagaaggaaatctccaaagaagagctggttgccgtcctggagctctaccgggaggcacggggggcctcctcggatgtcaccaggctgctggagaccctctcccagatggagagataccagcaacattccatggtgtttctgggacggcgatcaaggaccaagagcgacctgagcctgaagatgtaccaggaggagatccaggagtggtatgaggagcatgccagggagcaagagcagcagcgacaactcagcagcagtgcagcccccgccgcccagcagcccccaggcagccgccagcgctcccagaccgttacctagcccagcgcccgaaagccgtctcttctatgcaataacacaatagtattactctactgcgatgtacggaactgcggtgtgtgtacacatactcacgtatatgcacatatttatatacaggaagaaaaaagacagacaagatggggcttggtttataaccaccttgccctgtcttccttaactccagaagccagtttggtgaggggtgggggtgcggccaccaggtctgagctcttcctactgtggaaggctccagaaggcccttcacaaggagacccctcacctggatccagtcgactgcggggcttgcccctcatgtgggctggcctccatcggccacgtccaaagctgtcactgctactgcttcaggctcacatccccccgacctgatggcgtgcccgccccctctccctgcggcccatgccacaggtttctgtgttttgctttagggacagaaccacttaggaaggaaagaactcccggtctccagggtggtatttcagtgtctgtgataatgtcacgcaacacctcttcggggaccagtgcccaggatctaatggaagcggaattggggcaactgggcccatgtggccagagctcagttagccagtgccgggcggccacagattacactgaccaatctcctcccttggctctgcaagcctcccacccagccttctctggcttaacccttgttggcgaaaactcttccacagtggcctccttggggacccagaacccggaggaaggggcatgaggcaggaagtggggccgatgtctgcaacccagaccacttcgtggaatgggctcttgaccaaatccctttttttgcgatttacccgttcaagcaaaacaacgttttggttaactaaggattgtgctaaagccgataccaggtccttcacacgtgtgcactaggaacaggagcgaacagcacagagagacgctccctgtgggacgcagcagccccgtggccccggcccagttcccagccaccctccctggctctgctcacaccagagatttccatagcaggagcggttggtgcagaagtaggttcagatgaacctcagttaacgtcgccacccctcctcccaccatggtaccctgtaggagccctgtatgacatctgagcgtggtggaggtaggagggttgccagctgcagtgaccctgccacagaggcagggtcagtgcagaggtcgctttggttccgcttccctgggccacagaacggaacacagcataggttctgcagcaggagccgcagtggcaggatggagggtgcgaagggcaaggagtgcactgctgggcattcctggccagccccggccctctggtgcctgcttcctgtgacttcagaaggcaggtggacagagcctccctctggccttgtcctcttcccagccacagaacgggcagggtggcacccgaccccaggggagcagtacctggtcccccaccccctcctcccaaccacctccaaggccaagctgggtcccatagccagcacggcatggttctccccttccccccttcccaggtcaggggagttggacaagtagcaggtgtttgtttttaaagcacagccctttgggaaagcaacacattattgagactcactgtgattcccccgggagtcagactggctttgtcctcttcctctctggagggccatgggccatcagcaggagctccacatcgagccccaggccagaaccccctccctttcacagagagggaactttattgcacaattgggtgccttttagcttttgtgtgttgaaatgggcgttttggaagcaagggtcaggggacagcttctaaaggtgtgagtctctgacctgagcatctgggcctcgcctgggcccttcttcctccccaggggtggaaacgtggaggggccagcagcaccccggggtctgcccaggggagtcaaggccccgaggtgggggggcctattccaggaggagtgggatctcggccctgtccagagcgagttaatgtgtccatctgcccaaccctgtcctgagaaaggacctggttttggccaggacctgacaaatacccaatggcagcagtgtcaacagacgggagtccagccagggtgggtgcccttgtcattgaggttagggacagctatccccaggttatgcctggccccacccagcagggagttggggtccccccacaggctgtgagctctgtgggccctgggatgtgatctagctcagatgccctctcatccttgatgtcatagttgagtgcacccaagtggcacccactggcggccaggggcacagcctggtggtggtggcaatagaactgtgcccctcctcagctcctcgcttcccctcccacagccccagccttactccaccatgcggacaatcattttgtacggatcacgggagcaatgctgtacggttttgtacactggtggtttgtttcctagaaaacccattgtgtctctggatttctagcacattactaaaagagcctctgctttgtaaa

SEQ ID NO: 33305 - DNA, 2558 bp, Homo sapiens
  source 1..2558: mol_type = unassigned DNA
ccctttcctcctttggcttaagcctttggcaggacagattttgggctggaggccagcaattcaactgggagggctctgtgccagttcttgcctttctgaagatggcggcagctatgccatccacgactcccaggcccccagtctcagctctgggggtgagagttccccctccagccccgcacacaactgggagatgaattaccaagaggcagcaatctacctccaggaaggcgagaacaacgacaagttcttcacccaccccaaggatgccaaggcgctggcggcctacctctttgcacacaatcacctcttctacctgatggagctggccacggccctgctgctgctgctgctctccctgtgcgaggcccccgccgtccccgcactccggcttggcatctatgtccacgccaccctggagctgtttgccctgatggtggtagtgtttgaactctgcatgaagttacgctggctgggcctccacaccttcatccggcacaagcggaccatggtcaagacctcggtgctggtggtgcagtttgtcgaggccatcgtggtgttggtacggcagatgtcccatgtgcgggtgacccgagcactgcgctgcattttcctggtggactgtcggtattgcggtggcgtccggcgcaacctgcggcagatcttccagtccctgccgcccttcatggacatcctcctgctgctgctgttcttcatgatcatctttgccatcctcggtttctacttgttctcccctaacccttcagacccctacttcagcaccctggagaacagcatcgtcagtctgtttgtccttctgaccacagccaatttcccagatgtgatgatgccctcctactcccggaacccctggtcctgcgtcttcttcatcgtgtacctctccatcgagctgtatttcatcatgaacctgcttctggctgtggtgttcgacaccttcaatgacattgagaaacgcaagttcaagtctttgctactgcacaagcgaaccgctatccagcatgcctaccgcctgctcatcagccagaggaggcctgccggcatctcctacaggcagtttgaaggcctcatgcgcttctacaagccccggatgagtgccagggagcgctatcttaccttcaaggccctgaatcagaacaacacacccctgctcagcctaaaggacttttacgatatctacgaagttgctgctttgaagtggaaggccaagaaaaacagagagcactggtttgatgagcttcccaggacggcgctcctcatcttcaaaggtattaatatccttgtgaagtccaaggccttccagtatttcatgtacttggtggtggcagtcaacggggtctggatcctcgtggagacatttatgctgaaaggtgggaacttcttctccaagcacgtgccctggagttacctcgtctttctaactatctatggggtggagctgttcctgaaggttgccggcctgggccctgtggagtacttgtcttccggatggaacttgtttgacttctccgtgacagtgttcgccttcctgggactgctggcgctggccctcaacatggagcccttctatttcatcgtggtcctgcgccccctccagctgctgaggttgtttaagttgaaggagcgctaccgcaacgtgctggacaccatgttcgagctgctgccccggatggccagcctgggcctcaccctgctcatcttttactactccttcgccatcgtgggcatggagttcttctgcgggatcgtcttccccaactgctgcaacacgagtacagtggcagatgcctaccgctggcgcaaccacaccgtgggcaacaggaccgtggtggaggaaggctactattatctcaataattttgacaacatcctcaacagctttgtgaccctgtttgagctcacagttgtcaacaactggtacatcatcatggaaggcgtcacctctcagacctcccactggagccgcctctacttcatgaccttttacattgtgaccatggtggtgatgacgatcattgtcgcctttatcctcgaggccttcgtcttccgaatgaactacagccgcaagaaccaggactcggaagttgatggtggcatcacccttgagaaggaaatctccaaagaagagctggttgccgtcctggagctctaccgggaggcacggggggcctcctcggatgtcaccaggctgctggagaccctctcccagatggagagataccagcaacattccatggtgtttctgggacggcgatcaaggaccaagagcgacctgagcctgaagatgtaccaggaggagatccaggagtggtatgaggagcatgccagggagcaagagcagcagcgacaactcagcagcagtgcagcccccgccgcccagcagcccccaggcagccgccagcgctcccagaccgttacctagcccagcgcccgaaagccgtctcttctatgcaataacacaatagtattactctactgcgatgtacggaactgcggtgtgtgtacacatactcacgtatatgcacatatttatatacagg

SEQ ID NO: 33306 - DNA, 5175 bp, Homo sapiens
  source 1..5175: mol_type = unassigned DNA
agatggagtcttgctacattgcccaggctggtcttgaactgctaggctcaagcagttctcccaccttgacctcccaaagcgctgagattacagaagatgcctctaatggaggagtttctgagcagcacccctggcccagtggctttgaaagggagctcaaaccagagactatttcaagccctggatatcatatcctgagggccacaggagaagagaacatggctgtgagtttggatgacgacgtgccgctcatcctgaccttggatgagggtggcagtgccccactggctccctccaacggcctgggccaagaagagctacctagcaaaaatggcggcagctatgccatccacgactcccaggcccccagtctcagctctgggggtgagagttccccctccagccccgcacacaactgggagatgaattaccaagaggcagcaatctacctccaggaaggcgagaacaacgacaagttcttcacccaccccaaggatgccaaggcgctggcggcctacctctttgcacacaatcacctcttctacctgatggagctggccacggccctgctgctgctgctgctctccctgtgcgaggcccccgccgtccccgcactccggcttggcatctatgtccacgccaccctggagctgtttgccctgatggtggtagtgtttgaactctgcatgaagttacgctggctgggcctccacaccttcatccggcacaagcggaccatggtcaagacctcggtgctggtggtgcagtttgtcgaggccatcgtggtgttggtacggcagatgtcccatgtgcgggtgacccgagcactgcgctgcattttcctggtggactgtcggtattgcggtggcgtccggcgcaacctgcggcagatcttccagtccctgccgcccttcatggacatcctcctgctgctgctgttcttcatgatcatctttgccatcctcggtttctacttgttctcccctaacccttcagacccctacttcagcaccctggagaacagcatcgtcagtctgtttgtccttctgaccacagccaatttcccagatgtgatgatgccctcctactcccggaacccctggtcctgcgtcttcttcatcgtgtacctctccatcgagctgtatttcatcatgaacctgcttctggctgtggtgttcgacaccttcaatgacattgagaaacgcaagttcaagtctttgctactgcacaagcgaaccgctatccagcatgcctaccgcctgctcatcagccagaggaggcctgccggcatctcctacaggcagtttgaaggcctcatgcgcttctacaagccccggatgagtgccagggagcgctatcttaccttcaaggccctgaatcagaacaacacacccctgctcagcctaaaggacttttacgatatctacgaagttgctgctttgaagtggaaggccaagaaaaacagagagcactggtttgatgagcttcccaggacggcgctcctcatcttcaaaggtattaatatccttgtgaagtccaaggccttccagtatttcatgtacttggtggtggcagtcaacggggtctggatcctcgtggagacatttatgctgaaaggtgggaacttcttctccaagcacgtgccctggagttacctcgtctttctaactatctatggggtggagctgttcctgaaggttgccggcctgggccctgtggagtacttgtcttccggatggaacttgtttgacttctccgtgacagtgttcgccttcctgggactgctggcgctggccctcaacatggagcccttctatttcatcgtggtcctgcgccccctccagctgctgaggttgtttaagttgaaggagcgctaccgcaacgtgctggacaccatgttcgagctgctgccccggatggccagcctgggcctcaccctgctcatcttttactactccttcgccatcgtgggcatggagttcttctgcgggatcgtcttccccaactgctgcaacacgagtacagtggcagatgcctaccgctggcgcaaccacaccgtgggcaacaggaccgtggtggaggaaggctactattatctcaataattttgacaacatcctcaacagctttgtgaccctgtttgagctcacagttgtcaacaactggtacatcatcatggaaggcgtcacctctcagacctcccactggagccgcctctacttcatgaccttttacattgtgaccatggtggtgatgacgatcattgtcgcctttatcctcgaggccttcgtcttccgaatgaactacagccgcaagaaccaggactcggaagttgatggtggcatcacccttgagaaggaaatctccaaagaagagctggttgccgtcctggagctctaccgggaggcacggggggcctcctcggatgtcaccaggctgctggagaccctctcccagatggagagataccagcaacattccatggtgtttctgggacggcgatcaaggaccaagagcgacctgagcctgaagatgtaccaggaggagatccaggagtggtatgaggagcatgccagggagcaagagcagcagcgacaactcagcagcagtgcagcccccgccgcccagcagcccccaggcagccgccagcgctcccagaccgttacctagcccagcgcccgaaagccgtctcttctatgcaataacacaatagtattactctactgcgatgtacggaactgcggtgtgtgtacacatactcacgtatatgcacatatttatatacaggaagaaaaaagacagacaagatggggcttggtttataaccaccttgccctgtcttccttaactccagaagccagtttggtgaggggtgggggtgcggccaccaggtctgagctcttcctactgtggaaggctccagaaggcccttcacaaggagacccctcacctggatccagtcgactgcggggcttgcccctcatgtgggctggcctccatcggccacgtccaaagctgtcactgctactgcttcaggctcacatccccccgacctgatggcgtgcccgccccctctccctgcggcccatgccacaggtttctgtgttttgctttagggacagaaccacttaggaaggaaagaactcccggtctccagggtggtatttcagtgtctgtgataatgtcacgcaacacctcttcggggaccagtgcccaggatctaatggaagcggaattggggcaactgggcccatgtggccagagctcagttagccagtgccgggcggccacagattacactgaccaatctcctcccttggctctgcaagcctcccacccagccttctctggcttaacccttgttggcgaaaactcttccacagtggcctccttggggacccagaacccggaggaaggggcatgaggcaggaagtggggccgatgtctgcaacccagaccacttcgtggaatgggctcttgaccaaatccctttttttgcgatttacccgttcaagcaaaacaacgttttggttaactaaggattgtgctaaagccgataccaggtccttcacacgtgtgcactaggaacaggagcgaacagcacagagagacgctccctgtgggacgcagcagccccgtggccccggcccagttcccagccaccctccctggctctgctcacaccagagatttccatagcaggagcggttggtgcagaagtaggttcagatgaacctcagttaacgtcgccacccctcctcccaccatggtaccctgtaggagccctgtatgacatctgagcgtggtggaggtaggagggttgccagctgcagtgaccctgccacagaggcagggtcagtgcagaggtcgctttggttccgcttccctgggccacagaacggaacacagcataggttctgcagcaggagccgcagtggcaggatggagggtgcgaagggcaaggagtgcactgctgggcattcctggccagccccggccctctggtgcctgcttcctgtgacttcagaaggcaggtggacagagcctccctctggccttgtcctcttcccagccacagaacgggcagggtggcacccgaccccaggggagcagtacctggtcccccaccccctcctcccaaccacctccaaggccaagctgggtcccatagccagcacggcatggttctccccttccccccttcccaggtcaggggagttggacaagtagcaggtgtttgtttttaaagcacagccctttgggaaagcaacacattattgagactcactgtgattcccccgggagtcagactggctttgtcctcttcctctctggagggccatgggccatcagcaggagctccacatcgagccccaggccagaaccccctccctttcacagagagggaactttattgcacaattgggtgccttttagcttttgtgtgttgaaatgggcgttttggaagcaagggtcaggggacagcttctaaaggtgtgagtctctgacctgagcatctgggcctcgcctgggcccttcttcctccccaggggtggaaacgtggaggggccagcagcaccccggggtctgcccaggggagtcaaggccccgaggtgggggggcctattccaggaggagtgggatctcggccctgtccagagcgagttaatgtgtccatctgcccaaccctgtcctgagaaaggacctggttttggccaggacctgacaaatacccaatggcagcagtgtcaacagacgggagtccagccagggtgggtgcccttgtcattgaggttagggacagctatccccaggttatgcctggccccacccagcagggagttggggtccccccacaggctgtgagctctgtgggccctgggatgtgatctagctcagatgccctctcatccttgatgtcatagttgagtgcacccaagtggcacccactggcggccaggggcacagcctggtggtggtggcaatagaactgtgcccctcctcagctcctcgcttcccctcccacagccccagccttactccaccatgcggacaatcattttgtacggatcacgggagcaatgctgtacggttttgtacactggtggtttgtttcctagaaaacccattgtgtctctggatttctagcacattactaaaagagcctctgctttgt

SEQ ID NO: 33307 - DNA, 5345 bp, Homo sapiens
  source 1..5345: mol_type = unassigned DNA
aggagagctggcgcagctgccctggtggcagtggctgaagtggcggcggcttcggcggctgcggcggctgcaacagcttcgggctcggggttttggcggcggcgccggcgggctaggctgcgcggtgcggaccccggcgcgcggtccgggttgctggggcggcgcgtagatggagtcttgctacattgcccaggctggtcttgaactgctaggctcaagcagttctcccaccttgacctcccaaagcgctgagattacagaagatgcctctaatggaggagtttctgagcagcacccctggcccagtggctttgaaagggagctcaaaccagagactatttcaagccctggatatcatatcctgagggccacaggagaagagaacatggctgtgagtttggatgacgacgtgccgctcatcctgaccttggatgagggtggcagtgccccactggctccctccaacggcctgggccaagaagagctacctagcaaaaatggcggcagctatgccatccacgactcccaggcccccagtctcagctctgggggtgagagttccccctccagccccgcacacaactgggagatgaattaccaagaggcagcaatctacctccaggaaggcgagaacaacgacaagttcttcacccaccccaaggatgccaaggcgctggcggcctacctctttgcacacaatcacctcttctacctgatggagctggccacggccctgctgctgctgctgctctccctgtgcgaggcccccgccgtccccgcactccggcttggcatctatgtccacgccaccctggagctgtttgccctgatggtggtagtgtttgaactctgcatgaagttacgctggctgggcctccacaccttcatccggcacaagcggaccatggtcaagacctcggtgctggtggtgcagtttgtcgaggccatcgtggtgttggtacggcagatgtcccatgtgcgggtgacccgagcactgcgctgcattttcctggtggactgtcggtattgcggtggcgtccggcgcaacctgcggcagatcttccagtccctgccgcccttcatggacatcctcctgctgctgctgttcttcatgatcatctttgccatcctcggtttctacttgttctcccctaacccttcagacccctacttcagcaccctggagaacagcatcgtcagtctgtttgtccttctgaccacagccaatttcccagatgtgatgatgccctcctactcccggaacccctggtcctgcgtcttcttcatcgtgtacctctccatcgagctgtatttcatcatgaacctgcttctggctgtggtgttcgacaccttcaatgacattgagaaacgcaagttcaagtctttgctactgcacaagcgaaccgctatccagcatgcctaccgcctgctcatcagccagaggaggcctgccggcatctcctacaggcagtttgaaggcctcatgcgcttctacaagccccggatgagtgccagggagcgctatcttaccttcaaggccctgaatcagaacaacacacccctgctcagcctaaaggacttttacgatatctacgaagttgctgctttgaagtggaaggccaagaaaaacagagagcactggtttgatgagcttcccaggacggcgctcctcatcttcaaaggtattaatatccttgtgaagtccaaggccttccagtatttcatgtacttggtggtggcagtcaacggggtctggatcctcgtggagacatttatgctgaaaggtgggaacttcttctccaagcacgtgccctggagttacctcgtctttctaactatctatggggtggagctgttcctgaaggttgccggcctgggccctgtggagtacttgtcttccggatggaacttgtttgacttctccgtgacagtgttcgccttcctgggactgctggcgctggccctcaacatggagcccttctatttcatcgtggtcctgcgccccctccagctgctgaggttgtttaagttgaaggagcgctaccgcaacgtgctggacaccatgttcgagctgctgccccggatggccagcctgggcctcaccctgctcatcttttactactccttcgccatcgtgggcatggagttcttctgcgggatcgtcttccccaactgctgcaacacgagtacagtggcagatgcctaccgctggcgcaaccacaccgtgggcaacaggaccgtggtggaggaaggctactattatctcaataattttgacaacatcctcaacagctttgtgaccctgtttgagctcacagttgtcaacaactggtacatcatcatggaaggcgtcacctctcagacctcccactggagccgcctctacttcatgaccttttacattgtgaccatggtggtgatgacgatcattgtcgcctttatcctcgaggccttcgtcttccgaatgaactacagccgcaagaaccaggactcggaagttgatggtggcatcacccttgagaaggaaatctccaaagaagagctggttgccgtcctggagctctaccgggaggcacggggggcctcctcggatgtcaccaggctgctggagaccctctcccagatggagagataccagcaacattccatggtgtttctgggacggcgatcaaggaccaagagcgacctgagcctgaagatgtaccaggaggagatccaggagtggtatgaggagcatgccagggagcaagagcagcagcgacaactcagcagcagtgcagcccccgccgcccagcagcccccaggcagccgccagcgctcccagaccgttacctagcccagcgcccgaaagccgtctcttctatgcaataacacaatagtattactctactgcgatgtacggaactgcggtgtgtgtacacatactcacgtatatgcacatatttatatacaggaagaaaaaagacagacaagatggggcttggtttataaccaccttgccctgtcttccttaactccagaagccagtttggtgaggggtgggggtgcggccaccaggtctgagctcttcctactgtggaaggctccagaaggcccttcacaaggagacccctcacctggatccagtcgactgcggggcttgcccctcatgtgggctggcctccatcggccacgtccaaagctgtcactgctactgcttcaggctcacatccccccgacctgatggcgtgcccgccccctctccctgcggcccatgccacaggtttctgtgttttgctttagggacagaaccacttaggaaggaaagaactcccggtctccagggtggtatttcagtgtctgtgataatgtcacgcaacacctcttcggggaccagtgcccaggatctaatggaagcggaattggggcaactgggcccatgtggccagagctcagttagccagtgccgggcggccacagattacactgaccaatctcctcccttggctctgcaagcctcccacccagccttctctggcttaacccttgttggcgaaaactcttccacagtggcctccttggggacccagaacccggaggaaggggcatgaggcaggaagtggggccgatgtctgcaacccagaccacttcgtggaatgggctcttgaccaaatccctttttttgcgatttacccgttcaagcaaaacaacgttttggttaactaaggattgtgctaaagccgataccaggtccttcacacgtgtgcactaggaacaggagcgaacagcacagagagacgctccctgtgggacgcagcagccccgtggccccggcccagttcccagccaccctccctggctctgctcacaccagagatttccatagcaggagcggttggtgcagaagtaggttcagatgaacctcagttaacgtcgccacccctcctcccaccatggtaccctgtaggagccctgtatgacatctgagcgtggtggaggtaggagggttgccagctgcagtgaccctgccacagaggcagggtcagtgcagaggtcgctttggttccgcttccctgggccacagaacggaacacagcataggttctgcagcaggagccgcagtggcaggatggagggtgcgaagggcaaggagtgcactgctgggcattcctggccagccccggccctctggtgcctgcttcctgtgacttcagaaggcaggtggacagagcctccctctggccttgtcctcttcccagccacagaacgggcagggtggcacccgaccccaggggagcagtacctggtcccccaccccctcctcccaaccacctccaaggccaagctgggtcccatagccagcacggcatggttctccccttccccccttcccaggtcaggggagttggacaagtagcaggtgtttgtttttaaagcacagccctttgggaaagcaacacattattgagactcactgtgattcccccgggagtcagactggctttgtcctcttcctctctggagggccatgggccatcagcaggagctccacatcgagccccaggccagaaccccctccctttcacagagagggaactttattgcacaattgggtgccttttagcttttgtgtgttgaaatgggcgttttggaagcaagggtcaggggacagcttctaaaggtgtgagtctctgacctgagcatctgggcctcgcctgggcccttcttcctccccaggggtggaaacgtggaggggccagcagcaccccggggtctgcccaggggagtcaaggccccgaggtgggggggcctattccaggaggagtgggatctcggccctgtccagagcgagttaatgtgtccatctgcccaaccctgtcctgagaaaggacctggttttggccaggacctgacaaatacccaatggcagcagtgtcaacagacgggagtccagccagggtgggtgcccttgtcattgaggttagggacagctatccccaggttatgcctggccccacccagcagggagttggggtccccccacaggctgtgagctctgtgggccctgggatgtgatctagctcagatgccctctcatccttgatgtcatagttgagtgcacccaagtggcacccactggcggccaggggcacagcctggtggtggtggcaatagaactgtgcccctcctcagctcctcgcttcccctcccacagccccagccttactccaccatgcggacaatcattttgtacggatcacgggagcaatgctgtacggttttgtacactggtggtttgtttcctagaaaacccattgtgtctctggatttctagcacattactaaaagagcctctgctttgtaaa

SEQ ID NO: 33308 - DNA, 527 bp, Homo sapiens
  source 1..527: mol_type = unassigned DNA
aacgagtaaggcggggaacaagggaggagtaaggggcgtggattcttcgtcccgccccttcttaaggaggcgggcagggagtaccgcatcggcggcgggcgagacctgcggaaggacgtgatagttggccaatcagagttcatcacgaagatgcctctaatggaggagtttctgagcagcacccctggcccagtggctttgaaagggagctcaaaccagagactatttcaagccctggatatcatatcctgagggccacaggagaagagaacatggctgtgagtttggatgacgacgtgccgctcatcctgaccttggatgagggtggcagtgccccactggctccctccaacggcctgggccaagaagagctacctagcaaaaatggcggcagctatgccatccacgactcccaggcccccagtctcagctctgggggtgagagttccccctccagccccgcacacaactgggagatgaattaccaagaggcagcaatctacctccaggaaggcgagaacaacgac

SEQ ID NO: 33309 - DNA, 570 bp, Homo sapiens
  source 1..570: mol_type = unassigned DNA
gagaggacggtaggcggtggataggagagctggcgcagctgccctggtggcagtggctgaagtggcggcggcttcggcggctgcggcggctgcaacagcttcgggctcggggttttggcggcggcgccggcgggctaggctgcgcgaagatgcctctaatggaggagtttctgagcagcacccctggcccagtggctttgaaagggagctcaaaccagagactatttcaagccctggatatcatatcctgagggccacaggagaagagaacatggctgtgagtttggatgacgacgtgccgctcatcctgaccttggatgagggtggcagtgccccactggctccctccaacggcctgggccaagaagagctacctagcaaaagacgctgctgcatgctgtgctccagcaaacagaaaccttggattccctgcagggtcatttccgatgtggcgtgcaaagcagccagctgtttcgagggagcgtctgggccctgtgacatcagcatgtgggagtgttaccgtgtgtgcaaacagatggcggcagctatgccatccacgactcccaggcc

SEQ ID NO: 33310 - DNA, 2931 bp, Homo sapiens
  source 1..2931: mol_type = unassigned DNA
agcaaaaacgccagggacggggtctccgcgcctgcgcagtgaagctgggcgccttcggggcttgagcttctgagggtcgggtccagcgcgtgggctgctggatggcggaaccccaggcggagtcggagcccctgctgggcggggcccgcggcggtggcggcgactggccggcggggctgaccacttaccgcagcatccaagtcggccctggtgccgcggccaggtgggacctctgcattgatcaggctgtggtcttcatcgaagatgctattcagtaccgctccatcaaccaccgggtggatgccagctcgatgtggctttaccgacggtattactcgaacgtatgccaacggactttgagcttcaccatcttcttgatcctgtttttggcttttatcgagaccccatcctcactcaccagcacggcggacgtgcgctaccgcgctgctccctgggagccgccctgcggcctgaccgagagtgtcgaggtgctctgcctgctggtctttgcggccgacctctctgtgaagggttacctgttcgggtgggcccatttccagaaaaacctttggctgctgggctacctcgtggtgctggtggtgtctctggtggactggaccgtgtccctgagtctcgtgtgtcatgagcccctgcggatccgccggcttctccgtcccttcttcctgctgcagaactcctctatgatgaagaagaccttgaaatgcatccgctggtcgctgccggaaatggccagcgtcgggctgctgctggccatccacctgtgcctcttcaccatgttcggaatgctgctgttcgctggtgggaagcaggatgatgggcaggacagggagaggctgacctacttccagaacctgcctgagtctctgacttccctcctggtgctgctgaccacggccaacaaccccgatgtgatgattcctgcgtattccaagaaccgggcctatgccatcttcttcatagtcttcactgtgataggaagcctgtttctgatgaacctgctgacagccatcatctacagtcagttccggggctacctgatgaaatctctccagacctcgctgtttcggaggcggctgggaacccgggctgcctttgaagtcctatcctccatggtgggggagggaggagccttccctcaggcagttggggtgaagccccagaacttgctgcaggtgcttcagaaggtccagctggacagctcccacaaacaggccatgatggagaaggtgcgttcctatggcagtgttctgctctcagctgaggagtttcagaagctcttcaacgagcttgacagaagtgtggttaaagagcacccgccgaggcccgagtaccagtctccgtttctgcagagcgcccagttcctcttcggccactactactttgactacctggggaacctcatcgccctggcaaacctggtgtccatttgcgtgttcctggtgctggatgcagatgtgctgcctgctgagcgtgatgacttcatcctggggattctcaactgcgtcttcattgtgtactacctgttggagatgctgctcaaggtctttgccctgggcctgcgagggtacctgtcctaccccagcaacgtgtttgacgggctcctcaccgttgtcctgctggttttggagatctcaactctggctgtgtaccgattgccacacccaggctggaggccggagatggtgggcctgctgtcgctgtgggacatgacccgcatgctgaacatgctcatcgtgttccgcttcctgcgtatcatccccagcatgaagctgatggccgtggtggccagtaccgtcctgggcctggtgcagaacatgcgtgcgtttggcgggatcctggtggtggtctactacgtatttgccatcattgggatcaacttgtttagaggcgtcattgtggctcttcctggaaacagcagcctggcccctgccaatggctcggcgccctgtgggagcttcgagcagctggagtactgggccaacaacttcgatgactttgcggctgccctggtcactctgtggaacttgatggtggtgaacaactggcaggtgtttctggatgcatatcggcgctactcaggcccgtggtccaagatctattttgtattgtggtggctggtgtcgtctgtcatctgggtcaacctgtttctggccctgattctggagaacttccttcacaagtgggacccccgcagccacctgcagccccttgctgggaccccagaggccacctaccagatgactgtggagctcctgttcagggatattctggaggagcccggggaggatgagctcacagagaggctgagccagcacccgcacctgtggctgtgcaggtgacgtccgggctgccgtcccagcaggggcggcaggagagagaggctggcctacacaggtgcccgtcatggaagaggcggccatgctgtggccagccaggcaggaagagacctttcctctgacggaccactaagctggggacaggaaccaagtcctttgcgtgtggcccaacaaccatctacagaacagctgctggtgcttcagggaggcgccgtgccctccgctttcttttatagctgcttcagtgagaattccctcgtcgactccacagggacctttcagacaaaaatgcaagaagcagcggcctcccctgtcccctgcagcttccgtggtgcctttgctgccggcagcccttggggaccacaggcctgaccagggcctgcacaggttaaccgtcagacttccggggcattcaggtggggatgctggtggtttgacatggagagaaccttgactgtgttttattatttcatggcttgtatgagtgtgactgggtgtgtttctttagggttctgattgccagttattttcatcaataagtcttgcaaagaatgggattgtcattcttcacttc

SEQ ID NO: 33311 - DNA, 4730 bp, Homo sapiens
  source 1..4730: mol_type = unassigned DNA
tgccgtgcgcgcgtcagcaaaaacgccagggacggggtctccgcgcctgcgcagtgaagctgggcgccttcggggcttgagcttctgagggtcgggtccagcgcgtgggctgctggatggcggaaccccaggcggagtcggagcccctgctgggcggggcccgcggcggtggcggcgactggccggcggggctgaccacttaccgcagcatccaagtcggccctggtgccgcggccaggtgggacctctgcattgatcaggctgtggtcttcatcgaagatgctattcagtaccgctccatcaaccaccgggtggatgccagctcgatgtggctttaccgacggtattactcgaacgtatgccaacggactttgagcttcaccatcttcttgatcctgtttttggcttttatcgagaccccatcctcactcaccagcacggcggacgtgcgctaccgcgctgctccctgggagccgccctgcggcctgaccgagagtgtcgaggtgctctgcctgctggtctttgcggccgacctctctgtgaagggttacctgttcgggtgggcccatttccagaaaaacctttggctgctgggctacctcgtggtgctggtggtgtctctggtggactggaccgtgtccctgagtctcgtgtgtcatgagcccctgcggatccgccggcttctccgtcccttcttcctgctgcagaactcctctatgatgaagaagaccttgaaatgcatccgctggtcgctgccggaaatggccagcgtcgggctgctgctggccatccacctgtgcctcttcaccatgttcggaatgctgctgttcgctggtgggaagcaggatgatgggcaggacagggagaggctgacctacttccagaacctgcctgagtctctgacttccctcctggtgctgctgaccacggccaacaaccccgatgtgatgattcctgcgtattccaagaaccgggcctatgccatcttcttcatagtcttcactgtgataggaagcctgtttctgatgaacctgctgacagccatcatctacagtcagttccggggctacctgatgaaatctctccagacctcgctgtttcggaggcggctgggaacccgggctgcctttgaagtcctatcctccatggtgggggagggaggagccttccctcaggccacccgccgaggcccgagtaccagtctccgtttctgcagagcgcccagttcctcttcggccactactactttgactacctggggaacctcatcgccctggcaaacctggtgtccatttgcgtgttcctggtgctggatgcagatgtgctgcctgctgagcgtgatgacttcatcctggggattctcaactgcgtcttcattgtgtactacctgttggagatgctgctcaaggtctttgccctgggcctgcgagggtacctgtcctaccccagcaacgtgtttgacgggctcctcaccgttgtcctgctggaggccggagatggtgggcctgctgtcgctgtgggacatgacccgcatgctgaacatgctcatcgtgttccgcttcctgcgtatcatccccagcatgaagctgatggccgtggtggccagtaccgtcctgggcctggtgcagaacatgcgtgcgtttggcgggatcctggtgcctggcccctgccaatggctcggcgccctgtgggagcttcgagcagctggagtactgggccaacaacttcgatgactttgcggctgccctggtcactctgtggaacttgatggtggtgaacaactggcaggtgtttctggatgcatatcggcgctactcaggcccgtggtccaagatctattttgtattgtggtggctggtgtcgtctgtcatctgggtcaacctgtttctggccctgattctggagaacttccttcacaagtgggacccccgcagccacctgcagccccttgctgggaccccagaggccacctaccagatgactgtggagctcctgttcagggatattctggaggagcccggggaggatgagctcacagagaggctgagccagcacccgcacctgtggctgtgcaggtgacgtccgggctgccgtcccagcaggggcggcaggagagagaggctggcctacacaggtgcccgtcatggaagaggcggccatgctgtggccagccaggcaggaagagacctttcctctgacggaccactaagctggggacaggaaccaagtcctttgcgtgtggcccaacaaccatctacagaacagctgctggtgcttcagggaggcgccgtgccctccgctttcttttatagctgcttcagtgagaattccctcgtcgactccacagggacctttcagacaaaaatgcaagaagcagcggcctcccctgtcccctgcagcttccgtggtgcctttgctgccggcagcccttggggaccacaggcctgaccagggcctgcacaggttaaccgtcagacttccggggcattcaggtggggatgctggtggtttgacatggagagaaccttgactgtgttttattatttcatggcttgtatgagtgtgactgggtgtgtttctttagggttctgattgccagttattttcatcaataagtcttgcaaagaatgggattgtcattcttcacttcagcacagttctagtcctgcttctctggagtagggttgttgagtaaggttgcttgggttgtgcattgcacaagggcacatggctgtgaggtgtatcctggcggggggctgtctacctgcagtgaggggcaccttttctgttttgctcaaaggcatgtataagccaatgggtgaccttatttcctgtgtcttcaggtgtgtggcagggggcctggggtggggaggtggggcgagcgagcagtgtgtggaaagccttgttgtcacctgaagcacgccaggtccagattgaccaatggttttctcacttcaggggccaacccacgccccctttctgctgaggtttgggtgccatctagtggtgggatgggacttggttgactacatttaaggtaaggtggacccagcaactcccagaaacaactccggggacaccactccccatcacactccacaccgagcctggtgcccggtctgtgcccgagctcagcgggaccaggaagggatgggccctgccagggttgcccctgcactgtgcattctcgcctgggaggcacaagttctttcatctgcttttccttcagaggtgctgagcccacgccatagcccctgtgggatggtgggggagggggcgacccgaacaacagtgcagtcggtatcgagattggggagaggagcgagtccaaggagaaggtcatgagtttctttttactcgtgttgaataataacaataacaataacaataacaatatggaaaccaccgcaaacttggagaaaagttgtaagcacagtaaagagaagcttccttctgagtcacttgagtggttgccgttctggccctgcaccctctgtgctttgggacggcgtccaacccgcattcatgtcaggagtgagtcgcacgtggctttgtggtcatggcgacttaatccgcctggacggtggctccgtctccctgggcttagacgaccttggcacttctggagataagcccatggctcccaggttgtgttcatgtgacgtttccttgtggtaggttctgggtctgcgtttcgtctaggagtgtcacaggatggacactgcctcctggcaggggctgcccaatgcagttagcctcctgctggtgttctctcttgttgcttggtgaaggtggccctggtcagcttctccactgcccagtgaacgacccctttgtaatgaatgagtggggaggtagtgtgaagcgatgccaatatcccatccctgtcaaactgcctttactttttccttccttccttgctcccacctgtgtggatcctggtcccttcttgtattcagggctgtggtctgttatgacatttactctcaggctcaggtcctgcttgtttggcccgtgggagccccttcttctgccttttgtgttttttttgttatgtacctacagttctttagctgtttctttactttctggtgcaaaaagatgttcaagccttattttatacttgcctgcccctttctctttcatttattggagtgagctgcagctctaagaagacctgttcttttgaatggagagtagcatcaggaaccaggatgtgggtgcgaggcgtgctcctggctgttgcagattgctgcacccgggagctcttagtggacagagctagaggatatgtgcacgtacttccatctctctctctgtctcatctattcacagctgggaatgatactaatacctccgattttagcccagcaccacagggtacgttccagtttttctctctttccatagctgtaaggccctttctgggaatggttctcattctccttaatctattattgggtcagttttcctgcatgtccccagcctcccatcactgccacccactccccacagagatgccctgctcatccgactggggctttgactcccacactgtgtacccctcttgtgtggacgccctgctgccaaaaccttcagcaaacagctttccaaatggaagttgtcactgtcagggcctttacaatcagcaacagcaaaatctacatgctgctgagggtcctgcctcattaagatgcaataaatatgtaagtacataaaaacagcaatag

SEQ ID NO: 33312 - DNA, 2914 bp, Homo sapiens
  source 1..2914: mol_type = unassigned DNA
gatttcagttgaaagatgtgtttttgtgagtagagcaccgcagaagaactgaagactgttgtgtgctccccgcagaaggggctaccatgatcctttcctcctataacaccatccagtcggttttctgttgctgctgttgctgttcagtgcagaagcgacaaatgagaacacagataagcctgagcacagatgaagagcttccagaaaaatacacccagcgtcgcaggccgtggctcagccaattgtcaaataagaagcaatccaacacgggccgtgtgcagccgtcaaaacgaaagccactgcctcccctcccaccctctgaggttgctgaagagaagatccaagtcaaggcactttatgattttctgcccagagaaccctgtaatttagccttaaggagagcagaagaatacctgatactggagaaatacaatcctcactggtggaaggcaagagaccgtttggggaatgaaggcttaatcccaagcaactatgtgactgaaaacaaaataactaatttagaaatatatgagtggtaccatagaaacattaccagaaatcaggcagaacatctattgagacaagagtctaaagaaggtgcatttattgtcagagattcaagacatttaggatcctacacaatttccgtatttatgggagctagaagaagtacggaggctgccataaaacattatcagataaaaaagaatgactcaggacagtggtatgtggctgaaagacacgcctttcaatcaatccctgagttaatctggtatcaccagcacaatgcagccggtctcatgactcgtctccgatatccagttgggctgatgggcagttgtttaccagccacagctgggtttagctacgaaaagtgggagatagatccatctgagttggcttttataaaggagattggaagcggtcagtttggagtggtccatttaggtgaatggcggtcacatatccaggtagctatcaaggccatcaatgaaggctccatgtctgaagaggatttcattgaagaggccaaagtgatgatgaaattatctcattcaaagctagtgcaactttatggagtctgtatacagcggaagcccctttacattgtgacagagttcatggaaaatggctgcctgcttaactatctcagggagaataaaggaaagcttaggaaggaaatgctactgagtgtatgccaggatatatgtgaaggaatggaatatctggagaggaatggctatattcatagggatttggcggcaaggaattgtttggtcagttcaacatgcatagtaaaaatttcagactttggaatgacaaggtacgttttggatgatgagtatgtcagttcttttggagccaagttcccaatcaagtggtcccctcctgaagtttttcttttcaataagtacagcagtaaatctgatgtctggtcatttggagttttaatgtgggaagtttttacagaaggaaaaatgccttttgaaaataagtcaaatttgcaagtcgtggaagctatttctgaaggcttcaggctatatcgccctcacctggcaccaatgtccatatatgaagtcatgtacagctgctggcatgagaaacctgaaggccgccctacatttgccgagctgctgcgggctgtcacagagattgcggaaacctggtgaccggaaacagaatgccaacccaaagagtcatcttgcaaaactgtcatttattgtgaatatcttcaccatatggggtcacttatggtgaatatctttcttcagagttgctgactcttgaaaacagtgcaaagatcacagtttttaaaagttttaaaaatttaagaatattcacacaatcgtttttctatgtgtgagagggatttgcacactcttatttttctgtaaaatatttcacatcccaaatgtgaagaagtgaaaaagacttcgcagcagtcttcattgtggtgctcttcatgatcatagccccaggaacccttgaggttcttcttcacaaggctgagagtgcttccttcttgaagacgagtgacattcatcacttcagtgatccatgcatagaatatgaaaataaattcttccaactcatgggataaaggggactcccttgaagaatttcatgtttttgggctgtatagctctttacagaaaatgcacctttataaatcacatgaatgttagtattctggaaatgtcttttgttaatataatcttcccatgttatttaacaaattgtttttgcacatatctgattatattgaaagcagttttttgcattcgagttttaaacactgttataaaatgtagccaaagctcacctttgaacagatcccggtgacattctatttccaggaaaatccggaacctgattttagttctgtgattttacactttttacatgtgagattggacagtttcagaggccttattttgtcatactaagtgtctcctgtaattttcaggaagatgatttgttctttccagaagaggagacaaaagcaagatagccaaatgtgacatcaagctccattgtttcggaaatccaggattttgaattcgagatgaaacaaccagcaatcacagttaaatcttaactttgcctgcactctttgtaggaatgatcagaaatttatctttatcattctgagtgcttcaggagtacaataggaagaaagatactggagaaagcactaatgtaatcaccatgaagtctgacaacaggagcccattatttgcgtactgtcccaccctgtatcatggttctctgggaacaagctttatgattctcattagagtttatttgttgattgtcagtagttgcgacttttaaattatatttcccccactcaaagaatggtatctttatatatcaatgacattcaataaatgtgtattatttctaatgagaa

SEQ ID NO: 33313 - DNA, 582 bp, Homo sapiens
  source 1..582: mol_type = unassigned DNA
agacttcctccttcacttgcctggacgctgcgccacatcccaccggcccttacactgtggtgtccagcagcatccggcttcatggggggacttgaaccctgcagcaggctcctgctcctgcctctcctgctggctgtaagtggtctccgtcctgtccaggcccaggcccagagcgattgcagttgctctacggtgagcccgggcgtgctggcagggatcgtgatgggagacctggtgctgacagtgctcattgccctggccgtgtacttcctgggccggctggtccctcgggggcgaggggctgcggaggcagcgacccggaaacagcgtatcactgagaccgagtcgccttatcaggagctccagggtcagaggtcggatgtctacagcgacctcaacacacagaggccgtattacaaatgagcccgaatcatgacagtcagcaacatgatacctggatccagccattcctgaagcccaccctgcacctcattccaactcctaccgcgatacagacccacagagtgccatccctgagagaccagaccgctccccaatactctcctaaaataaacatgaagc

SEQ ID NO: 33314 - DNA, 579 bp, Homo sapiens
  source 1..579: mol_type = unassigned DNA
agacttcctccttcacttgcctggacgctgcgccacatcccaccggcccttacactgtggtgtccagcagcatccggcttcatggggggacttgaaccctgcagcaggctcctgctcctgcctctcctgctggctgtaagtggtctccgtcctgtccaggcccaggcccagagcgattgcagttgctctacggtgagcccgggcgtgctggcagggatcgtgatgggagacctggtgctgacagtgctcattgccctggccgtgtacttcctgggccggctggtccctcgggggcgaggggctgcggaggcgacccggaaacagcgtatcactgagaccgagtcgccttatcaggagctccagggtcagaggtcggatgtctacagcgacctcaacacacagaggccgtattacaaatgagcccgaatcatgacagtcagcaacatgatacctggatccagccattcctgaagcccaccctgcacctcattccaactcctaccgcgatacagacccacagagtgccatccctgagagaccagaccgctccccaatactctcctaaaataaacatgaagc

SEQ ID NO: 33315 - DNA, 549 bp, Homo sapiens
  source 1..549: mol_type = unassigned DNA
agacttcctccttcacttgcctggacgctgcgccacatcccaccggcccttacactgtggtgtccagcagcatccggcttcatggggggacttgaaccctgcagcaggctcctgctcctgcctctcctgctggctgtaagtgattgcagttgctctacggtgagcccgggcgtgctggcagggatcgtgatgggagacctggtgctgacagtgctcattgccctggccgtgtacttcctgggccggctggtccctcgggggcgaggggctgcggaggcagcgacccggaaacagcgtatcactgagaccgagtcgccttatcaggagctccagggtcagaggtcggatgtctacagcgacctcaacacacagaggccgtattacaaatgagcccgaatcatgacagtcagcaacatgatacctggatccagccattcctgaagcccaccctgcacctcattccaactcctaccgcgatacagacccacagagtgccatccctgagagaccagaccgctccccaatactctcctaaaataaacatgaagc

SEQ ID NO: 33316 - DNA, 415 bp, Homo sapiens
  source 1..415: mol_type = unassigned DNA
acttgcctggacgctgcgccacatcccaccggcccttacactgtggtgtccagcagcatccggcttcatggggggacttgaaccctgcagcaggctcctgctcctgcctctcctgctggctgtaagtggtctccgtcctgtccaggcccaggcccagagcgattgcagttgctctacggtgagcccgggcgtgctggcagggatcgtgatgggagacctggtgctgacagtgctcattgccctggccgtgtacttcctgggccggctggtccctcgggggcgaggggctgcggaggcgacccggaaacagcgtatcactgagaccgagtcgccttatcaggagctccagggtcagaggtcggatgtctacagcgacctcaacacacagaggccgtattacaaatgagcccgaatc

SEQ ID NO: 33317 - DNA, 3959 bp, Homo sapiens
  source 1..3959: mol_type = unassigned DNA
gcggtggcgcgggagcggccccggggaccccgcgctgctgacggcggcgaccgcggccggaggcgggcgcgggtctcggaggcggtcgcctcagcaccgccccacgggcggccccagcccctcccgcagccctcctccctcccgctcccttcccgccgcctcctccccgccctcctccctcctcgctcgcgggccgggcccggcatggtgcggcgtcgccgccgatggcgctgaggcggagcatggggcggccggggctcccgccgctgccgctgccgccgccaccgcggctcgggctgctgctggcggctctggcttctctgctgctcccggagtccgccgccgcaggtctgaagctcatgggagccccggtgaagctgacagtgtctcaggggcagccggtgaagctcaactgcagtgtggaggggatggaggagcctgacatccagtgggtgaaggatggggctgtggtccagaacttggaccagttgtacatcccagtcagcgagcagcactggatcggcttcctcagcctgaagtcagtggagcgctctgacgccggccggtactggtgccaggtggaggatgggggtgaaaccgagatctcccagccagtgtggctcacggtagaaggtgtgccatttttcacagtggagccaaaagatctggcagtgccacccaatgcccctttccaactgtcttgtgaggctgtgggtccccctgaacctgttaccattgtctggtggagaggaactacgaagatcgggggacccgctccctctccatctgttttaaatgtaacaggggtgacccagagcaccatgttttcctgtgaagctcacaacctaaaaggcctggcctcttctcgcacagccactgttcaccttcaagcactgcctgcagcccccttcaacatcaccgtgacaaagctttccagcagcaacgctagtgtggcctggatgccaggtgctgatggccgagctctgctacagtcctgtacagttcaggtgacacaggccccaggaggctgggaagtcctggctgttgtggtccctgtgcccccctttacctgcctgctccgggacctggtgcctgccaccaactacagcctcagggtgcgctgtgccaatgccttggggccctctccctatgctgactgggtgccctttcagaccaagggtctagccccagccagcgctccccaaaacctccatgccatccgcacagattcaggcctcatcttggagtgggaagaagtgatccccgaggcccctttggaaggccccctgggaccctacaaactgtcctgggttcaagacaatggaacccaggatgagctgacagtggaggggaccagggccaatttgacaggctgggatccccaaaaggacctgatcgtacgtgtgtgcgtctccaatgcagttggctgtggaccctggagtcagccactggtggtctcttctcatgaccgtgcaggccagcagggccctcctcacagccgcacatcctgggtacctgtggtccttggtgtgctaacggccctggtgacggctgctgccctggccctcatcctgcttcgaaagagacggaaagagacgcggtttgggcaagcctttgacagtgtcatggcccggggagagccagccgttcacttccgggcagcccggtccttcaatcgagaaaggcccgagcgcatcgaggccacattggacagcttgggcatcagcgatgaactaaaggaaaaactggaggatgtgctcatcccagagcagcagttcaccctgggccggatgttgggcaaaggagagtttggttcagtgcgggaggcccagctgaagcaagaggatggctcctttgtgaaagtggctgtgaagatgctgaaagctgacatcattgcctcaagcgacattgaagagttcctcagggaagcagcttgcatgaaggagtttgaccatccacacgtggccaaacttgttggggtaagcctccggagcagggctaaaggccgtctccccatccccatggtcatcttgcccttcatgaagcatggggacctgcatgccttcctgctcgcctcccggattggggagaacccctttaacctacccctccagaccctgatccggttcatggtggacattgcctgcggcatggagtacctgagctctcggaacttcatccaccgagacctggctgctcggaattgcatgctggcagaggacatgacagtgtgtgtggctgacttcggactctcccggaagatctacagtggggactactatcgtcaaggctgtgcctccaaactgcctgtcaagtggctggccctggagagcctggccgacaacctgtatactgtgcagagtgacgtgtgggcgttcggggtgaccatgtgggagatcatgacacgtgggcagacgccatatgctggcatcgaaaacgctgagatttacaactacctcattggcgggaaccgcctgaaacagcctccggagtgtatggaggacgtgtatgatctcatgtaccagtgctggagtgctgaccccaagcagcgcccgagctttacttgtctgcgaatggaactggagaacatcttgggccagctgtctgtgctatctgccagccaggaccccttatacatcaacatcgagagagctgaggagcccactgcgggaggcagcctggagctacctggcagggatcagccctacagtggggctggggatggcagtggcatgggggcagtgggtggcactcccagtgactgtcggtacatactcacccccggagggctggctgagcagccagggcaggcagagcaccagccagagagtcccctcaatgagacacagaggcttttgctgctgcagcaagggctactgccacacagtagctgttagcccacaggcagagggcatcggggccatttggccggctctggtggccactgagctggctgactaagccccgtctgaccccagcccagacagcaaggtgtggaggctcctgtggtagtcctcccaagctgtgctgggaagcccggactgaccaaatcacccaatcccagttcttcctgcaaccactctgtggccagcctggcatcagtttaggccttggcttgatggaagtgggccagtcctggttgtctgaacccaggcagctggcaggagtggggtggttatgtttccatggttaccatgggtgtggatggcagtgtggggagggcaggtccagctctgtgggccctaccctcctgctgagctgcccctgctgcttaagtgcatgcattgagctgcctccagcctggtggcccagctattaccacacttggggtttaaatatccaggtgtgcccctccaagtcacaaagagatgtccttgtaatattcccttttaggtgagggttggtaaggggttggtatctcaggtctgaatcttcaccatctttctgattccgcaccctgcctacgccaggagaagttgaggggagcatgcttccctgcagctgaccgggtcacacaaaggcatgctggagtacccagcctatcaggtgcccctcttccaaaggcagcgtgccgagccagcaagaggaaggggtgctgtgaggcttgcccaggagcaagtgaggccggagaggagttcaggaacccttctccatacccacaatctgagcacgctaccaaatctcaaaatatcctaagactaacaaaggcagctgtgtctgagcccaacccttctaaacggtgacctttagtgccaacttcccctctaactggacagcctcttctgtcccaagtctccagagagaaatcaggcctgatgagggggaattcctggaacctggaccccagccttggtgggggagcctctggaatgcatggggcgggtcctagctgttagggacatttccaagctgttagttgctgtttaaaatagaaataaaattgaagactaaagacctaa

SEQ ID NO: 33318 - DNA, 3965 bp, Homo sapiens
  source 1..3965: mol_type = unassigned DNA
agtggaaggagcgcggtggcgcgggagcggccccggggaccccgcgctgctgacggcggcgaccgcggccggaggcgggcgcgggtctcggaggcggtcgcctcagcaccgccccacgggcggccccagcccctcccgcagccctcctccctcccgctcccttcccgccgcctcctccccgccctcctccctcctcgctcgcgggccgggcccggcatggtgcggcgtcgccgccgatggcgctgaggcggagcatggggcggccggggctcccgccgctgccgctgccgccgccaccgcggctcgggctgctgctggcggctctggcttctctgctgctcccggagtccgccgccgcaggtctgaagctcatgggagccccggtgaagctgacagtgtctcaggggcagccggtgaagctcaactgcagtgtggaggggatggaggagcctgacatccagtgggtgaaggatggggctgtggtccagaacttggaccagttgtacatcccagtcagcgagcagcactggatcggcttcctcagcctgaagtcagtggagcgctctgacgccggccggtactggtgccaggtggaggatgggggtgaaaccgagatctcccagccagtgtggctcacggtagaaggtgtgccatttttcacagtggagccaaaagatctggcagtgccacccaatgcccctttccaactgtcttgtgaggctgtgggtccccctgaacctgttaccattgtctggtggagaggaactacgaagatcgggggacccgctccctctccatctgttttaaatgtaacaggggtgacccagagcaccatgttttcctgtgaagctcacaacctaaaaggcctggcctcttctcgcacagccactgttcaccttcaagcactgcctgcagcccccttcaacatcaccgtgacaaagctttccagcagcaacgctagtgtggcctggatgccaggtgctgatggccgagctctgctacagtcctgtacagttcaggtgacacaggccccaggaggctgggaagtcctggctgttgtggtccctgtgcccccctttacctgcctgctccgggacctggtgcctgccaccaactacagcctcagggtgcgctgtgccaatgccttggggccctctccctatgctgactgggtgccctttcagaccaagggtctagccccagccagcgctccccaaaacctccatgccatccgcacagattcaggcctcatcttggagtgggaagaagtgatccccgaggcccctttggaaggccccctgggaccctacaaactgtcctgggttcaagacaatggaacccaggatgagctgacagtggaggggaccagggccaatttgacaggctgggatccccaaaaggacctgatcgtacgtgtgtgcgtctccaatgcagttggctgtggaccctggagtcagccactggtggtctcttctcatgaccgtgcaggccagcagggccctcctcacagccgcacatcctgggtacctgtggtccttggtgtgctaacggccctggtgacggctgctgccctggccctcatcctgcttcgaaagagacggaaagagacgcggtttgggcaagcctttgacagtgtcatggcccggggagagccagccgttcacttccgggcagcccggtccttcaatcgagaaaggcccgagcgcatcgaggccacattggacagcttgggcatcagcgatgaactaaaggaaaaactggaggatgtgctcatcccagagcagcagttcaccctgggccggatgttgggcaaaggagagtttggttcagtgcgggaggcccagctgaagcaagaggatggctcctttgtgaaagtggctgtgaagatgctgaaagctgacatcattgcctcaagcgacattgaagagttcctcagggaagcagcttgcatgaaggagtttgaccatccacacgtggccaaacttgttggggtaagcctccggagcagggctaaaggccgtctccccatccccatggtcatcttgcccttcatgaagcatggggacctgcatgccttcctgctcgcctcccggattggggagaacccctttaacctacccctccagaccctgatccggttcatggtggacattgcctgcggcatggagtacctgagctctcggaacttcatccaccgagacctggctgctcggaattgcatgctggcagaggacatgacagtgtgtgtggctgacttcggactctcccggaagatctacagtggggactactatcgtcaaggctgtgcctccaaactgcctgtcaagtggctggccctggagagcctggccgacaacctgtatactgtgcagagtgacgtgtgggcgttcggggtgaccatgtgggagatcatgacacgtgggcagacgccatatgctggcatcgaaaacgctgagatttacaactacctcattggcgggaaccgcctgaaacagcctccggagtgtatggaggacgtgtatgatctcatgtaccagtgctggagtgctgaccccaagcagcgcccgagctttacttgtctgcgaatggaactggagaacatcttgggccagctgtctgtgctatctgccagccaggaccccttatacatcaacatcgagagagctgaggagcccactgcgggaggcagcctggagctacctggcagggatcagccctacagtggggctggggatggcagtggcatgggggcagtgggtggcactcccagtgactgtcggtacatactcacccccggagggctggctgagcagccagggcaggcagagcaccagccagagagtcccctcaatgagacacagaggcttttgctgctgcagcaagggctacacacagtagctgttagcccacaggcagagggcatcggggccatttggccggctctggtggccactgagctggctgactaagccccgtctgaccccagcccagacagcaaggtgtggaggctcctgtggtagtcctcccaagctgtgctgggaagcccggactgaccaaatcacccaatcccagttcttcctgcaaccactctgtggccagcctggcatcagtttaggccttggcttgatggaagtgggccagtcctggttgtctgaacccaggcagctggcaggagtggggtggttatgtttccatggttaccatgggtgtggatggcagtgtggggagggcaggtccagctctgtgggccctaccctcctgctgagctgcccctgctgcttaagtgcatgcattgagctgcctccagcctggtggcccagctattaccacacttggggtttaaatatccaggtgtgcccctccaagtcacaaagagatgtccttgtaatattcccttttaggtgagggttggtaaggggttggtatctcaggtctgaatcttcaccatctttctgattccgcaccctgcctacgccaggagaagttgaggggagcatgcttccctgcagctgaccgggtcacacaaaggcatgctggagtacccagcctatcaggtgcccctcttccaaaggcagcgtgccgagccagcaagaggaaggggtgctgtgaggcttgcccaggagcaagtgaggccggagaggagttcaggaacccttctccatacccacaatctgagcacgctaccaaatctcaaaatatcctaagactaacaaaggcagctgtgtctgagcccaacccttctaaacggtgacctttagtgccaacttcccctctaactggacagcctcttctgtcccaagtctccagagagaaatcaggcctgatgagggggaattcctggaacctggaccccagccttggtgggggagcctctggaatgcatggggcgggtcctagctgttagggacatttccaagctgttagttgctgtttaaaatagaaataaaattgaagactaaagacct

SEQ ID NO: 33319 - DNA, 3049 bp, Homo sapiens
  source 1..3049: mol_type = unassigned DNA
aggaccggagcggaagtggcgatcggagcggaagtggagctaccgccaccgccgccgccgattccggagccggggtagtcgccgccgccgccgccgctgcagccactgcaggcaccgctgccgccgcctgagtagtgggcttaggaaggaagaggtcatctcgctcggagcttcgctcggaagggtctttgttccctgcagccctcccacgggaatgacaatggataaaagtgagctggtacagaaagccaaactcgctgagcaggctgagcgatatgatgatatggctgcagccatgaaggcagtcacagaacaggggcatgaactctccaacgaagagagaaatctgctctctgttgcctacaagaatgtggtaggcgcccgccgctcttcctggcgtgtcatctccagcattgagcagaaaacagagaggaatgagaagaagcagcagatgggcaaagagtaccgtgagaagatagaggcagaactgcaggacatctgcaatgatgttctggagctgttggacaaatatcttattcccaatgctacacaaccagaaagtaaggtgttctacttgaaaatgaaaggagattattttaggtatctttctgaagtggcatctggagacaacaaacaaaccactgtgtcgaactcccagcaggcttaccaggaagcatttgaaattagtaagaaagaaatgcagcctacacacccaattcgtcttggtctggcactaaatttctcagtcttttactatgagattctaaactctcctgaaaaggcctgtagcctggcaaaaacggcatttgatgaagcaattgctgaattggatacgctgaatgaagagtcttataaagacagcactctgatcatgcagttacttagggacaatctcactctgtggacatcggaaaaccagggagacgaaggagacgctggggagggagagaactaatgtttctcgtgctttgtgatctgttcagtgtcactctgtaccctcaacatatatcccttgtgcgataaaaaaaaaaaaaaaaaaaaaaagagaatcgtacgtcgactttcgatttttcacagcctcagcctaggaaaaatggttcatgggataaacagctggtatttgtatctaaaactcagattggtcacataaatgccacggcattccgaagttttgattttgattaacattgacaggattactgtgtgtttaattttttaaaaactgaacactgtgattatggggttttgtaatttagcagaactcttactggtagaaaaaatagacctgaattatgtgtaactttttggaaggtttaatctgatatcaaaataatcattgaaatacaattccattgtaaagttgtacagaaagttatagagattatattgtgatgctggaacttggagtgagacacacatcatttggcatttgagttgaatggtaattcacagtaatgctgccgttgttcgggacttaaagacacttgacctgtttgggctgttgccacttaaaagttcatgaccacaaatgtccacagtgtcttcctctgaggaaactcgaatcctgaaatggaaattctttgtggcagataactggcttatgacaccttgaaaagttcaagtgctcatataacacaccacactgaaccccctttcctacagcaatatgttcactatgttaccaatttgcaacttgtgcttcaatagtggaatctactttcattgttaacactgagctaaagaaaaaaagccgtgtgttttatgaatgaccttatctgtttcctggataatacctttaagaataatgtcctgagtcaggcgtggtggtgcgtgcatctagtcccaactatttgggaggctgaggcaggaggatcgcttgagcccaggagtttaaagctgcagtgccctgtggttgcacctgtgaataactgcactccagcctgggcaacatagcgagacctcatctccaaaaaagaaaacaaaaaacaaaaaaaggaatgatgttctgtagagatggcctttcacttgaggagtactcagttttcaggttcttcctagctcggggcttttaaattttgaaatctaaacattctttcccaccatcctttttgactgttgaccttggttttctcttctaagtttctgtccctctgcttccttactttttttcctttttgaattctatctttatctgtcttttgttcactttttaatgctatatatgggcaggggtgagagacattactgagcaccttggtgagcaagcctggctttaaagattggagaagagcttctggcaccagaaccctgtcttcctccagttctcaacacggtgttgctcttcagtcataccggaatctgaatcaaaaaagtatttttaaatatccatgatttctccctgtattgaggctagccctgatcatgctttttgtgcctgtcaccaggtctcccaagtgcactcatccaggtcagtgctcagatgtgtttaaggagaccctatattcagggaagttgcgtgaacactgcagtggggagaattgagaatagtcaggcctatcagtctcacagaatcacccctctacctttgatattccacttagctgtagagtccatctgtttgtccatctgctgaaatgagaaaagaaaaatttatgcactgatttaaaacaaaccaaaaaaaaagaaaaaaacaaaaaaaaaaatccctcctttctagctgaacaaaaatgtgcagttaatacttggcgcttgaaaatgcagtagtgaatgtggaaccaagcctgtctgtatatctggtagctcttttcttgctttgttttttcttaccagtattctgcctaacgtttgcttctgtgatggttatattgcctagcaagcacacccgtggttgtgaaaatagtatagcaaaaaagaaaaatccccggttattgatgtactagatttgtgtatgtcttttaaacagttctagtttcaccttacacagaataatcaggaaaagtgtaaaaattcaaaagtgaaataaaaattttatcagttagttgcctgtgaa

SEQ ID NO: 33320 - DNA, 3109 bp, Homo sapiens
  source 1..3109: mol_type = unassigned DNA
ggagctaccgccaccgccgccgccgattccggagccggggtagtcgccgccgccgccgccgctgcagccactgcaggcaccgctgccgccgcctgagtagtgggcttaggaaggaagaggtcatctcgctcggagcttcgctcggaagggtctttgttccctgcagccctcccacggcagagtctccagagatttgggccgctacaaaaagtgcattttgcccattcggctgtggatagagaagcaggaagagcactggacttggagtcagggaatgacaatggataaaagtgagctggtacagaaagccaaactcgctgagcaggctgagcgatatgatgatatggctgcagccatgaaggcagtcacagaacaggggcatgaactctccaacgaagagagaaatctgctctctgttgcctacaagaatgtggtaggcgcccgccgctcttcctggcgtgtcatctccagcattgagcagaaaacagagaggaatgagaagaagcagcagatgggcaaagagtaccgtgagaagatagaggcagaactgcaggacatctgcaatgatgttctggagctgttggacaaatatcttattcccaatgctacacaaccagaaagtaaggtgttctacttgaaaatgaaaggagattattttaggtatctttctgaagtggcatctggagacaacaaacaaaccactgtgtcgaactcccagcaggcttaccaggaagcatttgaaattagtaagaaagaaatgcagcctacacacccaattcgtcttggtctggcactaaatttctcagtcttttactatgagattctaaactctcctgaaaaggcctgtagcctggcaaaaacggcatttgatgaagcaattgctgaattggatacgctgaatgaagagtcttataaagacagcactctgatcatgcagttacttagggacaatctcactctgtggacatcggaaaaccagggagacgaaggagacgctggggagggagagaactaatgtttctcgtgctttgtgatctgttcagtgtcactctgtaccctcaacatatatcccttgtgcgataaaaaaaaaaaaaaaaaaaaaaagagaatcgtacgtcgactttcgatttttcacagcctcagcctaggaaaaatggttcatgggataaacagctggtatttgtatctaaaactcagattggtcacataaatgccacggcattccgaagttttgattttgattaacattgacaggattactgtgtgtttaattttttaaaaactgaacactgtgattatggggttttgtaatttagcagaactcttactggtagaaaaaatagacctgaattatgtgtaactttttggaaggtttaatctgatatcaaaataatcattgaaatacaattccattgtaaagttgtacagaaagttatagagattatattgtgatgctggaacttggagtgagacacacatcatttggcatttgagttgaatggtaattcacagtaatgctgccgttgttcgggacttaaagacacttgacctgtttgggctgttgccacttaaaagttcatgaccacaaatgtccacagtgtcttcctctgaggaaactcgaatcctgaaatggaaattctttgtggcagataactggcttatgacaccttgaaaagttcaagtgctcatataacacaccacactgaaccccctttcctacagcaatatgttcactatgttaccaatttgcaacttgtgcttcaatagtggaatctactttcattgttaacactgagctaaagaaaaaaagccgtgtgttttatgaatgaccttatctgtttcctggataatacctttaagaataatgtcctgagtcaggcgtggtggtgcgtgcatctagtcccaactatttgggaggctgaggcaggaggatcgcttgagcccaggagtttaaagctgcagtgccctgtggttgcacctgtgaataactgcactccagcctgggcaacatagcgagacctcatctccaaaaaagaaaacaaaaaacaaaaaaaggaatgatgttctgtagagatggcctttcacttgaggagtactcagttttcaggttcttcctagctcggggcttttaaattttgaaatctaaacattctttcccaccatcctttttgactgttgaccttggttttctcttctaagtttctgtccctctgcttccttactttttttcctttttgaattctatctttatctgtcttttgttcactttttaatgctatatatgggcaggggtgagagacattactgagcaccttggtgagcaagcctggctttaaagattggagaagagcttctggcaccagaaccctgtcttcctccagttctcaacacggtgttgctcttcagtcataccggaatctgaatcaaaaaagtatttttaaatatccatgatttctccctgtattgaggctagccctgatcatgctttttgtgcctgtcaccaggtctcccaagtgcactcatccaggtcagtgctcagatgtgtttaaggagaccctatattcagggaagttgcgtgaacactgcagtggggagaattgagaatagtcaggcctatcagtctcacagaatcacccctctacctttgatattccacttagctgtagagtccatctgtttgtccatctgctgaaatgagaaaagaaaaatttatgcactgatttaaaacaaaccaaaaaaaaagaaaaaaacaaaaaaaaaaatccctcctttctagctgaacaaaaatgtgcagttaatacttggcgcttgaaaatgcagtagtgaatgtggaaccaagcctgtctgtatatctggtagctcttttcttgctttgttttttcttaccagtattctgcctaacgtttgcttctgtgatggttatattgcctagcaagcacacccgtggttgtgaaaatagtatagcaaaaaagaaaaatccccggttattgatgtactagatttgtgtatgtcttttaaacagttctagtttcaccttacacagaataatcaggaaaagtgtaaaaattcaaaagtgaaataaaaattttatcagttagttgcctgtgaa

SEQ ID NO: 33321 - DNA, 648 bp, Homo sapiens
  source 1..648: mol_type = unassigned DNA
cggagccggggtagtcgccgccgccgccgccgctgcagccactgcaggcaccgctgccgccgcctgagtagtgggcttaggaaggaagaggtcatctcgctcggagcttcgctcggaagggtctttgttccctgcagccctcccacgtgcttgttatattgaagccattttagaattggagcgctatagatcagggaggcagcctctataaaaccaggctgagcaaattcccatgatgctggttctctaggcagagtctccagagatttgggccgctacaaaaagtgcattttgcccattcggctgtggatagagaagcaggaagagcactggacttggagtcagggaatgacaatggataaaagtgagctggtacagaaagccaaactcgctgagcaggctgagcgatatgatgatatggctgcagccatgaaggcagtcacagaacaggggcatgaactctccaacgaagagagaaatctgctctctgttgcctacaagaatgtggtaggcgcccgccgctcttcctggcgtgtcatctccagcattgagcagaaaacagagaggaatgagaagaagcagcagatgggcaaagagtaccgtgagaagatagaggcagaactgcaggacatctgcaatgatgttctg

SEQ ID NO: 33322 - DNA, 556 bp, Homo sapiens
  source 1..556: mol_type = unassigned DNA
agtcgccgccgccgccgccgctgcagccactgcaggcaccgctgccgccgcctgagtagtgggcttaggaaggaagaggtcatctcgctcggagcttcgctcggaagggtctttgttccctgcagccctcccacgatagcatcaggtcctgattttgcttgccctgtgtgggagatggaatttggcaagatgatgctatgaacataaaatcagcctcgggaaccaaaagagaaaggcagagtctccagagatttgggccgctacaaaaagtgcattttgcccattcggctgtggatagagaagcaggaagagcactggacttggagtcagggaatgacaatggataaaagtgagctggtacagaaagccaaactcgctgagcaggctgagcgatatgatgatatggctgcagccatgaaggcagtcacagaacaggggcatgaactctccaacgaagagagaaatctgctctctgttgcctacaagaatgtggtaggcgcccgccgctcttcctggcgtgtcatctccagcattgagcagaaaacagagaggaatg

SEQ ID NO: 33323 - DNA, 2044 bp, Homo sapiens
  source 1..2044: mol_type = unassigned DNA
ccgccatttttgctgcccggacgcggagcgagaggctgagagagtcggagacactatccgcttccatccgtcgcgcagaccctgccggagccgctgccgctatggatgatcgagaggatctggtgtaccaggcgaagctggccgagcaggctgagcgatacgacgaaatggtggagtcaatgaagaaagtagcagggatggatgtggagctgacagttgaagaaagaaacctcctatctgttgcatataagaatgtgattggagctagaagagcctcctggagaataatcagcagcattgaacagaaagaagaaaacaagggaggagaagacaagctaaaaatgattcgggaatatcggcaaatggttgagactgagctaaagttaatctgttgtgacattctggatgtactggacaaacacctcattccagcagctaacactggcgagtccaaggttttctattataaaatgaaaggggactaccacaggtatctggcagaatttgccacaggaaacgacaggaaggaggctgcggagaacagcctagtggcttataaagctgctagtgatattgcaatgacagaacttccaccaacgcatcctattcgcttaggtcttgctctcaatttttccgtattctactacgaaattcttaattcccctgaccgtgcctgcaggttggcaaaagcagcttttgatgatgcaattgcagaactggatacgctgagtgaagaaagctataaggactctacacttatcatgcagttgttacgtgataatctgacactatggacttcagacatgcagggtgacggtgaagagcagaataaagaagcgctgcaggacgtggaagacgaaaatcagtgagacataagccaacaagagaaaccatctctgaccaccccctcctccccatcccaccctttggaaactccccattgtcactgagaaccaccaaatctgacttttacatttggtctcagaatttaggttcctgccctgttggttttttttttttttttttaaacagttttcaaaagttcttaaaggcaagagtgaatttctgtggattttactggtcccagcttttaggttctttaagacactaacaggactacatagaggctttttcagcattactgtgtcgtctccgtgccagatgtggcaagatcaccattagcaaatggaaattacatttgaaagccattagacttataggtgatgcaagcatctaagagagaggttaatcacactatagaggcataagtggtatcagttttcatttttctaattgtttaaactgtgttttataccagtgtttgcaagtaattgggtgttagcttgagatggttaaaggtggtttggggagggacttcgttgtaatggttttgctgtaaaaaatgtttccaactccgctgaaatgttgctgaaaagcatggtgctggtaacagttcaacaatccgtggctgctcattcttgcctactttactctcccactgaagcaggttagcgttgaaggtggtatggaaaagcctgcatgcctgttcaattcttttgtttcttctccttccccctccccctacctccttcccctcactcctcccctccttcgctcgctcaacctcttttgttcagtatgtgtaacttgaagctaatttgtactactggatatctgactggagccacagatacagaatctgtattgttcttactgaaacacagcatggaattaacattaaacttaaataaaacaaacctaaattaaaaatgccaaatatcgcgcctccatcctttatacttctaaaataaaatctctagtccaaacacactgacagtattatgtttgcctgaatgtgaaacattcctccttttttcttccataaataatttgtttgcttcccaaagatgtatgttttggaaaaaaattgcctgtagtctggttgtgaagaacactgagtcagttgatggtgtgtcttgtcctccagaccaggcagcaacatggtatttattttaatcattaaagtacaacatgagtagtacaa

SEQ ID NO: 33324 - DNA, 1295 bp, Homo sapiens
  source 1..1295: mol_type = unassigned DNA
gctgcccggacgcggagcgagaggctgagagagtcggagacactatccgcttccatccgtcgcgcaggctgagcgatacgacgaaatggtggagtcaatgaagaaagtagcagggatggatgtggagctgacagttgaagaaagaaacctcctatctgttgcatataagaatgtgattggagctagaagagcctcctggagaataatcagcagcattgaacagaaagaagaaaacaagggaggagaagacaagctaaaaatgattcgggaatatcggcaaatggttgagactgagctaaagttaatctgttgtgacattctggatgtactggacaaacacctcattccagcagctaacactggcgagtccaaggttttctattataaaatgaaaggggactaccacaggtatctggcagaatttgccacaggaaacgacaggaaggaggctgcggagaacagcctagtggcttataaagctgctagtgatattgcaatgacagaacttccaccaacgcatcctattcgcttaggtcttgctctcaatttttccgtattctactacgaaattcttaattcccctgaccgtgcctgcaggttggcaaaagcagcttttgatgatgcaattgcagaactggatacgctgagtgaagaaagctataaggactctacacttatcatgcagttgttacgtgataatctgacactatggacttcagacatgcagggtgacggtgaagagcagaataaagaagcgctgcaggacgtggaagacgaaaatcagtgagacataagccaacaagagaaaccatctctgaccaccccctcctccccatcccaccctttggaaactccccattgtcactgagaaccaccaaatctgacttttacatttggtctcagaatttaggttcctgccctgttggttttttttttttttttttaaacagttttcaaaagttcttaaaggcaagagtgaatttctgtggattttactggtcccagcttttaggttctttaagacactaacaggactacatagaggctttttcagcattactgtgtcgtctccgtgccagatgtggcaagatcaccattagcaaatggaaattacatttgaaagccattagacttataggtgatgcaagcatctaagagagaggttaatcacactatagaggcataagtggtatcagttttcatttttctaattgtttaaactgtgttttataccagtgtttgcaagtaattgggtgttagcttgagatggttaaaggtggtttggggagggactt

SEQ ID NO: 33325 - DNA, 3745 bp, Homo sapiens
  source 1..3745: mol_type = unassigned DNA
ggccgcagggggttgtccgtcagtggcacgcacagcagccgcagccgcctcgcgcccggtcccgcggtcgcagctccagccgcctcctccgcgcagccgccgcctcagctgctcgctctgtgggtcggtcctctccggcacttgggctccagtcgcgccctccaagcccttcaggccgccccagtgtcctcctccttctccggccagacccagccccgcgaagatggtggaccgcgagcaactggtgcagaaagcccggctggccgagcaggcggagcgctacgacgacatggccgcggccatgaagaacgtgacagagctgaatgagccactgtcgaatgaggaacgaaaccttctgtctgtggcctacaagaacgttgtgggggcacgccgctcttcctggagggtcatcagtagcattgagcagaagacatctgcagacggcaatgagaagaagattgagatggtccgtgcgtaccgggagaagatagagaaggagttggaggctgtgtgccaggatgtgctgagcctgctggataactacctgatcaagaattgcagcgagacccagtacgagagcaaagtgttctacctgaagatgaaaggggactactaccgctacctggctgaagtggccaccggagagaaaagggcgacggtggtggagtcctccgagaaggcctacagcgaagcccacgagatcagcaaagagcacatgcagcccacccaccccatccgattaggcctggctcttaactactccgtcttctactatgagatccagaacgccccagagcaagcgtgccacttggccaagaccgcgttcgacgacgccatcgccgagcttgacaccctcaacgaggactcctacaaggactccacgctcatcatgcagctcctccgcgacaacctcacgctctggacgagcgaccagcaggacgacgatggcggcgaaggcaacaattaaggccccaggggaactggcagcgcacgcggatgctactactgcagtctttatttttttcccatgagttgggggtcgggtgggggagggaaagggagggatgaccttcccagggagaaacccacgacctgtcctgtctttgatcgcctctttgacatttttgccaaaataccactagtggaaagtcaggctagctgtgctggtattggaatagcagcctcacactggcgtctggactgttctgtagattcatgcaagtggagctgtctgtctctaatttaacttattgctagataatagggttttcagatgaaaagaaaacttaaagaggaatggccctcattcagtaagttctgtggttccagtaaggatttttatgtacatacgctctcgtctctcgttttgggtactttctatctcatctgtctcggctctgcatgttttccagggtgtagcctacagacatggaacagtgtaaatcccagactgacagacttagaacctgaggtctcattcatccttatggtttaggccttgccagttttccgaagtctctgattagttgacagtattaacactaaattgcagtttacagtatttctacattacagccatatgtaacatcaagccatcgattgtgtacttttcctttgctagttgtttgggctttaacatccttattcagccttatccaggttggttttgctgttgatcggtctcctaggctaaatgagaatgaaagcgacttcaggtcaggtggctgtgggattttttttttttggtccttctttcctcttaacgtaaatccaccaccaaaattattaatcctcttgagagaaacgtgaaacgccacaaaaatagagaaaattcaggtctgtatgtcatggatcgtgttggtattttcagagaacatcccgcttctgaagctgctgcagctccctcctcagggatcacactgccgtcacccactctgcactggggcgtttcctactgcgcctcgtgctggcggacgcagctgggtgcagaagctgtggggtcggagaggcgtttggagaaggtctgtggtgcagtgtgtgaaaattcaggtgctagaagcctactggtagaaaaacccaaaaggaagagctatatccttaaccattctgtccaatttcgggagccttgtcagtgtgtcagtttttcctccccgaagacactccttccccaagtaattgtaggaagataaaaaaactgttaccagataacaaacactgaactcctatttgaccagaactttttcctctcgagatagttttttctttttaatgaaaaaagcataggaattggagattggcttgtctcacgcagccagtgcacatttggaattgacggaaacaacgttgctatttccacccatttgttttcggcagccttaaggccctcattctcatttcgggtgaatctgtctatctgtgaacgtggcccgcatgtgcattcttttttttatatatataaagtcagtgacgaggaactcccgagacgtgtaatgacaccacacttgttttctttgtttctttgttttatttaggcaagaagaggtgtgagtaattgaggaaaaactgacagatgcttttgctaataccaaaattgagcttacaattaggaactgagtatgtgtaacaggatacaggtgacagtgaagatagaagaaccacgatgaccacagactcaatgtgctctgtaacatcgcacagtttacccagcatgactttccttaggaggccccctcctcacgctagagtaaaagtcccagttaagtgaagcctaccagaagaactagtagaagaagctttgccgcttttgtgcctctcacaggcgcctaaagtcattgccatgggaggaagacgatttggggggggaggggggggggggcagggtaggtggggctttccctaatttatcttcatgtccagtgagcagtgttgcgtttttccttgtagcatttggaaatgatttactggaattacaaaacctatttttcctttaaatttcagctttggctctggctgctttttagaataatgcaagataaaaatcacacctgagggctgaaaacggagagggaatgggagacttgatatttaagcagcttgaatggtttttcttttctttatttttaaagaaatgcacttgcctatgatactgtctctccagtgaaatgattactcctccattactctattgatacaatattgtgcatgctagtgttgtatttctatacagtagcttgaaattgattaacttatactgtaggtgttatgtattcctatgacaaaaaaaattaagtcttcaaattttttaaaggttttttttttttaatttaatttttccttttgggggtaaagtttgctctaccaaatagtgattgtaacaaattgatctgttttggatgttgctatagtgacatgcagttatatattttgtttttaaaagggggggagcaaaagaaacaccagtgttagcttaatcttaatgtctggtgtttgtcatggtgaaattataactattacagtgttggagaacaacaaatatgttctctgaatgagcctttgtgctttttgtcatgttatgcagtgaactatttttaaggtctaatcagtgattatttttccagctccgtgtttctctaaggaattatttcacacacggaccatctttagcagtttcctcagtgatggaatatcatgaatgtgagtcattatgtagctgtcgtacattgagcaaataaacttacagatctga

SEQ ID NO: 33326 - DNA, 884 bp, Homo sapiens
  source 1..884: mol_type = unassigned DNA
agccgcctcgcgcccggtcccgcggtcgcagctccagccgcctcctccgcgcagccgccgcctcagctgctcgctctgtgggtcggtcctctccggcacttgggctccagtcgcgccctccaagcccttcaggccgccccagtgtcctcctccttctccggccagacccagccccgcgaagatggtggaccgcgagcaactggtgcagaaagcccggctggccgagcaggcggagcgctacgacgacatggccgcggccatgaagaacgtgacagagctgaatgagccactgtcgaatgaggaacgaaaccttctgtctgtggcctacaagaacgttgtgggggcacgccgctcttcctggagggtcatcagtagcattgagcagaagacatctgcagacggcaatgagaagaagattgagatggtccgtgcgtaccgggagaagatagagaaggagttggaggctgaagtggccaccggagagaaaagggcgacggtggtggagtcctccgagaaggcctacagcgaagcccacgagatcagcaaagagcacatgcagcccacccaccccatccgattaggcctggctcttaactactccgtcttctactatgagatccagaacgccccagagcaagcgtgccacttggccaagaccgcgttcgacgacgccatcgccgagcttgacaccctcaacgaggactcctacaaggactccacgctcatcatgcagctcctccgcgacaacctcacgctctggacgagcgaccagcaggacgacgatggcggcgaaggcaacaattaaggccccaggggaactggcagcgcacgcggatgctactactgcagtctttatttttttcccatgagttgggggtcgggtg

SEQ ID NO: 33327 - DNA, 1362 bp, Homo sapiens
  source 1..1362: mol_type = unassigned DNA
agctccagccgcctcctccgcgcagccgccgcctcagctgctcgctctgtgggtcggtcctctccggcacttgggctccagtcgcgccctccaagcccttcaggccgccccagtgtcctcctccttctccggctggccgagcaggcggagcgctacgacgacatggccgcggccatgaagaacgtgacagagctgaatgagccactgtcgaatgaggaacgaaaccttctgtctgtggcctacaagaacgttgtgggggcacgccgctcttcctggagggtcatcagtagcattgagcagaagacatctgcagacggcaatgagaagaagattgagatggtccgtgcgtaccgggagaagatagagaaggagttggaggctgtgtgccaggatgtgctgagcctgctggataactacctgatcaagaattgcagcgagacccagtacgagagcaaagtgttctacctgaagatgaaaggggactactaccgctacctggctgaagtggccaccggagagaaaagggcgacggtggtggagtcctccgagaaggcctacagcgaagcccacgagatcagcaaagagcacatgcagcccacccaccccatccgattaggcctggctcttaactactccgtcttctactatgagatccagaacgccccagagcaagcgtgccacttggccaagaccgcgttcgacgacgccatcgccgagcttgacaccctcaacgaggactcctacaaggactccacgctcatcatgcagctcctccgcgacaacctcacgctctggacgagcgaccagcaggacgacgatggcggcgaaggcaacaattaaggccccaggggaactggcagcgcacgcggatgctactactgcagtctttatttttttcccatgagttgggggtcgggtgggggagggaaagggagggatgaccttcccagggagaaacccacgacctgtcctgtctttgatcgcctctttgacatttttgccaaaataccactagtggaaagtcaggctagctgtgctggtattggaatagcagcctcacactggcgtctggactgttctgtagattcatgcaagtggagctgtctgtctctaatttaacttattgctagataatagggttttcagatgaaaagaaaacttaaagaggaatggccctcattcagtaagttctgtggttccagtaaggatttttatgtacatacgctctcgtctctcgttttgggtactttctatctcatctgtctcggctctgcatgttttccagggtgtagcctacagacatggaacagtgtaaatcccagactgacagacttagaacctgaggtctcattcatccttatg

SEQ ID NO: 33328 - DNA, 2829 bp, Homo sapiens
  source 1..2829: mol_type = unassigned DNA
gcccactcccaccgccagctggaaccctggggactacgacgtccctcaaaccttgcttctaggagataaaaagaacatccagtcatggataaaaatgagctggttcagaaggccaaactggccgagcaggctgagcgatatgatgacatggcagcctgcatgaagtctgtaactgagcaaggagctgaattatccaatgaggagaggaatcttctctcagttgcttataaaaatgttgtaggagcccgtaggtcatcttggagggtcgtctcaagtattgaacaaaagacggaaggtgctgagaaaaaacagcagatggctcgagaatacagagagaaaattgagacggagctaagagatatctgcaatgatgtactgtctcttttggaaaagttcttgatccccaatgcttcacaagcagagagcaaagtcttctatttgaaaatgaaaggagattactaccgttacttggctgaggttgccgctggtgatgacaagaaagggattgtcgatcagtcacaacaagcataccaagaagcttttgaaatcagcaaaaaggaaatgcaaccaacacatcctatcagactgggtctggcccttaacttctctgtgttctattatgagattctgaactccccagagaaagcctgctctcttgcaaagacagcttttgatgaagccattgctgaacttgatacattaagtgaagagtcatacaaagacagcacgctaataatgcaattactgagagacaacttgacattgtggacatcggatacccaaggagacgaagctgaagcaggagaaggaggggaaaattaaccggccttccaacttttgtctgcctcattctaaaatttacacagtagaccatttgtcatccatgctgtcccacaaatagttttttgtttacgatttatgacaggtttatgttacttctatttgaatttctatatttcccatgtggtttttatgtttaatattaggggagtagagccagttaacatttagggagttatctgttttcatcttgaggtggccaatatggggatgtggaatttttatacaagttataagtgtttggcatagtacttttggtacattgtggcttcaaaagggccagtgtaaaactgcttccatgtctaagcaaagaaaactgcctacatactggtttgtcctggcggggaataaaagggatcattggttccagtcacaggtgtagtaattgtgggtactttaaggtttggagcacttacaaggctgtggtagaatcataccccatggataccacatattaaaccatgtatatctgtggaatactcaatgtgtacacctttgactacagctgcagaagtgttcctttagacaaagttgtgacccattttactctggataagggcagaaacggttcacattccattatttgtaaagttacctgctgttagctttcattatttttgctacactcattttatttgtatttaaatgttttaggcaacctaagaacaaatgtaaaagtaaagatgcaggaaaaatgaattgcttggtattcattacttcatgtatatcaagcacagcagtaaaacaaaaacccatgtatttaacttttttttaggatttttgcttttgtgatttttttttttttgatacttgcctaacatgcatgtgctgtaaaaatagttaacagggaaataacttgagatgatggctagctttgtttaatgtcttatgaaattttcatgaacaatccaagcataattgttaagaacacgtgtattaaattcatgtaagtggaataaaagttttatgaatggacttttcaactactttctctacagcttttcatgtaaattagtcttggttctgaaacttctctaaaggaaattgtacattttttgaaatttattccttattccctcttggcagctaatgggctcttaccaagtttaaacacaaaatttatcataacaaaaatactactaatataactactgtttccatgtcccatgatcccctctcttcctccccaccctgaaaaaaatgagttcctattttttctgggagagggggggattgattagaaaaaaatgtagtgtgttccatttaaaattttggcatatggcattttctaacttaggaagccacaatgttcttggcccatcatgacattgggtagcattaactgtaagttttgtgcttccaaatcactttttggtttttaagaatttcttgatactcttatagcctgccttcaattttgatcctttattctttctatttgtcaggtgcacaagattaccttcctgttttagccttctgtcttgtcaccaaccattcttacttggtggccatgtacttggaaaaaggccgcatgatctttctggctccactcagtgtctaaggcaccctgcttcctttgcttgcatcccacagactatttccctcatcctatttactgcagcaaatctctccttagttgatgagactgtgtttatctccctttaaaaccctacctatcctgaatggtctgtcattgtctgcctttaaaatccttcctctttcttcctcctctattctctaaataatgatggggctaagttatacccaaagctcactttacaaaatatttcctcagtactttgcagaaaacaccaaacaaaaatgccattttaaaaaaggtgtattttttcttttagaatgtaagctcctcaagagcagggacaatgttttctgtatgttctattgtgcctagtacactgtaaatgctcaataaatattgatgatgggaggcagtgagtcttgatgataagggtgagaaactgaaatccc

SEQ ID NO: 33329 - DNA, 812 bp, Homo sapiens
  source 1..812: mol_type = unassigned DNA
cccctcgcgcagtcaccgagcgcagatcccgcgctctcgattggaacgcctccccatcactcagccacactcaggggctggacgcctcactcccgtttccgagccataaaaggtctaggaccgcttcccccgagccagcaggagcccgtaggtcatcttggagggtcgtctcaagtattgaacaaaagacggaaggtgctgagaaaaaacagcagatggctcgagaatacagagagaaaattgagacggagctaagagatatctgcaatgatgtactgtctcttttggaaaagttcttgatccccaatgcttcacaagcagagagcaaagtcttctatttgaaaatgaaaggagattactaccgttacttggctgaggttgccgctggtgatgacaagaaagggattgtcgatcagtcacaacaagcataccaagaagcttttgaaatcagcaaaaaggaaatgcaaccaacacatcctatcagactgggtctggcccttaacttctctgtgttctattatgagattctgaactccccagagaaagcctgctctcttgcaaagacagcttttgatgaagccattgctgaacttgatacattaagtgaagagtcatacaaagacagcacgctaataatgcaattactgagagacaacttgacattgtggacatcggatacccaaggagacgaagctgaagcaggagaaggaggggaaaattaaccggccttccaacttttgtctgcctcattctaaaatttacacagtagaccatttgtcatccatgctgtcccacaaatagttttttgttta

SEQ ID NO: 33330 - DNA, 964 bp, Homo sapiens
  source 1..964: mol_type = unassigned DNA
atgacaaaggaggagagtcggggacttgagccgtggctccgacttgggcggagcctggaggggggtggttgcgatacgcggaccggagaatttgcactttaaagtccgggtctgcccgttttcgtttcacagtaaccgacgtctcaagtcagaacatccagtcatggataaaaatgagctggttcagaaggccaaactggccgagcaggctgagcgatatgatgacatggcagcctgcatgaagtctgtaactgagcaaggagctgaattatccaatgaggagaggaatcttctctcagttgcttataaaaatgttgtaggagcccgtaggtcatcttggagggtcgtctcaagtattgaacaaaagacggaaggtgctgagaaaaaacagcagatggctcgagaatacagagagaaaattgagacggagctaagagatatctgcaatgatgtactgtctcttttggaaaagttcttgatccccaatgcttcacaagcagagagcaaagtcttctatttgaaaatgaaaggagattactaccgttacttggctgaggttgccgctggtgatgacaagaaagggattgtcgatcagtcacaacaagcataccaagaagcttttgaaatcagcaaaaaggaaatgcaaccaacacatcctatcagactgggtctggcccttaacttctctgtgttctattatgagattctgaactccccagagaaagcctgctctcttgcaaagacagcttttgatgaagccattgctgaacttgatacattaagtgaagagtcatacaaagacagcacgctaataatgcaattactgagagacaacttgacattgtggacatcggatacccaaggagacgaagctgaagcaggagaaggaggggaaaattaaccggccttccaacttttgtctgcctcattctaaaatttacacagtagaccatttgtcatccat

SEQ ID NO: 33331 - DNA, 994 bp, Homo sapiens
  source 1..994: mol_type = unassigned DNA
gcatggccggggcgccgccggccgcgatccatccccacccttgtctctgcgggcttccaccccctccctcgccgcccttctcgcttccgcccgagataatgactcggcggcggcggcggcgggcatcgcagtggcgcagaacatccagtcatggataaaaatgagctggttcagaaggccaaactggccgagcaggctgagcgatatgatgacatggcagcctgcatgaagtctgtaactgagcaaggagctgaattatccaatgaggagaggaatcttctctcagttgcttataaaaatgttgtaggagcccgtaggtcatcttggagggtcgtctcaagtattgaacaaaagacggaaggtgctgagaaaaaacagcagatggctcgagaatacagagagaaaattgagacggagctaagagatatctgcaatgatgtactgtctcttttggaaaagttcttgatccccaatgcttcacaagcagagagcaaagtcttctatttgaaaatgaaaggagattactaccgttacttggctgaggttgccgctggtgatgacaagaaagggattgtcgatcagtcacaacaagcataccaagaagcttttgaaatcagcaaaaaggaaatgcaaccaacacatcctatcagactgggtctggcccttaacttctctgtgttctattatgagattctgaactccccagagaaagcctgctctcttgcaaagacagcttttgatgaagccattgctgaacttgatacattaagtgaagagtcatacaaagacagcacgctaataatgcaattactgagagacaacttgacattgtggacatcggatacccaaggagacgaagctgaagcaggagaaggaggggaaaattaaccggccttccaacttttgtctgcctcattctaaaatttacacagtagaccatttgtcatccatgctgtcccacaaatagttttttgtttacgatttatgacaggtt

SEQ ID NO: 33332 - DNA, 2974 bp, Homo sapiens
  source 1..2974: mol_type = unassigned DNA
ccgccccctcccctctccctcggccgccccctcctttccctccccctcgcgcagcctccgcgctgggcgctgcggcggcgggacccggccctcccccaccccgggaggcggtggcgcggcggggaggggccgggggcctcggggacccaagcgcgagggaaaggcctggccgagagcgggccggagcccaggcctggcgcggcggcgcccgccagaacatccagtcatggataaaaatgagctggttcagaaggccaaactggccgagcaggctgagcgatatgatgacatggcagcctgcatgaagtctgtaactgagcaaggagctgaattatccaatgaggagaggaatcttctctcagttgcttataaaaatgttgtaggagcccgtaggtcatcttggagggtcgtctcaagtattgaacaaaagacggaaggtgctgagaaaaaacagcagatggctcgagaatacagagagaaaattgagacggagctaagagatatctgcaatgatgtactgtctcttttggaaaagttcttgatccccaatgcttcacaagcagagagcaaagtcttctatttgaaaatgaaaggagattactaccgttacttggctgaggttgccgctggtgatgacaagaaagggattgtcgatcagtcacaacaagcataccaagaagcttttgaaatcagcaaaaaggaaatgcaaccaacacatcctatcagactgggtctggcccttaacttctctgtgttctattatgagattctgaactccccagagaaagcctgctctcttgcaaagacagcttttgatgaagccattgctgaacttgatacattaagtgaagagtcatacaaagacagcacgctaataatgcaattactgagagacaacttgacattgtggacatcggatacccaaggagacgaagctgaagcaggagaaggaggggaaaattaaccggccttccaacttttgtctgcctcattctaaaatttacacagtagaccatttgtcatccatgctgtcccacaaatagttttttgtttacgatttatgacaggtttatgttacttctatttgaatttctatatttcccatgtggtttttatgtttaatattaggggagtagagccagttaacatttagggagttatctgttttcatcttgaggtggccaatatggggatgtggaatttttatacaagttataagtgtttggcatagtacttttggtacattgtggcttcaaaagggccagtgtaaaactgcttccatgtctaagcaaagaaaactgcctacatactggtttgtcctggcggggaataaaagggatcattggttccagtcacaggtgtagtaattgtgggtactttaaggtttggagcacttacaaggctgtggtagaatcataccccatggataccacatattaaaccatgtatatctgtggaatactcaatgtgtacacctttgactacagctgcagaagtgttcctttagacaaagttgtgacccattttactctggataagggcagaaacggttcacattccattatttgtaaagttacctgctgttagctttcattatttttgctacactcattttatttgtatttaaatgttttaggcaacctaagaacaaatgtaaaagtaaagatgcaggaaaaatgaattgcttggtattcattacttcatgtatatcaagcacagcagtaaaacaaaaacccatgtatttaacttttttttaggatttttgcttttgtgatttttttttttttgatacttgcctaacatgcatgtgctgtaaaaatagttaacagggaaataacttgagatgatggctagctttgtttaatgtcttatgaaattttcatgaacaatccaagcataattgttaagaacacgtgtattaaattcatgtaagtggaataaaagttttatgaatggacttttcaactactttctctacagcttttcatgtaaattagtcttggttctgaaacttctctaaaggaaattgtacattttttgaaatttattccttattccctcttggcagctaatgggctcttaccaagtttaaacacaaaatttatcataacaaaaatactactaatataactactgtttccatgtcccatgatcccctctcttcctccccaccctgaaaaaaatgagttcctattttttctgggagagggggggattgattagaaaaaaatgtagtgtgttccatttaaaattttggcatatggcattttctaacttaggaagccacaatgttcttggcccatcatgacattgggtagcattaactgtaagttttgtgcttccaaatcactttttggtttttaagaatttcttgatactcttatagcctgccttcaattttgatcctttattctttctatttgtcaggtgcacaagattaccttcctgttttagccttctgtcttgtcaccaaccattcttacttggtggccatgtacttggaaaaaggccgcatgatctttctggctccactcagtgtctaaggcaccctgcttcctttgcttgcatcccacagactatttccctcatcctatttactgcagcaaatctctccttagttgatgagactgtgtttatctccctttaaaaccctacctatcctgaatggtctgtcattgtctgcctttaaaatccttcctctttcttcctcctctattctctaaataatgatggggctaagttatacccaaagctcactttacaaaatatttcctcagtactttgcagaaaacaccaaacaaaaatgccattttaaaaaaggtgtattttttcttttagaatgtaagctcctcaagagcagggacaatgttttctgtatgttctattgtgcctagtacactgtaaatgctcaataaatattgatgatgggaggcagtgagtcttgatgataagggtgagaaactgaaatcccaaa

SEQ ID NO: 33333 - DNA, 3197 bp, Homo sapiens
  source 1..3197: mol_type = unassigned DNA
cgcagtcaccgagcgcagatcccgcgctctcgattggaacgcctccccatcactcagccacactcaggggctggacgcctcactcccgtttccgagccataaaaggtctaggaccgcttcccccgagccagcagcgtttgacgtcatcgtgcgtgtggtgcccctgctgccggggctggtgattggaggaaaccccgtgtctgcggagcggctgtagcctgtgagcagcgagatccagggacagagtctcagcctcgccgctgctgccgccgccgccgcccagagactgctgagcccgtccgtccgccgccaccacccactccggacacagaacatccagtcatggataaaaatgagctggttcagaaggccaaactggccgagcaggctgagcgatatgatgacatggcagcctgcatgaagtctgtaactgagcaaggagctgaattatccaatgaggagaggaatcttctctcagttgcttataaaaatgttgtaggagcccgtaggtcatcttggagggtcgtctcaagtattgaacaaaagacggaaggtgctgagaaaaaacagcagatggctcgagaatacagagagaaaattgagacggagctaagagatatctgcaatgatgtactgtctcttttggaaaagttcttgatccccaatgcttcacaagcagagagcaaagtcttctatttgaaaatgaaaggagattactaccgttacttggctgaggttgccgctggtgatgacaagaaagggattgtcgatcagtcacaacaagcataccaagaagcttttgaaatcagcaaaaaggaaatgcaaccaacacatcctatcagactgggtctggcccttaacttctctgtgttctattatgagattctgaactccccagagaaagcctgctctcttgcaaagacagcttttgatgaagccattgctgaacttgatacattaagtgaagagtcatacaaagacagcacgctaataatgcaattactgagagacaacttgacattgtggacatcggatacccaaggagacgaagctgaagcaggagaaggaggggaaaattaaccggccttccaacttttgtctgcctcattctaaaatttacacagtagaccatttgtcatccatgctgtcccacaaatagttttttgtttacgatttatgacaggtttatgttacttctatttgaatttctatatttcccatgtggtttttatgtttaatattaggggagtagagccagttaacatttagggagttatctgttttcatcttgaggtggccaatatggggatgtggaatttttatacaagttataagtgtttggcatagtacttttggtacattgtggcttcaaaagggccagtgtaaaactgcttccatgtctaagcaaagaaaactgcctacatactggtttgtcctggcggggaataaaagggatcattggttccagtcacaggtgtagtaattgtgggtactttaaggtttggagcacttacaaggctgtggtagaatcataccccatggataccacatattaaaccatgtatatctgtggaatactcaatgtgtacacctttgactacagctgcagaagtgttcctttagacaaagttgtgacccattttactctggataagggcagaaacggttcacattccattatttgtaaagttacctgctgttagctttcattatttttgctacactcattttatttgtatttaaatgttttaggcaacctaagaacaaatgtaaaagtaaagatgcaggaaaaatgaattgcttggtattcattacttcatgtatatcaagcacagcagtaaaacaaaaacccatgtatttaacttttttttaggatttttgcttttgtgatttttttttttttgatacttgcctaacatgcatgtgctgtaaaaatagttaacagggaaataacttgagatgatggctagctttgtttaatgtcttatgaaattttcatgaacaatccaagcataattgttaagaacacgtgtattaaattcatgtaagtggaataaaagttttatgaatggacttttcaactactttctctacagcttttcatgtaaattagtcttggttctgaaacttctctaaaggaaattgtacattttttgaaatttattccttattccctcttggcagctaatgggctcttaccaagtttaaacacaaaatttatcataacaaaaatactactaatataactactgtttccatgtcccatgatcccctctcttcctccccaccctgaaaaaaatgagttcctattttttctgggagagggggggattgattagaaaaaaatgtagtgtgttccatttaaaattttggcatatggcattttctaacttaggaagccacaatgttcttggcccatcatgacattgggtagcattaactgtaagttttgtgcttccaaatcactttttggtttttaagaatttcttgatactcttatagcctgccttcaattttgatcctttattctttctatttgtcaggtgcacaagattaccttcctgttttagccttctgtcttgtcaccaaccattcttacttggtggccatgtacttggaaaaaggccgcatgatctttctggctccactcagtgtctaaggcaccctgcttcctttgcttgcatcccacagactatttccctcatcctatttactgcagcaaatctctccttagttgatgagactgtgtttatctccctttaaaaccctacctatcctgaatggtctgtcattgtctgcctttaaaatccttcctctttcttcctcctctattctctaaataatgatggggctaagttatacccaaagctcactttacaaaatatttcctcagtactttgcagaaaacaccaaacaaaaatgccattttaaaaaaggtgtattttttcttttagaatgtaagctcctcaagagcagggacaatgttttctgtatgttctattgtgcctagtacactgtaaatgctcaataaatattgatgatgggaggcagtgagtcttgatgataagggtgagaaactgaaatcccaaacactgttttgttgcttgttttattatgacctcagattaaattgggaaatattggcccttttgaataattgtcccaaatattacattcaaataaaagtgcaatggaga

SEQ ID NO: 33334 - DNA, 3064 bp, Homo sapiens
  source 1..3064: mol_type = unassigned DNA
gcagcgtttgacgtcatcgtgcgtgtggtgcccctgctgccggggctggtgattggaggaaaccccgtgtctgcggagcggctgtagcctgtgagcagcgagatccagggacagagtctcagcctcgccgctgctgccgccgccgccgcccagagactgctgagcccgtccgtccgccgccaccacccactccggacacagaacatccagtcatggataaaaatgagctggttcagaaggccaaactggccgagcaggctgagcgatatgatgacatggcagcctgcatgaagtctgtaactgagcaaggagctgaattatccaatgaggagaggaatcttctctcagttgcttataaaaatgttgtaggagcccgtaggtcatcttggagggtcgtctcaagtattgaacaaaagacggaaggtgctgagaaaaaacagcagatggctcgagaatacagagagaaaattgagacggagctaagagatatctgcaatgatgtactgtctcttttggaaaagttcttgatccccaatgcttcacaagcagagagcaaagtcttctatttgaaaatgaaaggagattactaccgttacttggctgaggttgccgctggtgatgacaagaaagggattgtcgatcagtcacaacaagcataccaagaagcttttgaaatcagcaaaaaggaaatgcaaccaacacatcctatcagactgggtctggcccttaacttctctgtgttctattatgagattctgaactccccagagaaagcctgctctcttgcaaagacagcttttgatgaagccattgctgaacttgatacattaagtgaagagtcatacaaagacagcacgctaataatgcaattactgagagacaacttgacattgtggacatcggatacccaaggagacgaagctgaagcaggagaaggaggggaaaattaaccggccttccaacttttgtctgcctcattctaaaatttacacagtagaccatttgtcatccatgctgtcccacaaatagttttttgtttacgatttatgacaggtttatgttacttctatttgaatttctatatttcccatgtggtttttatgtttaatattaggggagtagagccagttaacatttagggagttatctgttttcatcttgaggtggccaatatggggatgtggaatttttatacaagttataagtgtttggcatagtacttttggtacattgtggcttcaaaagggccagtgtaaaactgcttccatgtctaagcaaagaaaactgcctacatactggtttgtcctggcggggaataaaagggatcattggttccagtcacaggtgtagtaattgtgggtactttaaggtttggagcacttacaaggctgtggtagaatcataccccatggataccacatattaaaccatgtatatctgtggaatactcaatgtgtacacctttgactacagctgcagaagtgttcctttagacaaagttgtgacccattttactctggataagggcagaaacggttcacattccattatttgtaaagttacctgctgttagctttcattatttttgctacactcattttatttgtatttaaatgttttaggcaacctaagaacaaatgtaaaagtaaagatgcaggaaaaatgaattgcttggtattcattacttcatgtatatcaagcacagcagtaaaacaaaaacccatgtatttaacttttttttaggatttttgcttttgtgatttttttttttttgatacttgcctaacatgcatgtgctgtaaaaatagttaacagggaaataacttgagatgatggctagctttgtttaatgtcttatgaaattttcatgaacaatccaagcataattgttaagaacacgtgtattaaattcatgtaagtggaataaaagttttatgaatggacttttcaactactttctctacagcttttcatgtaaattagtcttggttctgaaacttctctaaaggaaattgtacattttttgaaatttattccttattccctcttggcagctaatgggctcttaccaagtttaaacacaaaatttatcataacaaaaatactactaatataactactgtttccatgtcccatgatcccctctcttcctccccaccctgaaaaaaatgagttcctattttttctgggagagggggggattgattagaaaaaaatgtagtgtgttccatttaaaattttggcatatggcattttctaacttaggaagccacaatgttcttggcccatcatgacattgggtagcattaactgtaagttttgtgcttccaaatcactttttggtttttaagaatttcttgatactcttatagcctgccttcaattttgatcctttattctttctatttgtcaggtgcacaagattaccttcctgttttagccttctgtcttgtcaccaaccattcttacttggtggccatgtacttggaaaaaggccgcatgatctttctggctccactcagtgtctaaggcaccctgcttcctttgcttgcatcccacagactatttccctcatcctatttactgcagcaaatctctccttagttgatgagactgtgtttatctccctttaaaaccctacctatcctgaatggtctgtcattgtctgcctttaaaatccttcctctttcttcctcctctattctctaaataatgatggggctaagttatacccaaagctcactttacaaaatatttcctcagtactttgcagaaaacaccaaacaaaaatgccattttaaaaaaggtgtattttttcttttagaatgtaagctcctcaagagcagggacaatgttttctgtatgttctattgtgcctagtacactgtaaatgctcaataaatattgatgatgggaggcagtgagtcttgatgataagggtgagaaactgaaatcccaaacactgttttgttgcttgttttattatgacctcagattaaattgggaaatattggcccttttgaataattgtcccaaatattacattcaaataaaagtgcaatgg

SEQ ID NO: 33335 - DNA, 996 bp, Homo sapiens
  source 1..996: mol_type = unassigned DNA
agttactaccgcgaagcacggagggtggggcgggccgggcctcggggaggggtggggggatgtgaaaggtcccggatgttgctgaacgggagccccttccagagggagtgactggggcaagcgcagacgggctgagcgaaagctaaggtgggggtagggagagaacgccttcccgccggctgagaggaagagtgggccggcagaggctgcaggggagagggagagagagggcgttggggacccaaagggaaggcgaggagtgggggatttgcgttggggaggaaaaggaaaaaagcagcctcctgccctaggtgcactcgggacaagcgtagaggagctggaagccgagcggggtgggaggagtggcggctgcgggcgaggacgcgcgcgcctccgctcgccctccagcgcgggcgggcaggacgagcgccggggagcggcggttacgcggggccccgatcgctgtgggcaccaatcaacggttgccatagcagcgtttgacgtcatcgtgcgtgtggtgcccctgctgccggggctggtgattggaggaaaccccgtgtctgcggagcggctgtagcctgtgagcagcgagatccagggacagagtctcagcctcgccgctgctgccgccgccgccgcccagagactgctgagcccgtccgtccgccgccaccacccactccggacacagaacatccagtcatggataaaaatgagctggttcagaaggccaaactggccgagcaggctgagcgatatgatgacatggcagcctgcatgaagtctgtaactgagcaaggagctgaattatccaatgaggagaggaatcttctctcagttgcttataaaaatgttgtaggagcccgtaggtcatcttggagggtcgtctcaagtattgaacaaaagacggaaggtgctgagaaaaaacagcagatggctcgagaatacagagagaaaattgagacggagctaagagatatctgcaatgatgtactg

SEQ ID NO: 33336 - DNA, 891 bp, Homo sapiens
  source 1..891: mol_type = unassigned DNA
gagcgggccggagcccaggcctggcgcggcggcgcccgccaggtagaccggggcgaggctgcgcgccggcgggaggggagtccactgcgggaacatccagtcatggataaaaatgagctggttcagaaggccaaactggccgagcaggctgagcgatatgatgacatggcagcctgcatgaagtctgtaactgagcaaggagctgaattatccaatgaggagaggaatcttctctcagttgcttataaaaatgttgtaggagcccgtaggtcatcttggagggtcgtctcaagtattgaacaaaagacggaaggtgctgagaaaaaacagcagatggctcgagaatacagagagaaaattgagacggagctaagagatatctgcaatgatgtactgtctcttttggaaaagttcttgatccccaatgcttcacaagcagagagcaaagtcttctatttgaaaatgaaaggagattactaccgttacttggctgaggttgccgctggtgatgacaagaaagggattgtcgatcagtcacaacaagcataccaagaagcttttgaaatcagcaaaaaggaaatgcaaccaacacatcctatcagactgggtctggcccttaacttctctgtgttctattatgagattctgaactccccagagaaagcctgctctcttgcaaagacagcttttgatgaagccattgctgaacttgatacattaagtgaagagtcatacaaagacagcacgctaataatgcaattactgagagacaacttgacattgtggacatcggatacccaaggagacgaagctgaagcaggagaaggaggggaaaattaaccggccttccaacttttgtctgcctcattctaaaatttacacagtagacca

SEQ ID NO: 33337 - DNA, 701 bp, Homo sapiens
  source 1..701: mol_type = unassigned DNA
aaaaggtctaggaccgcttcccccgagccagcaggtgcactcgggacaagcgtagaggagctggaagccgagcggggtgggaggagtggcggctgcgggcgaggacgcgcgcgcctccgctcgccctccagcgcgggcgggcaggacgagcgccggggagcggcggttacgcggggccccgatcgctgtgggcaccaatcaacggttgccatagcagcgtttgacgtcatcgtgcgtgtggtgcccctgctgccggggctggtgattggaggaaaccccgtgtctgcggagcggctgtagcctgtgagcagcgagatccagggacagagtctcagcctcgccgctgctgccgccgccgccgcccagagactgctgagcccgtccgtccgccgccaccacccactccggacacagaacatccagtcatggataaaaatgagctggttcagaaggccaaactggccgagcaggctgagcgatatgatgacatggcagcctgcatgaagtctgtaactgagcaaggagctgaattatccaatgaggagaggaatcttctctcagttgcttataaaaatgttgtaggagcccgtaggtcatcttggagggtcgtctcaagtattgaacaaaagacggaaggtgctgagaaaaaacagcagatggctcgagaatacagagagaaaattgagacggagctaagagat

SEQ ID NO: 33338 - DNA, 3007 bp, Homo sapiens
  source 1..3007: mol_type = unassigned DNA
tgtcccctcgcgcagtcaccgagcgcagatcccgcgctctcgattggaacgcctccccatcactcagccacactcaggggctggacgcctcactcccgtttccgagccataaaaggtctaggaccgcttcccccgagccagcagaacatccagtcatggataaaaatgagctggttcagaaggccaaactggccgagcaggctgagcgatatgatgacatggcagcctgcatgaagtctgtaactgagcaaggagctgaattatccaatgaggagaggaatcttctctcagttgcttataaaaatgttgtaggagcccgtaggtcatcttggagggtcgtctcaagtattgaacaaaagacggaaggtgctgagaaaaaacagcagatggctcgagaatacagagagaaaattgagacggagctaagagatatctgcaatgatgtactgtctcttttggaaaagttcttgatccccaatgcttcacaagcagagagcaaagtcttctatttgaaaatgaaaggagattactaccgttacttggctgaggttgccgctggtgatgacaagaaagggattgtcgatcagtcacaacaagcataccaagaagcttttgaaatcagcaaaaaggaaatgcaaccaacacatcctatcagactgggtctggcccttaacttctctgtgttctattatgagattctgaactccccagagaaagcctgctctcttgcaaagacagcttttgatgaagccattgctgaacttgatacattaagtgaagagtcatacaaagacagcacgctaataatgcaattactgagagacaacttgacattgtggacatcggatacccaaggagacgaagctgaagcaggagaaggaggggaaaattaaccggccttccaacttttgtctgcctcattctaaaatttacacagtagaccatttgtcatccatgctgtcccacaaatagttttttgtttacgatttatgacaggtttatgttacttctatttgaatttctatatttcccatgtggtttttatgtttaatattaggggagtagagccagttaacatttagggagttatctgttttcatcttgaggtggccaatatggggatgtggaatttttatacaagttataagtgtttggcatagtacttttggtacattgtggcttcaaaagggccagtgtaaaactgcttccatgtctaagcaaagaaaactgcctacatactggtttgtcctggcggggaataaaagggatcattggttccagtcacaggtgtagtaattgtgggtactttaaggtttggagcacttacaaggctgtggtagaatcataccccatggataccacatattaaaccatgtatatctgtggaatactcaatgtgtacacctttgactacagctgcagaagtgttcctttagacaaagttgtgacccattttactctggataagggcagaaacggttcacattccattatttgtaaagttacctgctgttagctttcattatttttgctacactcattttatttgtatttaaatgttttaggcaacctaagaacaaatgtaaaagtaaagatgcaggaaaaatgaattgcttggtattcattacttcatgtatatcaagcacagcagtaaaacaaaaacccatgtatttaacttttttttaggatttttgcttttgtgatttttttttttttgatacttgcctaacatgcatgtgctgtaaaaatagttaacagggaaataacttgagatgatggctagctttgtttaatgtcttatgaaattttcatgaacaatccaagcataattgttaagaacacgtgtattaaattcatgtaagtggaataaaagttttatgaatggacttttcaactactttctctacagcttttcatgtaaattagtcttggttctgaaacttctctaaaggaaattgtacattttttgaaatttattccttattccctcttggcagctaatgggctcttaccaagtttaaacacaaaatttatcataacaaaaatactactaatataactactgtttccatgtcccatgatcccctctcttcctccccaccctgaaaaaaatgagttcctattttttctgggagagggggggattgattagaaaaaaatgtagtgtgttccatttaaaattttggcatatggcattttctaacttaggaagccacaatgttcttggcccatcatgacattgggtagcattaactgtaagttttgtgcttccaaatcactttttggtttttaagaatttcttgatactcttatagcctgccttcaattttgatcctttattctttctatttgtcaggtgcacaagattaccttcctgttttagccttctgtcttgtcaccaaccattcttacttggtggccatgtacttggaaaaaggccgcatgatctttctggctccactcagtgtctaaggcaccctgcttcctttgcttgcatcccacagactatttccctcatcctatttactgcagcaaatctctccttagttgatgagactgtgtttatctccctttaaaaccctacctatcctgaatggtctgtcattgtctgcctttaaaatccttcctctttcttcctcctctattctctaaataatgatggggctaagttatacccaaagctcactttacaaaatatttcctcagtactttgcagaaaacaccaaacaaaaatgccattttaaaaaaggtgtattttttcttttagaatgtaagctcctcaagagcagggacaatgttttctgtatgttctattgtgcctagtacactgtaaatgctcaataaatattgatgatgggaggcagtgagtcttgatgataagggtgagaaactgaaatcccaaacactgttttgttgcttgttttattatgacctcagattaaattgggaaatattggcccttttgaataattgtcccaaatattacattcaaataaaagtgcaatgg

SEQ ID NO: 33339 - DNA, 1012 bp, Homo sapiens
  source 1..1012: mol_type = unassigned DNA
agagtctcagcctcgccgctgctgccgccgccgccgcccagagactgctgagcccgtccgtccgccgccaccacccactccggacacagaacatccagtcatggataaaaatgagctgaattatccaatgaggagaggaatcttctctcagttgcttataaaaatgttgtaggagcccgtaggtcatcttggagggtcgtctcaagtattgaacaaaagacggaaggtgctgagaaaaaacagcagatggctcgagaatacagagagaaaattgagacggagctaagagatatctgcaatgatgtactgtctcttttggaaaagttcttgatccccaatgcttcacaagcagagagcaaagtcttctatttgaaaatgaaaggagattactaccgttacttggctgaggttgccgctggtgatgacaagaaagggattgtcgatcagtcacaacaagcataccaagaagcttttgaaatcagcaaaaaggaaatgcaaccaacacatcctatcagactgggtctggcccttaacttctctgtgttctattatgagattctgaactccccagagaaagcctgctctcttgcaaagacagcttttgatgaagccattgctgaacttgatacattaagtgaagagtcatacaaagacagcacgctaataatgcaattactgagagacaacttgacattgtggacatcggatacccaaggagacgaagctgaagcaggagaaggaggggaaaattaaccggccttccaacttttgtctgcctcattctaaaatttacacagtagaccatttgtcatccatgctgtcccacaaatagttttttgtttacgatttatgacaggtttatgttacttctatttgaatttctatatttcccatgtggtttttatgtttaatattaggggagtagagccagttaacatttagggagttatctgttttcatcttgaggtggccaatatggggatgtggaatttttatacaagttataagtgtt

SEQ ID NO: 33340 - DNA, 1399 bp, Homo sapiens
  source 1..1399: mol_type = unassigned DNA
acagagtctcagcctcgccgctgctgccgccgccgccgcccagagactgctgagcccgtccgtccgccgccaccacccactccggacacagtctcttttggaaaagttcttgatccccaatgcttcacaagcagagagcaaagtcttctatttgaaaatgaaaggagattactaccgttacttggctgaggttgccgctggtgatgacaagaaagggattgtcgatcagtcacaacaagcataccaagaagcttttgaaatcagcaaaaaggaaatgcaaccaacacatcctatcagactgggtctggcccttaacttctctgtgttctattatgagattctgaactccccagagaaagcctgctctcttgcaaagacagcttttgatgaagccattgctgaacttgatacattaagtgaagagtcatacaaagacagcacgctaataatgcaattactgagagacaacttgacattgtggacatcggatacccaaggagacgaagctgaagcaggagaaggaggggaaaattaaccggccttccaacttttgtctgcctcattctaaaatttacacagtagaccatttgtcatccatgctgtcccacaaatagttttttgtttacgatttatgacaggtttatgttacttctatttgaatttctatatttcccatgtggtttttatgtttaatattaggggagtagagccagttaacatttagggagttatctgttttcatcttgaggtggccaatatggggatgtggaatttttatacaagttataagtgtttggcatagtacttttggtacattgtggcttcaaaagggccagtgtaaaactgcttccatgtctaagcaaagaaaactgcctacatactggtttgtcctggcggggaataaaagggatcattggttccagtcacaggtgtagtaattgtgggtactttaaggtttggagcacttacaaggctgtggtagaatcataccccatggataccacatattaaaccatgtatatctgtggaatactcaatgtgtacacctttgactacagctgcagaagtgttcctttagacaaagttgtgacccattttactctggataagggcagaaacggttcacattccattatttgtaaagttacctgctgttagctttcattatttttgctacactcattttatttgtatttaaatgttttaggcaacctaagaacaaatgtaaaagtaaagatgcaggaaaaatgaattgcttggtattcattacttcatgtatatcaagcacagcagtaaaacaaaaacccatgtatttaacttttttttaggatttttgcttttgtgatttttttttttttgatacttgcctaacatgcatgtgctgtaaaaatagttaaca

SEQ ID NO: 33341 - DNA, 511 bp, Homo sapiens
  source 1..511: mol_type = unassigned DNA
agcccgcagtcggctcccgtgcttgatggactagaactggagggtccctgcgctcggtttggggacgcatatcctgctttgggggcggaacatccagtcatggataaaaatgagctggttcagaaggccaaactggccgagcaggctgagcgatatgatgacatggcagcctgcatgaagtctgtaactgagcaaggagctgaattatccaatgaggagaggaatcttctctcagttgcttataaaaatgttgtaggagcccgtaggtcatcttggagggtcgtctcaagtattgaacaaaagacggaaggtgctgagaaaaaacagcagatggctcgagaatacagagagaaaattgagacggagctaagagatatctgcaatgatgtactgtctcttttggaaaagttcttgatccccaatgcttcacaagcagagagcaaagtcttctatttgaaaatgaaaggagattactaccgttacttggctgaggttgccgctggtgatgaca

SEQ ID NO: 33342 - DNA, 750 bp, Homo sapiens
  source 1..750: mol_type = unassigned DNA
aacatccagtcatggataaaaatgagctggttcagaaggccaaactggccgagcaggctgagcgatatgatgacatggcagcctgcatgaagtctgtaactgagcaaggagctgaattatccaatgaggagaggaatcttctctcagttgcttataaaaatgttgtaggagcccgtaggtcatcttggagggtcgtctcaagtattgaacaaaagacggaaggtgctgagaaaaaacagcagatggctcgagaatacagagagaaaattgagacggagctaagagatatctgcaatgatgtactgtctcttttggaaaagttcttgatccccaatgcttcacaagcagagagcaaagtcttctatttgaaaatgaaaggagattactaccgttacttggctgaggttgccgctggtgatgacaagaaagtacgttttggtgtgtcttatccagggattgtcgatcagtcacaacaagcataccaagaagcttttgaaatcagcaaaaaggaaatgcaaccaacacatcctatcagactgggtctggcccttaacttctctgtgttctattatgagattctgaactccccagagaaagcctgctctcttgcaaagacagcttttgatgaagccattgctgaacttgatacattaagtgaagagtcatacaaagacagcacgctaataatgcaattactgagagacaacttgacattgtggacatcggatacccaaggagacgaagctgaag

SEQ ID NO: 33343 - DNA, 1394 bp, Homo sapiens
  source 1..1394: mol_type = unassigned DNA
gctataatgttaatgtaatgagtcaaccatgcagaaaactctggcgtcacaactatgaaacctcttcctgcattgaattcttgaagtctcttttggaaaagttcttgatccccaatgcttcacaagcagagagcaaagtcttctatttgaaaatgaaaggagattactaccgttacttggctgaggttgccgctggtgatgacaagaaagggattgtcgatcagtcacaacaagcataccaagaagcttttgaaatcagcaaaaaggaaatgcaaccaacacatcctatcagactgggtctggcccttaacttctctgtgttctattatgagattctgaactccccagagaaagcctgctctcttgcaaagacagcttttgatgaagccattgctgaacttgatacattaagtgaagagtcatacaaagacagcacgctaataatgcaattactgagagacaacttgacattgtggacatcggatacccaaggagacgaagctgaagcaggagaaggaggggaaaattaaccggccttccaacttttgtctgcctcattctaaaatttacacagtagaccatttgtcatccatgctgtcccacaaatagttttttgtttacgatttatgacaggtttatgttacttctatttgaatttctatatttcccatgtggtttttatgtttaatattaggggagtagagccagttaacatttagggagttatctgttttcatcttgaggtggccaatatggggatgtggaatttttatacaagttataagtgtttggcatagtacttttggtacattgtggcttcaaaagggccagtgtaaaactgcttccatgtctaagcaaagaaaactgcctacatactggtttgtcctggcggggaataaaagggatcattggttccagtcacaggtgtagtaattgtgggtactttaaggtttggagcacttacaaggctgtggtagaatcataccccatggataccacatattaaaccatgtatatctgtggaatactcaatgtgtacacctttgactacagctgcagaagtgttcctttagacaaagttgtgacccattttactctggataagggcagaaacggttcacattccattatttgtaaagttacctgctgttagctttcattatttttgctacactcattttatttgtatttaaatgttttaggcaacctaagaacaaatgtaaaagtaaagatgcaggaaaaatgaattgcttggtattcattacttcatgtatatcaagcacagcagtaaaacaaaaacccatgtatttaacttttttttaggatttttgcttttgtgatttttttttttttgatacttgcctaacatgcatgtgctgtaaaaatagttaaca

SEQ ID NO: 33344 - DNA, 875 bp, Homo sapiens
  source 1..875: mol_type = unassigned DNA
tcagcctcccgagtagctgggattacagtcgtgtgccaccacatccaatttttttttttttcccagtagagacggggtgtcacccaggctggtaatctttattttaaattgtacttgctcctaagaatttaggtgttaagagcatagcatgtagaaggaaaaaataaagctgctgtaacctcatcctgccttcttggagatgagaatctgagacccaggaagatttcagagttttgtcaaggtgacagagtttgaatttaggcatctcttttggaaaagttcttgatccccaatgcttcacaagcagagagcaaagtcttctatttgaaaatgaaaggagattactaccgttacttggctgaggttgccgctggtgatgacaagaaagggattgtcgatcagtcacaacaagcataccaagaagcttttgaaatcagcaaaaaggaaatgcaaccaacacatcctatcagactgggtctggcccttaacttctctgtgttctattatgagattctgaactccccagagaaagcctgctctcttgcaaagacagcttttgatgaagccattgctgaacttgatacattaagtgaagagtcatacaaagacagcacgctaataatgcaattactgagagacaacttgacattgtggacatcggatacccaaggagacgaagctgaagcaggagaaggaggggaaaattaaccggccttccaacttttgtctgcctcattctaaaatttacacagtagaccatttgtcatccatgctgtcccacaaatagttttttgtttacgatttatgacaggtttatgttacttctatttgaatttctatatttcccatgtggtttttatgtttaatattagggg

SEQ ID NO: 33345 - DNA, 567 bp, Homo sapiens
  source 1..567: mol_type = unassigned DNA
gcacggagggtggggcgggccgggcctcggggaggggtggggggatgtgaaaggtcccggatgttgctgaacgggagccccttccagagggagtgactggggcaagcgcagacgggctgagcgaaagctaagcgtttgacgtcatcgtgcgtgtggtgcccctgctgccggggctggtgattggaggaaaccccgtgtctgcggagcggctgtagcctgtgagcagcgagatccagggacagagtctcagcctcgccgctgctgccgccgccgccgcccagagactgctgagcccgtccgtccgccgccaccacccactccggacacagaacatccagtcatggataaaaatgagctggttcagaaggccaaactggccgagcaggctgagcgatatgatgacatggcagcctgcatgaagtctgtaactgagcaaggagctgaattatccaatgaggagaggaatcttctctcagttgcttataaaaatgttgtaggagcccgtaggtcatcttggagggtcgtctcaagtattgaacaaaagacggaaggtgctgagaaaaaaca

SEQ ID NO: 33346 - DNA, 664 bp, Homo sapiens
  source 1..664: mol_type = unassigned DNA
gtcttctatttgaaaatgaaaggagattactaccgttacttggctgaggttgccgctggtgatgacaagaaagggattgtcgatcagtcacaacaagcataccaagaagcttttgaaatcagcaaaaaggaaatgcaaccaacacatcctatcagactgggtctggcccttaacttctctgtgttctattatgagattctgaactccccagagaaagcctgctctcttgcaaagacagcttttgatgaagccattgctgaacttgatacattaagtgaagagtcatacaaagacagcacgctaataatgcaattactgagagacaacttgacattgtggacatcggatacccaaggagacgaagctgaagcaggagaaggaggggaaaattaaccggccttccaacttttgtctgcctcattctaaaatttacacagtagaccatttgtcatccatgctgtcccacaaatagttttttgtttacgatttatgacaggtgcacaagattaccttcctgttttagccttctgtcttgtcaccaaccattcttacttggtggccatgtacttggaaaaaggccgcatgatctttctggctccactcagtgtctaaggcaccctgcttcctttgcttgcatcccacagactatttccctcatcctatt

SEQ ID NO: 33347 - DNA, 626 bp, Homo sapiens
  source 1..626: mol_type = unassigned DNA
ggtcccggatgttgctgaacgggagccccttccagagggagtgactggggcaagcgcagacgggctgagcgaaagctaaggtgcactcgggacaagcgtagaggagctggaagccgagcggggtgggaggagtggcggctgcgggcgaggacgcgcgcgcctccgctcgccctccagcgcgggcgggcaggacgagcgccggggagcggcggttacgcggggccccgatcgctgtgggcaccaatcaacggttgccatagcagcgtttgacgtcatcgtgcgtgtggtgcccctgctgccggggctggtgattggaggaaaccccgtgtctgcggagcggctgtagcctgtgagcagcgagatccagggacagagtctcagcctcgccgctgctgccgccgccgccgcccagagactgctgagcccgtccgtccgccgccaccacccactccggacacagaacatccagtcatggataaaaatgagctggttcagaaggccaaactggccgagcaggctgagcgatatgatgacatggcagcctgcatgaagtctgtaactgagcaaggagctgaattatccaatgaggagaggaatcttctctcagttgcttataaaaatgttgt

SEQ ID NO: 33348 - DNA, 1536 bp, Homo sapiens
  source 1..1536: mol_type = unassigned DNA
cactgagccatgcccacccccgacgccaccacgccacaggccaagggcttccgcagggccgtgtctgagctggacgccaagcaggcagaggccatcatggtaagagggcagtccccgcggttcattgggcgcaggcagagcctcatcgaggacgcccgcaaggagcgggaggcggcggtggcagcagcggccgctgcagtcccctcggagcccggggaccccctggaggctgtggcctttgaggagaaggaggggaaggccgtgctaaacctgctcttctccccgagggccaccaagccctcggcgctgtcccgagctgtgaaggtgtttgagacgtttgaagccaaaatccaccatctagagacccggcccgcccagaggccgcgagctgggggcccccacctggagtacttcgtgcgcctcgaggtgcgccgaggggacctggccgccctgctcagtggtgtgcgccaggtgtcagaggacgtgcgcagccccgcggggcccaaggtcccctggttcccaagaaaagtgtcagagctggacaagtgtcatcacctggtcaccaagttcgaccctgacctggacttggaccacccgggcttctcggaccaggtgtaccgccagcgcaggaagctgattgctgagatcgccttccagtacaggcacggcgacccgattccccgtgtggagtacaccgccgaggagattgccacctgggactgctgccacgagctgctggggcacgtgcccatgctggccgaccgcaccttcgcgcagttctcgcaggacattggcctggcgtccctgggggcctcggatgaggaaattgagaagctgtccacgctgtactggttcacggtggagttcgggctgtgtaagcagaacggggaggtgaaggcctatggtgccgggctgctgtcctcctacggggagctcctgcactgcctgtctgaggagcctgagattcgggccttcgaccctgaggctgcggccgtgcagccctaccaagaccagacgtaccagtcagtctacttcgtgtctgagagcttcagtgacgccaaggacaagctcaggagctatgcctcacgcatccagcgccccttctccgtgaagttcgacccgtacacgctggccatcgacgtgctggacagcccccaggccgtgcggcgctccctggagggtgtccaggatgagctggacacccttgcccatgcgctgagtgccattggctaggtgcacggcgtccctgagggcccttcccaacctcccctggtcctgcactgtcccggagctcaggccctggtgaggggctgggtcccgggtgccccccatgccctccctgctgccaggctcccactgcccctgcacctgcttctcagcgcaacagctgtgtgtgcccgtggtgaggttgtgctgcctgtggtgaggtcctgtcctggctcccagggtcctgggggctgctgcactgccctccgcccttccctgacactgtctgctgccccaatcaccgtcacaataaaagaaactgtggtctct

SEQ ID NO: 33349 - DNA, 1889 bp, Homo sapiens
  source 1..1889: mol_type = unassigned DNA
ggacccagagggggctttgacgtcagctcagcttataagaggctgctgggccagggctgtggagacggagcccggacctccacactgagccatgcccacccccgacgccaccacgccacaggccaagggcttccgcagggccgtgtctgagctggacgccaagcaggcagaggccatcatgtccccgcggttcattgggcgcaggcagagcctcatcgaggacgcccgcaaggagcgggaggcggcggtggcagcagcggccgctgcagtcccctcggagcccggggaccccctggaggctgtggcctttgaggagaaggaggggaaggccgtgctaaacctgctcttctccccgagggccaccaagccctcggcgctgtcccgagctgtgaaggtgtttgagacgtttgaagccaaaatccaccatctagagacccggcccgcccagaggccgcgagctgggggcccccacctggagtacttcgtgcgcctcgaggtgcgccgaggggacctggccgccctgctcagtggtgtgcgccaggtgtcagaggacgtgcgcagccccgcggggcccaaggtcccctggttcccaagaaaagtgtcagagctggacaagtgtcatcacctggtcaccaagttcgaccctgacctggacttggaccacccgggcttctcggaccaggtgtaccgccagcgcaggaagctgattgctgagatcgccttccagtacaggcacggcgacccgattccccgtgtggagtacaccgccgaggagattgccacctggaaggaggtctacaccacgctgaagggcctctacgccacgcacgcctgcggggagcacctggaggcctttgctttgctggagcgcttcagcggctaccgggaagacaatatcccccagctggaggacgtctcccgcttcctgaaggagcgcacgggcttccagctgcggcctgtggccggcctgctgtccgcccgggacttcctggccagcctggccttccgcgtgttccagtgcacccagtatatccgccacgcgtcctcgcccatgcactcccctgagccggactgctgccacgagctgctggggcacgtgcccatgctggccgaccgcaccttcgcgcagttctcgcaggacattggcctggcgtccctgggggcctcggatgaggaaattgagaagctgtccacgctgtactggttcacggtggagttcgggctgtgtaagcagaacggggaggtgaaggcctatggtgccgggctgctgtcctcctacggggagctcctgcactgcctgtctgaggagcctgagattcgggccttcgaccctgaggctgcggccgtgcagccctaccaagaccagacgtaccagtcagtctacttcgtgtctgagagcttcagtgacgccaaggacaagctcaggagctatgcctcacgcatccagcgccccttctccgtgaagttcgacccgtacacgctggccatcgacgtgctggacagcccccaggccgtgcggcgctccctggagggtgtccaggatgagctggacacccttgcccatgcgctgagtgccattggctaggtgcacggcgtccctgagggcccttcccaacctcccctggtcctgcactgtcccggagctcaggccctggtgaggggctgggtcccgggtgccccccatgccctccctgctgccaggctcccactgcccctgcacctgcttctcagcgcaacagctgtgtgtgcccgtggtgaggttgtgctgcctgtggtgaggtcctgtcctggctcccagggtcctgggggctgctgcactgccctccgcccttccctgacactgtctgctgccccaatcaccgtcacaataaaagaaactgtggtctcta

SEQ ID NO: 33350 - DNA, 1898 bp, Homo sapiens
  source 1..1898: mol_type = unassigned DNA
cggacctccacactgagccatgcccacccccgacgccaccacgccacaggccaagggcttccgcagggccgtgtctgagctggacgccaagcaggcagaggccatcatgggcgccccggggcccagcctcacaggctctccgtggcctggaactgcagccccagctgcatcctacacccccaccccaaggtccccgcggttcattgggcgcaggcagagcctcatcgaggacgcccgcaaggagcgggaggcggcggtggcagcagcggccgctgcagtcccctcggagcccggggaccccctggaggctgtggcctttgaggagaaggaggggaaggccgtgctaaacctgctcttctccccgagggccaccaagccctcggcgctgtcccgagctgtgaaggtgtttgagacgtttgaagccaaaatccaccatctagagacccggcccgcccagaggccgcgagctgggggcccccacctggagtacttcgtgcgcctcgaggtgcgccgaggggacctggccgccctgctcagtggtgtgcgccaggtgtcagaggacgtgcgcagccccgcggggcccaaggtcccctggttcccaagaaaagtgtcagagctggacaagtgtcatcacctggtcaccaagttcgaccctgacctggacttggaccacccgggcttctcggaccaggtgtaccgccagcgcaggaagctgattgctgagatcgccttccagtacaggcacggcgacccgattccccgtgtggagtacaccgccgaggagattgccacctggaaggaggtctacaccacgctgaagggcctctacgccacgcacgcctgcggggagcacctggaggcctttgctttgctggagcgcttcagcggctaccgggaagacaatatcccccagctggaggacgtctcccgcttcctgaaggagcgcacgggcttccagctgcggcctgtggccggcctgctgtccgcccgggacttcctggccagcctggccttccgcgtgttccagtgcacccagtatatccgccacgcgtcctcgcccatgcactcccctgagccggactgctgccacgagctgctggggcacgtgcccatgctggccgaccgcaccttcgcgcagttctcgcaggacattggcctggcgtccctgggggcctcggatgaggaaattgagaagctgtccacgctgtactggttcacggtggagttcgggctgtgtaagcagaacggggaggtgaaggcctatggtgccgggctgctgtcctcctacggggagctcctgcactgcctgtctgaggagcctgagattcgggccttcgaccctgaggctgcggccgtgcagccctaccaagaccagacgtaccagtcagtctacttcgtgtctgagagcttcagtgacgccaaggacaagctcaggagctatgcctcacgcatccagcgccccttctccgtgaagttcgacccgtacacgctggccatcgacgtgctggacagcccccaggccgtgcggcgctccctggagggtgtccaggatgagctggacacccttgcccatgcgctgagtgccattggctaggtgcacggcgtccctgagggcccttcccaacctcccctggtcctgcactgtcccggagctcaggccctggtgaggggctgggtcccgggtgccccccatgccctccctgctgccaggctcccactgcccctgcacctgcttctcagcgcaacagctgtgtgtgcccgtggtgaggttgtgctgcctgtggtgaggtcctgtcctggctcccagggtcctgggggctgctgcactgccctccgcccttccctgacactgtctgctgccccaatcaccgtcacaataaaagaaactgtggtctcta

SEQ ID NO: 33351 - DNA, 1910 bp, Homo sapiens
  source 1..1910: mol_type = unassigned DNA
cggacctccacactgagccatgcccacccccgacgccaccacgccacaggccaagggcttccgcagggccgtgtctgagctggacgccaagcaggcagaggccatcatggtaagagggcagggcgccccggggcccagcctcacaggctctccgtggcctggaactgcagccccagctgcatcctacacccccaccccaaggtccccgcggttcattgggcgcaggcagagcctcatcgaggacgcccgcaaggagcgggaggcggcggtggcagcagcggccgctgcagtcccctcggagcccggggaccccctggaggctgtggcctttgaggagaaggaggggaaggccgtgctaaacctgctcttctccccgagggccaccaagccctcggcgctgtcccgagctgtgaaggtgtttgagacgtttgaagccaaaatccaccatctagagacccggcccgcccagaggccgcgagctgggggcccccacctggagtacttcgtgcgcctcgaggtgcgccgaggggacctggccgccctgctcagtggtgtgcgccaggtgtcagaggacgtgcgcagccccgcggggcccaaggtcccctggttcccaagaaaagtgtcagagctggacaagtgtcatcacctggtcaccaagttcgaccctgacctggacttggaccacccgggcttctcggaccaggtgtaccgccagcgcaggaagctgattgctgagatcgccttccagtacaggcacggcgacccgattccccgtgtggagtacaccgccgaggagattgccacctggaaggaggtctacaccacgctgaagggcctctacgccacgcacgcctgcggggagcacctggaggcctttgctttgctggagcgcttcagcggctaccgggaagacaatatcccccagctggaggacgtctcccgcttcctgaaggagcgcacgggcttccagctgcggcctgtggccggcctgctgtccgcccgggacttcctggccagcctggccttccgcgtgttccagtgcacccagtatatccgccacgcgtcctcgcccatgcactcccctgagccggactgctgccacgagctgctggggcacgtgcccatgctggccgaccgcaccttcgcgcagttctcgcaggacattggcctggcgtccctgggggcctcggatgaggaaattgagaagctgtccacgctgtactggttcacggtggagttcgggctgtgtaagcagaacggggaggtgaaggcctatggtgccgggctgctgtcctcctacggggagctcctgcactgcctgtctgaggagcctgagattcgggccttcgaccctgaggctgcggccgtgcagccctaccaagaccagacgtaccagtcagtctacttcgtgtctgagagcttcagtgacgccaaggacaagctcaggagctatgcctcacgcatccagcgccccttctccgtgaagttcgacccgtacacgctggccatcgacgtgctggacagcccccaggccgtgcggcgctccctggagggtgtccaggatgagctggacacccttgcccatgcgctgagtgccattggctaggtgcacggcgtccctgagggcccttcccaacctcccctggtcctgcactgtcccggagctcaggccctggtgaggggctgggtcccgggtgccccccatgccctccctgctgccaggctcccactgcccctgcacctgcttctcagcgcaacagctgtgtgtgcccgtggtgaggttgtgctgcctgtggtgaggtcctgtcctggctcccagggtcctgggggctgctgcactgccctccgcccttccctgacactgtctgctgccccaatcaccgtcacaataaaagaaactgtggtctcta

SEQ ID NO: 33352 - DNA, 3865 bp, Homo sapiens
  source 1..3865: mol_type = unassigned DNA
atgcctctgcgccactgggggatggccaggggcagtaagcccgttggggatggagcccagcccatggctgccatgggaggcctgaaggtgcttctgcactgggctggtccaggcggcggggagccctgggtcactttcagtgagtcatcgctgacagctgaggaagtctgcatccacattgcacataaagttggtatcactcctccttgcttcaatctctttgccctcttcgatgctcaggcccaagtctggttgcccccaaaccacatcctagagatccccagagatgcaagcctgatgctatatttccgcataaggttttatttccggaactggcatggcatgaatcctcgggaaccggctgtgtaccgttgtgggcccccaggaaccgaggcatcctcagatcagacagcacaggggatgcaactcctggacccagcctcatttgagtacctctttgagcagggcaagcatgagtttgtgaatgacgtggcatcactgtgggagctgtcgaccgaggaggagatccaccactttaagaatgagagcctgggcatggcctttctgcacctctgtcacctcgctctccgccatggcatccccctggaggaggtggccaagaagaccagcttcaaggactgcatcccgcgctccttccgccggcatatccggcagcacagcgccctgacccggctgcgccttcggaacgtcttccgcaggttcctgcgggacttccagccgggccgactctcccagcagatggtcatggtcaaatacctagccacactcgagcggctggcaccccgcttcggcacagagcgtgtgcccgtgtgccacctgaggctgctggcccaggccgagggggagccctgctacatccgggacagtggggtggcccctacagaccctggccctgagtctgctgctgggcccccaacccacgaggtgctggtgacaggcactggtggcatccagtggtggccagtagaggaggaggtgaacaaggaggagggttctagtggcagcagtggcaggaacccccaagccagcctgtttgggaagaaggccaaggctcacaaggcagtcggccagccggcagacaggccgcgggagccactgtgggcctacttctgtgacttccgggacatcacccacgtggtgctgaaagagcactgtgtcagcatccaccggcaggacaacaagtgcctggagctgagcttgccttcccgggctgcggcgctgtccttcgtgtcgctggtggacggctatttccgcctgacggccgactccagccactacctgtgccacgaggtggctcccccacggctggtgatgagcatccgggatgggatccacggacccctgctggagccatttgtgcaggccaagctgcggcccgaggacggcctgtacctcattcactggagcaccagccacccctaccgcctgatcctcacagtggcccagcgtagccaggcaccagacggcatgcagagcttgcggctccgaaagttccccattgagcagcaggacggggccttcgtgctggagggctggggccggtccttccccagcgttcgggaacttggggctgccttgcagggctgcttgctgagggccggggatgactgcttctctctgcgtcgctgttgcctgccccaaccaggagaaacctccaatctcatcatcatgcggggggctcgggccagccccaggacactcaacctcagccagctcagcttccaccgggttgaccagaaggagatcacccagctgtcccacttgggccagggcacaaggaccaacgtgtatgagggccgcctgcgagtggagggcagcggggaccctgaggagggcaagatggatgacgaggaccccctcgtgcctggcagggaccgtgggcaggagctacgagtggtgctcaaagtgctggaccctagtcaccatgacatcgccctggccttctacgagacagccagcctcatgagccaggtctcccacacgcacctggccttcgtgcatggcgtctgtgtgcgcggccctgaaaatatcatggtgacagagtacgtggagcacggacccctggatgtgtggctgcggagggagcggggccatgtgcccatggcttggaagatggtggtggcccagcagctggccagcgccctcagctacctggagaacaagaacctggttcatggtaatgtgtgtggccggaacatcctgctggcccggctggggttggcagagggcaccagccccttcatcaagctgagtgatcctggcgtgggcctgggcgccctctccagggaggagcgggtggagaggatcccctggctggcccccgaatgcctaccaggtggggccaacagcctaagcaccgccatggacaagtgggggtttggcgccaccctcctggagatctgctttgacggagaggcccctctgcagagccgcagtccctccgagaaggagcatttctaccagaggcagcaccggctgcccgagccctcctgcccacagctggccacactcaccagccagtgtctgacctatgagccaacccagaggccatcattccgcaccatcctgcgtgacctcacccggctgcagccccacaatcttgctgacgtcttgactgtgaacccggactcaccggcgtcggaccctacggttttccacaagcgctatttgaaaaagatccgagatctgggcgagggtcacttcggcaaggtcagcttgtactgctacgatccgaccaacgacggcactggcgagatggtggcggtgaaagccctcaaggcagactgcggcccccagcaccgctcgggctggaagcaggagattgacattctgcgcacgctctaccacgagcacatcatcaagtacaagggctgctgcgaggaccaaggcgagaagtcgctgcagctggtcatggagtacgtgcccctgggcagcctccgagactacctgccccggcacagcatcgggctggcccagctgctgctcttcgcccagcagatctgcgagggcatggcctatctgcacgcgcagcactacatccaccgagacctagccgcgcgcaacgtgctgctggacaacgacaggctggtcaagatcggggactttggcctagccaaggccgtgcccgaaggccacgagtactaccgcgtgcgcgaggatggggacagccccgtgttctggtatgccccagagtgcctgaaggagtataagttctactatgcgtcagatgtctggtccttcggggtgaccctgtatgagctgctgacgcactgtgactccagccagagcccccccacgaaattccttgagctcataggcattgctcagggtcagatgacagttctgagactcactgagttgctggaacgaggggagaggctgccacggcccgacaaatgtccctgtgaggtctatcatctcatgaagaactgctgggagacagaggcgtcctttcgcccaaccttcgagaacctcatacccattctgaagacagtccatgagaagtaccaaggccaggccccttcagtgttcagcgtgtgctgaggcacaatggcagccctgcctgggaggactggaccaggcagtggctgcagagggagcctcctgctccctgctccaggatgaaaccaagagggggatgtcagcctcacccacaccgtgtgccttactcctgtctagagaccccacctctgtgaacttatttttctttcttggccgtgagcctaaccatgatcttgagggacccaacatttgtaggggcactaatccagcccttaaatcccccagcttccaaacttgaggcccaccatctccaccatctggtaataaactcatgttttctctg

SEQ ID NO: 33353 - DNA, 4347 bp, Homo sapiens
  source 1..4347: mol_type = unassigned DNA
aaaaaaaaaaaaatccaatggtgacgagcagggagaacagagcagctgccaatgggcgtgtgcgtttcaggcggccaatgggaggaggcgtctcggcgggggacaagcagtagctacccgcgggagcggggaggggtccgggttcgagcttgtgttcccccggaagggtgagtctggacgcgggcgcggaaggagcgcggccggaggtcctcaggaagaagccgcggggactggctgcgcttgacaggctgcacttggatgggagcacctggtgcctcgggactgctccgatgcccgggtctgtgctgaatgtgtaatatgcggaactatattgaaacattacaaccatcttttgatggcaacaccctgaggacctcccttttccagatggggaaactgaggcccagaattgctaagtggcttgcttgagttgacacagggagctccaggactcaccctcagctgagccacctgccgggagcatgcctctgcgccactgggggatggccaggggcagtaagcccgttggggatggagcccagcccatggctgccatgggaggcctgaaggtgcttctgcactgggctggtccaggcggcggggagccctgggtcactttcagtgagtcatcgctgacagctgaggaagtctgcatccacattgcacataaagttggtatcactcctccttgcttcaatctctttgccctcttcgatgctcaggcccaagtctggttgcccccaaaccacatcctagagatccccagagatgcaagcctgatgctatatttccgcataaggttttatttccggaactggcatggcatgaatcctcgggaaccggctgtgtaccgttgtgggcccccaggaaccgaggcatcctcagatcagacagcacaggggatgcaactcctggacccagcctcatttgagtacctctttgagcagggcaagcatgagtttgtgaatgacgtggcatcactgtgggagctgtcgaccgaggaggagatccaccactttaagaatgagagcctgggcatggcctttctgcacctctgtcacctcgctctccgccatggcatccccctggaggaggtggccaagaagaccagcttcaaggactgcatcccgcgctccttccgccggcatatccggcagcacagcgccctgacccggctgcgccttcggaacgtcttccgcaggttcctgcgggacttccagccgggccgactctcccagcagatggtcatggtcaaatacctagccacactcgagcggctggcaccccgcttcggcacagagcgtgtgcccgtgtgccacctgaggctgctggcccaggccgagggggagccctgctacatccgggacagtggggtggcccctacagaccctggccctgagtctgctgctgggcccccaacccacgaggtgctggtgacaggcactggtggcatccagtggtggccagtagaggaggaggtgaacaaggaggagggttctagtggcagcagtggcaggaacccccaagccagcctgtttgggaagaaggccaaggctcacaaggcagtcggccagccggcagacaggccgcgggagccactgtgggcctacttctgtgacttccgggacatcacccacgtggtgctgaaagagcactgtgtcagcatccaccggcaggacaacaagtgcctggagctgagcttgccttcccgggctgcggcgctgtccttcgtgtcgctggtggacggctatttccgcctgacggccgactccagccactacctgtgccacgaggtggctcccccacggctggtgatgagcatccgggatgggatccacggacccctgctggagccatttgtgcaggccaagctgcggcccgaggacggcctgtacctcattcactggagcaccagccacccctaccgcctgatcctcacagtggcccagcgtagccaggcaccagacggcatgcagagcttgcggctccgaaagttccccattgagcagcaggacggggccttcgtgctggagggctggggccggtccttccccagcgttcgggaacttggggctgccttgcagggctgcttgctgagggccggggatgactgcttctctctgcgtcgctgttgcctgccccaaccaggagaaacctccaatctcatcatcatgcggggggctcgggccagccccaggacactcaacctcagccagctcagcttccaccgggttgaccagaaggagatcacccagctgtcccacttgggccagggcacaaggaccaacgtgtatgagggccgcctgcgagtggagggcagcggggaccctgaggagggcaagatggatgacgaggaccccctcgtgcctggcagggaccgtgggcaggagctacgagtggtgctcaaagtgctggaccctagtcaccatgacatcgccctggccttctacgagacagccagcctcatgagccaggtctcccacacgcacctggccttcgtgcatggcgtctgtgtgcgcggccctgaaaatatcatggtgacagagtacgtggagcacggacccctggatgtgtggctgcggagggagcggggccatgtgcccatggcttggaagatggtggtggcccagcagctggccagcgccctcagctacctggagaacaagaacctggttcatggtaatgtgtgtggccggaacatcctgctggcccggctggggttggcagagggcaccagccccttcatcaagctgagtgatcctggcgtgggcctgggcgccctctccagggaggagcgggtggagaggatcccctggctggcccccgaatgcctaccaggtggggccaacagcctaagcaccgccatggacaagtgggggtttggcgccaccctcctggagatctgctttgacggagaggcccctctgcagagccgcagtccctccgagaaggagcatttctaccagaggcagcaccggctgcccgagccctcctgcccacagctggccacactcaccagccagtgtctgacctatgagccaacccagaggccatcattccgcaccatcctgcgtgacctcacccggctgcagccccacaatcttgctgacgtcttgactgtgaacccggactcaccggcgtcggaccctacggttttccacaagcgctatttgaaaaagatccgagatctgggcgagggtcacttcggcaaggtcagcttgtactgctacgatccgaccaacgacggcactggcgagatggtggcggtgaaagccctcaaggcagactgcggcccccagcaccgctcgggctggaagcaggagattgacattctgcgcacgctctaccacgagcacatcatcaagtacaagggctgctgcgaggaccaaggcgagaagtcgctgcagctggtcatggagtacgtgcccctgggcagcctccgagactacctgccccggcacagcatcgggctggcccagctgctgctcttcgcccagcagatctgcgagggcatggcctatctgcacgcgcagcactacatccaccgagacctagccgcgcgcaacgtgctgctggacaacgacaggctggtcaagatcggggactttggcctagccaaggccgtgcccgaaggccacgagtactaccgcgtgcgcgaggatggggacagccccgtgttctggtatgccccagagtgcctgaaggagtataagttctactatgcgtcagatgtctggtccttcggggtgaccctgtatgagctgctgacgcactgtgactccagccagagcccccccacgaaattccttgagctcataggcattgctcagggtcagatgacagttctgagactcactgagttgctggaacgaggggagaggctgccacggcccgacaaatgtccctgtgaggtctatcatctcatgaagaactgctgggagacagaggcgtcctttcgcccaaccttcgagaacctcatacccattctgaagacagtccatgagaagtaccaaggccaggccccttcagtgttcagcgtgtgctgaggcacaatggcagccctgcctgggaggactggaccaggcagtggctgcagagggagcctcctgctccctgctccaggatgaaaccaagagggggatgtcagcctcacccacaccgtgtgccttactcctgtctagagaccccacctctgtgaacttatttttctttcttggccgtgagcctaaccatgatcttgagggacccaacatttgtaggggcactaatccagcccttaaatcccccagcttccaaacttgaggcccaccatctccaccatctggtaataaactcatgttttctctg

SEQ ID NO: 33354 - DNA, 644 bp, Homo sapiens
  source 1..644: mol_type = unassigned DNA
aagcagtagctacccgcgggagcggggaggggtccgggttcgagcttgtgttcccccggaagggtgagtctggacgcgggcgcggaaggagcgcggccggaggtcctcaggaagaagccgcggggactggctgcgcttgacaggctgcacttggatgggagcacctggtgcctcgggactgctccgatgcccgatggggaaactgaggcccagaattgctaagtggcttgcttgagttgacacagggagctccaggactcaccctcagctgagccacctgccgggagcatgcctctgcgccactgggggatggccaggggcagtaagcccgttggggatggagcccagcccatggctgccatgggaggcctgaaggtgcttctgcactgggctggtccaggcggcggggagccctgggtcactttcagtgagtcatcgctgacagctgaggaagtctgcatccacattgcacataaagttggtatcactcctccttgcttcaatctctttgccctcttcgatgctcaggcccaagtctggttgcccccaaaccacatcctagagatccccagagatgcaagcctgatgctatatttccgcataaggttttatttccggaactggcatggcatgaatcctcggga

SEQ ID NO: 33355 - DNA, 3312 bp, Homo sapiens
  source 1..3312: mol_type = unassigned DNA
gccaatgggaggaggcgtctcggcgggggacaagcagtagctacccgcgggagcggggaggggtccgggttcgagcttgtgttcccccggaagggtgactccttccgccggcatatccggcagcacagcgccctgacccggctgcgccttcggaacgtcttccgcaggttcctgcgggacttccagccgggccgactctcccagcagatggtcatggtcaaatacctagccacactcgagcggctggcaccccgcttcggcacagagcgtgtgcccgtgtgccacctgaggctgctggcccaggccgagggggagccctgctacatccgggacagtggggtggcccctacagaccctggccctgagtctgctgctgggcccccaacccacgaggtgctggtgacaggcactggtggcatccagtggtggccagtagaggaggaggtgaacaaggaggagggttctagtggcagcagtggcaggaacccccaagccagcctgtttgggaagaaggccaaggctcacaaggcagtcggccagccggcagacaggccgcgggagccactgtgggcctacttctgtgacttccgggacatcacccacgtggtgctgaaagagcactgtgtcagcatccaccggcaggacaacaagtgcctggagctgagcttgccttcccgggctgcggcgctgtccttcgtgtcgctggtggacggctatttccgcctgacggccgactccagccactacctgtgccacgaggtggctcccccacggctggtgatgagcatccgggatgggatccacggacccctgctggagccatttgtgcaggccaagctgcggcccgaggacggcctgtacctcattcactggagcaccagccacccctaccgcctgatcctcacagtggcccagcgtagccaggcaccagacggcatgcagagcttgcggctccgaaagttccccattgagcagcaggacggggccttcgtgctggagggctggggccggtccttccccagcgttcgggaacttggggctgccttgcagggctgcttgctgagggccggggatgactgcttctctctgcgtcgctgttgcctgccccaaccaggagaaacctccaatctcatcatcatgcggggggctcgggccagccccaggacactcaacctcagccagctcagcttccaccgggttgaccagaaggagatcacccagctgtcccacttgggccagggcacaaggaccaacgtgtatgagggccgcctgcgagtggagggcagcggggaccctgaggagggcaagatggatgacgaggaccccctcgtgcctggcagggaccgtgggcaggagctacgagtggtgctcaaagtgctggaccctagtcaccatgacatcgccctggccttctacgagacagccagcctcatgagccaggtctcccacacgcacctggccttcgtgcatggcgtctgtgtgcgcggccctgaaaatatcatggtgacagagtacgtggagcacggacccctggatgtgtggctgcggagggagcggggccatgtgcccatggcttggaagatggtggtggcccagcagctggccagcgccctcagctacctggagaacaagaacctggttcatggtaatgtgtgtggccggaacatcctgctggcccggctggggttggcagagggcaccagccccttcatcaagctgagtgatcctggcgtgggcctgggcgccctctccagggaggagcgggtggagaggatcccctggctggcccccgaatgcctaccaggtggggccaacagcctaagcaccgccatggacaagtgggggtttggcgccaccctcctggagatctgctttgacggagaggcccctctgcagagccgcagtccctccgagaaggagcatttctaccagaggcagcaccggctgcccgagccctcctgcccacagctggccacactcaccagccagtgtctgacctatgagccaacccagaggccatcattccgcaccatcctgcgtgacctcacccggctgcagccccacaatcttgctgacgtcttgactgtgaacccggactcaccggcgtcggaccctacggttttccacaagcgctatttgaaaaagatccgagatctgggcgagggtcacttcggcaaggtcagcttgtactgctacgatccgaccaacgacggcactggcgagatggtggcggtgaaagccctcaaggcagactgcggcccccagcaccgctcgggctggaagcaggagattgacattctgcgcacgctctaccacgagcacatcatcaagtacaagggctgctgcgaggaccaaggcgagaagtcgctgcagctggtcatggagtacgtgcccctgggcagcctccgagactacctgccccggcacagcatcgggctggcccagctgctgctcttcgcccagcagatctgcgagggcatggcctatctgcacgcgcagcactacatccaccgagacctagccgcgcgcaacgtgctgctggacaacgacaggctggtcaagatcggggactttggcctagccaaggccgtgcccgaaggccacgagtactaccgcgtgcgcgaggatggggacagccccgtgttctggtatgccccagagtgcctgaaggagtataagttctactatgcgtcagatgtctggtccttcggggtgaccctgtatgagctgctgacgcactgtgactccagccagagcccccccacgaaattccttgagctcataggcattgctcagggtcagatgacagttctgagactcactgagttgctggaacgaggggagaggctgccacggcccgacaaatgtccctgtgaggtctatcatctcatgaagaactgctgggagacagaggcgtcctttcgcccaaccttcgagaacctcatacccattctgaagacagtccatgagaagtaccaaggccaggccccttcagtgttcagcgtgtgctgaggcacaatggcagccctgcctgggaggactggaccaggcagtggctgcagagggagcctcctgctccctgctccaggatgaaaccaagagggggatgtcagcctcacccacaccgtgtgccttactcctgtctagagaccccacctctgtgaacttatttttctttcttggccgtgagcctaaccatgatcttgagggacccaacatttgtaggggcactaatccagcccttaaatcccccagcttccaaacttgaggcccaccatctccaccatctggtaataaactcatgttttctct

SEQ ID NO: 33356 - DNA, 3122 bp, Homo sapiens
  source 1..3122: mol_type = unassigned DNA
aacagcttcaactgtagactctgtctaggccagggccaactctccgtaccagcatcaacatctctctgccctggccccattccagggttcattaagtaaagcctgctaggaagctctgaaccccctgccatggggcaggaactgtgtcctatttagccttatattccctgtgcgtggacaggatagctctatcgggcgcttattcatgtaagagggaactcggggtgcggccctcgccggccccgggccagcggccaggtccccgccctccgcgggatttactcctgtcccgcctcctcggatttagcccaggcagcctgggaggttccgcagtcgccgcttccgccttgaccaggtggagctggagacctggtctctctagggcctaccctgagctcaccatctgaaggagagtgccatcatccttaggaactccttctccagacatgcttcctgaggctggctccctgtggctactgaagctgctccgggacatccagttggcccagttttactggcccatccttgaggagcttaatgtcactcggccagagcacttcgactttgtaaagcctgaggacctggacggcattggcatgggccggcctgcccagcgcagactgtccgaagctctgaaaaggctacgttctgggcctaagtctaagaactgggtctacaagatccttggaggttttgcccctgagcacaaggagcccaccctgccctcggacagcccacggcacctccctgagccagaggggggcctcaagtgtctgatcccagagggtgctgtttgcagaggggagctgctgggttcaggctgcttcggtgtggtgcaccgagggctgtggacgctgcccagtggcaagagtgtcccagtggctgtcaagtccctccgggtaggtcccgaaggcccgatgggcacagaactgggggacttcctgcgagaggtatcggtcatgatgaacttggagcacccacacgtgctgcgtctgcacggccttgtactgggccagcctctgcagatggtgatggagctggcgccactgggctccctgcacgcgcgcctaacggccccggccccgacacccccgctgctcgtggccctgctctgcctcttcctgcggcagctggcgggagccatggcgtacctgggggcccgcgggctggtgcaccgagacctcgctacgcgcaacctactgctggcgtcgccgcgcaccatcaaggtggctgacttcgggctggtgcggcctctgggcggtgcccggggccgctacgtcatgggcgggccccgccctatcccctacgcctggtgtgccccagagagcctgcgccacggagccttctcgtctgcctcggacgtgtggatgtttggggtgacgctgtgggagatgttctccgggggcgaggaaccctgggccggggtcccaccgtacctcatcctgcagcggctggaggacagagcccggctgcctaggcctcccctctgctccagggccctctactccctcgccttgcgctgctgggccccccaccctgccgaccggcctagcttttcccacctggaggggctgctgcaagaggccgggccttcggaagcatgttgtgtgagggatgtcacagaaccaggcgccctgaggatggagactggtgaccccatcacagtcatcgagggcagccccgactccacaatctggaagggccagaatggtcgcaccttcaaagtgggcagcttcccagcctcggcagtgacgctggcagatgcggggggcttgccagccacccgtccagtccacagaggcacccctgcccggggagatcaacacccaggaagcatagatggagacagaaagaaggcaaatctttgggatgcgcccccagcacggggccagaggaggaacatgcccctggagaggatgaaaggcatttccaggagtctggagtcagttctgtccctcggtcctcgtcccacagggggtggttcaagcccccctgaaattcgacaagccagagctgtgccccagggacctccaggcctgcctccacgcccacctttatcctctagctctcctcagcccagccagccctctagggagaggcttccctggcccaaaagaaaacccccacacaatcaccccatgggaatgcctggagcccgtaaagccgctgccctctctggaggcctcttgtccgatcctgagttgcagaggaagattatggaggtggagctgagtgtgcatggggtcacccaccaggagtgccagacagcactaggagccactgggggagatgtggtttctgccatccggaacctcaaggtagatcagctcttccacctgagtagccggtccagagctgactgctggcgcatcctggagcattaccagtgggacctctcagctgccagccgctatgtcctggccaggccctgagctcagcttctgcgggcacagacaccagcatgaaaagcctaggcccctgagggcctggccacatgggaccaagcggaaccagaacaaggtcccgacaggggtagacgttccacctggggagatcccacctgccgtaggcacatggaggaggagcccagagttgggcactggcaaatgtctcctccctcccatgctccttggcttctgaaggctgaagctcctttggctgggccaagaaggatctagtctgcccactacattctcaaacaagaggacttggaagaaaagagctgctatacatcatatgcagaggaagcttctacgcgctagagaggatcaaggggccacactggaccatgtgaacagccatcctgaactgccatcagctaccacactggactctgcagggcagccatcctggatgatggaagccaccatattgacttggggtataggcccaaactgccttcgtttggtccagggccatcgtgggtgatgacgattgctctcttgcactcaaggacatttgatgctggtagtatggattatgagatggactagcccctgccccagcccagctctcacattcccctttgttttttcccataccaactgcttctaccctcccctattacatacatctttcaatgtccaaaaagttacaaagtttatatgaatgtaacatataaa

SEQ ID NO: 33357 - DNA, 2835 bp, Homo sapiens
  source 1..2835: mol_type = unassigned DNA
gtcccgcctcctcggatttagcccaggcagcctgggaggttccgcagtcgccgcttccgccttgaccaggtggagctggagacctggtctctctagggcctaccctgagctcaccatctgaaggagagtgccatcatccttaggaactccttctccagacatgcttcctgaggctggctccctgtggctactgaagctgctccgggacatccagttggcccagttttactggcccatccttgaggagcttaatgtcactcggccagagcacttcgactttgtaaagcctgaggacctggacggcattggcatgggccggcctgcccagcgcagactgtccgaagctctgaaaaggctacgttctgggcctaagtctaagaactgggtctacaagatccttggaggttttgcccctgagcacaaggagcccaccctgccctcggacagcccacggcacctccctgagccagaggggggcctcaagtgtctgatcccagagggtgctgtttgcagaggggagctgctgggttcaggctgcttcggtgtggtgcaccgagggctgtggacgctgcccagtggcaagagtgtcccagtggctgtcaagtccctccgggtaggtcccgaaggcccgatgggcacagaactgggggacttcctgcgagaggtatcggtcatgatgaacttggagcacccacacgtgctgcgtctgcacggccttgtactgggccagcctctgcagatggtgatggagctggcgccactgggctccctgcacgcgcgcctaacggccccggccccgacacccccgctgctcgtggccctgctctgcctcttcctgcggcagctggcgggagccatggcgtacctgggggcccgcgggctggtgcaccgagacctcgctacgcgcaacctactgctggcgtcgccgcgcaccatcaaggtggctgacttcgggctggtgcggcctctgggcggtgcccggggccgctacgtcatgggcgggccccgccctatcccctacgcctggtgtgccccagagagcctgcgccacggagccttctcgtctgcctcggacgtgtggatgtttggggtgacgctgtgggagatgttctccgggggcgaggaaccctgggccggggtcccaccgtacctcatcctgcagcggctggaggacagagcccggctgcctaggcctcccctctgctccagggccctctactccctcgccttgcgctgctgggccccccaccctgccgaccggcctagcttttcccacctggaggggctgctgcaagaggccgggccttcggaagcatgttgtgtgagggatgtcacagaaccaggcgccctgaggatggagactggtgaccccatcacagtcatcgagggcagccccgactccacaatctggaagggccagaatggtcgcaccttcaaagtgggcagcttcccagcctcggcagtgacgctggcagatgcggggggcttgccagccacccgtccagtccacagaggcacccctgcccggggagatcaacacccaggaagcatagatggagacagaaagaaggcaaatctttgggatgcgcccccagcacggggccagaggaggaacatgcccctggagaggatgaaaggcatttccaggagtctggagtcagttctgtccctcggtcctcgtcccacagggggtggttcaagcccccctgaaattcgacaagccagagctgtgccccagggacctccaggcctgcctccacgcccacctttatcctctagctctcctcagcccagccagccctctagggagaggcttccctggcccaaaagaaaacccccacacaatcaccccatgggaatgcctggagcccgtaaagccgctgccctctctggaggcctcttgtccgatcctgagttgcagaggaagattatggaggtggagctgagtgtgcatggggtcacccaccaggagtgccagacagcactaggagccactgggggagatgtggtttctgccatccggaacctcaaggtagatcagctcttccacctgagtagccggtccagagctgactgctggcgcatcctggagcattaccagtgggacctctcagctgccagccgctatgtcctggccaggccctgagctcagcttctgcgggcacagacaccagcatgaaaagcctaggcccctgagggcctggccacatgggaccaagcggaaccagaacaaggtcccgacaggggtagacgttccacctggggagatcccacctgccgtaggcacatggaggaggagcccagagttgggcactggcaaatgtctcctccctcccatgctccttggcttctgaaggctgaagctcctttggctgggccaagaaggatctagtctgcccactacattctcaaacaagaggacttggaagaaaagagctgctatacatcatatgcagaggaagcttctacgcgctagagaggatcaaggggccacactggaccatgtgaacagccatcctgaactgccatcagctaccacactggactctgcagggcagccatcctggatgatggaagccaccatattgacttggggtataggcccaaactgccttcgtttggtccagggccatcgtgggtgatgacgattgctctcttgcactcaaggacatttgatgctggtagtatggattatgagatggactagcccctgccccagcccagctctcacattcccctttgttttttcccataccaactgcttctaccctcccctattacatacatctttcaatgtccaaaaagttacaaagtttatatgaatgtaacatataa

SEQ ID NO: 33358 - DNA, 1921 bp, Homo sapiens
  source 1..1921: mol_type = unassigned DNA
ggagaggaggaacggagctgggacgggctgcaggagggaatggccgcaggccggcaggaggaggggcgcgaccacccggccgccggccgatggcggatgaggctatgggggctgagacgcagtagcggccctgcacttctggaggatgctcgaggcccggccccccaggacgcagggcagtgacgctgccggtgccgctgcggggcgggggctgcgggcgctgcttctctccctgaccgcagccgctgggatttggggctccatgggggagagatctgcttaccagcgcctggctgggggcgaggagggaccgcagaggctgggaggcggcagaatgcagccagaggagggcacaggctggctgctggagctgctgtccgaggtgcagctgcaacagtacttcctgcggctccgagatgacctcaacgtcacccgcctgtcccactttgagtacgtcaagaatgaggacctggagaagatcggcatgggtcggcctggccagcggcggctgtgggaggctgtgaagaggaggaaggccttgtgcaaacgcaagtcgtggatgagtaaggtgttcagtggaaagcgactggaggctgagttcccacctcatcactctcagagcaccttccggaagacctcgcccgcccctgggggcccagcaggggaggggcccctgcagagcctcacctgcctcattggggagaaggacctgcgcctcctggagaagctgggtgatggttcctttggcgtggtgcgcaggggcgagtgggacgcgccctcagggaagacggtgagtgtggctgtgaagtgcctgaagcccgatgtcctgagccagccagaagccatggacgacttcatccgggaggtcaatgccatgcactcgctcgaccaccgaaacctcatccgcctctacggggtggtgctcacgccgcccatgaagatggtgacagagctggcacctctgggatcgttgttggaccggctacgtaagcaccagggccacttcctcctggggactctgagccgctacgctgtgcaggtggctgagggcatgggctacctggagtccaagcgctttattcaccgtgacctggctgcccgcaatctgctgttggctacccgcgacctggtcaagatcggggactttgggctgatgcgagcactacctcagaatgacgaccattacgtcatgcaggaacatcgcaaggtgcccttcgcctggtgtgcccccgagagcctgaagacacgcaccttctcccatgccagcgacacctggatgttcggggtgacactgtgggaaatgttcacctacggccaggagccctggatcggcctcaacggcagtcagatcctgcataagatcgacaaggagggggagcggctgccccggcccgaggactgtccccaggacatctacaacgtcatggtccagtgctgggctcacaagccagaggacagacccacgtttgtggccctgcgggacttcctgctggaggcccagcccacagacatgcgggcccttcaggactttgaggaaccggacaagctgcacatccagatgaatgatgtcatcaccgtcatcgagggaagggccgagaactactggtggcgtggccagaacacacggacgctgtgtgtggggcccttccctcgcaacgtggtgacctccgtggccggcctgtcggcccaggacatcagccagcccctgcagaacagcttcatccacacagggcatggcgacagtgacccccgccactgctggggcttcccggacaggattgacgagtgtcctttctctgccttctctccaggacaccccccagctgagacgtgcggtcaggttctgtggactgggaggcgggaggcctgtgcttcagacccaagactacacccggtttcctccaggacgaaggggctctga

SEQ ID NO: 33359 - DNA, 4552 bp, Homo sapiens
  source 1..4552: mol_type = unassigned DNA
gggagcccgcggaggctgctgcagcagcccgaaccggcgtccgagtccggggaaggcccccgcgagcgcagggaggggccggaaagttccggcgaactgggggagcggcagtgggagagcgtcgggcgggaggcggtggtcctgggagcggccccggcgccccgaagccgccccgagctggtggggagggcccggccggtggggccccgggggcctgcgggggaggggcgcctgggggtgcaagaggcgaattggctgcccggggtgcaggagggacaggtggtgcgggctgtccaggaaacctacctgaacgggaaggagccccaggagggagagggacccggcgaggggctcaggacccggaggcgccggcggaggaggaggtggtgactggcaggcccgggccccacggtacctccggggctgaaggggacgcaggatgtaggggcatggggagtcgggcgcagaagagtgcggggaaccgctgagctctgggagccactgcctgagggcaggccgcggccggcgggaacctcttctgccgtctcagcctgggcgtcgctgaagctgtgtctgcggggaggcagcggaaggcggcagaggctgggaggcggcagaatgcagccagaggagggcacaggctggctgctggagctgctgtccgaggtgcagctgcaacagtacttcctgcggctccgagatgacctcaacgtcacccgcctgtcccactttgagtacgtcaagaatgaggacctggagaagatcggcatgggtcggcctggccagcggcggctgtgggaggctgtgaagaggaggaaggccttgtgcaaacgcaagtcgtggatgagtaaggtgttcagtggaaagcgactggaggctgagttcccacctcatcactctcagagcaccttccggaagacctcgcccgcccctgggggcccagcaggggaggggcccctgcagagcctcacctgcctcattggggagaaggacctgcgcctcctggagaagctgggtgatggttcctttggcgtggtgcgcaggggcgagtgggacgcgccctcagggaagacggtgagtgtggctgtgaagtgcctgaagcccgatgtcctgagccagccagaagccatggacgacttcatccgggaggtcaatgccatgcactcgctcgaccaccgaaacctcatccgcctctacggggtggtgctcacgccgcccatgaagatggtgacagagctggcacctctgggatcgttgttggaccggctacgtaagcaccagggccacttcctcctggggactctgagccgctacgctgtgcaggtggctgagggcatgggctacctggagtccaagcgctttattcaccgtgacctggctgcccgcaatctgctgttggctacccgcgacctggtcaagatcggggactttgggctgatgcgagcactacctcagaatgacgaccattacgtcatgcaggaacatcgcaaggtgcccttcgcctggtgtgcccccgagagcctgaagacacgcaccttctcccatgccagcgacacctggatgttcggggtgacactgtgggaaatgttcacctacggccaggagccctggatcggcctcaacggcagtcagatcctgcataagatcgacaaggagggggagcggctgccccggcccgaggactgtccccaggacatctacaacgtcatggtccagtgctgggctcacaagccagaggacagacccacgtttgtggccctgcgggacttcctgctggaggcccagcccacagacatgcgggcccttcaggactttgaggaaccggacaagctgcacatccagatgaatgatgtcatcaccgtcatcgagggaagggccgagaactactggtggcgtggccagaacacacggacgctgtgtgtggggcccttccctcgcaacgtggtgacctccgtggccggcctgtcggcccaggacatcagccagcccctgcagaacagcttcatccacacagggcatggcgacagtgacccccgccactgctggggcttcccggacaggattgacgaactgtatctgggaaaccccatggacccccccgacctcctgagcgtggaactgagcacctcccggcccccccagcatctaggaggggtgaaaaaaccaacctatgaccctgtgagcgaggaccaagaccccttgtccagcgacttcaagaggctgggcctgcggaagccaggcctgccccgagggctgtggctggcgaagccctcggcgcgggtgccgggcaccaaggccagccgaggcagcggggctgaggtcacgctcatcgacttcggtgaggagcccgtggtcccggccctacggccctgcgcgccctccctggcgcagctggccatggacgcctgctccctgctggacgagaccccgcctcagagccccacgcgggcactgccccggcccctgcaccccacgcctgtggtggactgggacgcacgcccgctgccccccccgcccgcctatgacgacgtggcccaggatgaggatgactttgagatctgctccatcaacagcaccctcgtgggcgcgggggtccctgccgggcccagccagggccagaccaactacgcctttgtgcctgagcaggcgcggccgccccctcccctggaggacaacctgttcctcccgccccagggtgggggcaagccgcccagctccgcacagaccgcagagatcttccaggcgctacagcaggagtgcatgaggcaactgcaggctccggccggctccccggccccctctcccagcccggggggtgacgacaagccccaggtgcctcctcgggtacccatcccccctcggcccacgcgcccacacgtccagctgtctccagcccccccgggcgaggaggagaccagccagtggcctggacctgcttcccctccccgggtgcctccgcgggagcccctgtcccctcaaggctcgaggacacccagccccctggtaccacctggcagctccccgctgccaccccggctctcaagctcacctgggaagaccatgcccaccacccagagctttgcctcagaccccaagtacgccaccccccaggtgatccaggcccctggcccgcgggctggtccctgcatcctgcccatcgtccgggatggcaagaaggtcagcagcacccactattacttgctgcccgagcgaccatcctacctggagcgctaccagcgcttcctgcgtgaggcccagagccccgaggagcctacccccctgcctgtgcctctgctgctgcccccacccagcaccccagcccccgccgcccccacggccaccgtgcggccgatgccccaggctgccttggaccccaaggccaacttctccaccaacaacagcaacccaggggcccggccaccacccccgagggccactgctcggctgccacagaggggctgccctggcgatgggccagaggcgggccggccagcagacaagatccagatggccatggtgcatggggtgaccacagaggagtgccaggcggccctgcagtgccacggctggagcgtgcagagggctgcccagtatctgaaggtggagcagctcttcgggctgggtctgcggcccagaggggagtgccacaaagtgctggagatgttcgactggaacctggagcaggccggctgccaccttctgggctcctggggccctgcccaccacaagcgctgagatgcgtctggagagccagagggcctgcctgaaggaatcacctgagcctgtccgtccaccaggagtggggagatgcccccatccagtcctggaggacccgctgctcctgctgctcccggggatggagcaaggccaaggctgcgggaggctgggagccctgccctgcccatccctcctgcaccagcgctgtccctgcacactttggttcagtcccggtgcccctgccaagatgtggaaggggccgggtgaagacaggcttgagggctgccccagcaggctctgggtatgacctgcctctggccctggtcctgggcggggcctgtgggtggagtagtacccccaggccctgccctgggtgacagactgggaggaaaccaggctggacctgggcaggcgggatgtgttggccacagggagaggcggaccggcacccggtgggacctcctaggactgggccttcttccagggggcccctggcagcagctggggtgtcgggcagaatgtgacttgtggccttaccatggacttgaatgggacttggctggcctcaggatcttgtgcctggaaatagcctgaggtggctcaggaagcggagaaagggtgccagaccattctctggcggggaccagggcccaaggccccagggctggaaggagaccaaggggcagccgccctggagggacatcagtgcttcctcttccacccaattcccccacgcggttccatgttttcccaccagcctgttggcgaagttgctgctccggcattcagtacctgcttcttccagagaaataaagttagtttctattttatgtta

SEQ ID NO: 33360 - DNA, 4223 bp, Homo sapiens
  source 1..4223: mol_type = unassigned DNA
ggagaggaggaacggagctgggacgggctgcaggagggaatggccgcaggccggcaggaggaggggcgcgaccacccggccgccggccgatggcggatgaggctatgggggctgagacgcagtagcggccctgcacttctggaggatgctcgaggcccggccccccaggacgcagggcagtgacgctgccggtgccgctgcggggcgggggctgcgggcgctgcttctctccctgaccgcagccgctgggatttggggctccatgggggagagatctgcttaccagcgcctggctgggggcgaggagggaccgcagaggctgggaggcggcagaatgcagccagaggagggcacaggctggctgctggagctgctgtccgaggtgcagctgcaacagtacttcctgcggctccgagatgacctcaacgtcacccgcctgtcccactttgagtacgtcaagaatgaggacctggagaagatcggcatgggtcggcctggccagcggcggctgtgggaggctgtgaagaggaggaaggccttgtgcaaacgcaagtcgtggatgagtaaggtgttcagtggaaagcgactggaggctgagttcccacctcatcactctcagagcaccttccggaagacctcgcccgcccctgggggcccagcaggggaggggcccctgcagagcctcacctgcctcattggggagaaggacctgcgcctcctggagaagctgggtgatggttcctttggcgtggtgcgcaggggcgagtgggacgcgccctcagggaagacggtgagtgtggctgtgaagtgcctgaagcccgatgtcctgagccagccagaagccatggacgacttcatccgggaggtcaatgccatgcactcgctcgaccaccgaaacctcatccgcctctacggggtggtgctcacgccgcccatgaagatggtgacagagctggcacctctgggatcgttgttggaccggctacgtaagcaccagggccacttcctcctggggactctgagccgctacgctgtgcaggtggctgagggcatgggctacctggagtccaagcgctttattcaccgtgacctggctgcccgcaatctgctgttggctacccgcgacctggtcaagatcggggactttgggctgatgcgagcactacctcagaatgacgaccattacgtcatgcaggaacatcgcaaggtgcccttcgcctggtgtgcccccgagagcctgaagacacgcaccttctcccatgccagcgacacctggatgttcggggtgacactgtgggaaatgttcacctacggccaggagccctggatcggcctcaacggcagtcagatcctgcataagatcgacaaggagggggagcggctgccccggcccgaggactgtccccaggacatctacaacgtcatggtccagtgctgggctcacaagccagaggacagacccacgtttgtggccctgcgggacttcctgctggaggcccagcccacagacatgcgggcccttcaggactttgaggaaccggacaagctgcacatccagatgaatgatgtcatcaccgtcatcgagggaagggccgagaactactggtggcgtggccagaacacacggacgctgtgtgtggggcccttccctcgcaacgtggtgacctccgtggccggcctgtcggcccaggacatcagccagcccctgcagaacagcttcatccacacagggcatggcgacagtgacccccgccactgctggggcttcccggacaggattgacgaactgtatctgggaaaccccatggacccccccgacctcctgagcgtggaactgagcacctcccggcccccccagcatctaggaggggtgaaaagggagcctccacctcgcccacctcagcctgccttcttcactcagaaaccaacctatgaccctgtgagcgaggaccaagaccccttgtccagcgacttcaagaggctgggcctgcggaagccaggcctgccccgagggctgtggctggcgaagccctcggcgcgggtgccgggcaccaaggccagccgaggcagcggggctgaggtcacgctcatcgacttcggtgaggagcccgtggtcccggccctacggccctgcgcgccctccctggcgcagctggccatggacgcctgctccctgctggacgagaccccgcctcagagccccacgcgggcactgccccggcccctgcaccccacgcctgtggtggactgggacgcacgcccgctgccccccccgcccgcctatgacgacgtggcccaggatgaggatgactttgagatctgctccatcaacagcaccctcgtgggcgcgggggtccctgccgggcccagccagggccagaccaactacgcctttgtgcctgagcaggcgcggccgccccctcccctggaggacaacctgttcctcccgccccagggtgggggcaagccgcccagctccgcacagaccgcagagatcttccaggcgctacagcaggagtgcatgaggcaactgcaggctccggccggctccccggccccctctcccagcccggggggtgacgacaagccccaggtgcctcctcgggtacccatcccccctcggcccacgcgcccacacgtccagctgtctccagcccccccgggcgaggaggagaccagccagtggcctggacctgcttcccctccccgggtgcctccgcgggagcccctgtcccctcaaggctcgaggacacccagccccctggtaccacctggcagctccccgctgccaccccggctctcaagctcacctgggaagaccatgcccaccacccagagctttgcctcagaccccaagtacgccaccccccaggtgatccaggcccctggcccgcgggctggtccctgcatcctgcccatcgtccgggatggcaagaaggtcagcagcacccactattacttgctgcccgagcgaccatcctacctggagcgctaccagcgcttcctgcgtgaggcccagagccccgaggagcctacccccctgcctgtgcctctgctgctgcccccacccagcaccccagcccccgccgcccccacggccaccgtgcggccgatgccccaggctgccttggaccccaaggccaacttctccaccaacaacagcaacccaggggcccggccaccacccccgagggccactgctcggctgccacagaggggctgccctggcgatgggccagaggcgggccggccagcagacaagatccagatggtggagcagctcttcgggctgggtctgcggcccagaggggagtgccacaaagtgctggagatgttcgactggaacctggagcaggccggctgccaccttctgggctcctggggccctgcccaccacaagcgctgagatgcgtctggagagccagagggcctgcctgaaggaatcacctgagcctgtccgtccaccaggagtggggagatgcccccatccagtcctggaggacccgctgctcctgctgctcccggggatggagcaaggccaaggctgcgggaggctgggagccctgccctgcccatccctcctgcaccagcgctgtccctgcacactttggttcagtcccggtgcccctgccaagatgtggaaggggccgggtgaagacaggcttgagggctgccccagcaggctctgggtatgacctgcctctggccctggtcctgggcggggcctgtgggtggagtagtacccccaggccctgccctgggtgacagactgggaggaaaccaggctggacctgggcaggcgggatgtgttggccacagggagaggcggaccggcacccggtgggacctcctaggactgggccttcttccagggggcccctggcagcagctggggtgtcgggcagaatgtgacttgtggccttaccatggacttgaatgggacttggctggcctcaggatcttgtgcctggaaatagcctgaggtggctcaggaagcggagaaagggtgccagaccattctctggcggggaccagggcccaaggccccagggctggaaggagaccaaggggcagccgccctggagggacatcagtgcttcctcttccacccaattcccccacgcggttccatgttttcccaccagcctgttggcgaagttgctgctccggcattcagtacctgcttcttccagagaaataaagttagtttctattttatgtta

SEQ ID NO: 33361 - DNA, 4267 bp, Homo sapiens
  source 1..4267: mol_type = unassigned DNA
ggagaggaggaacggagctgggacgggctgcaggagggaatggccgcaggccggcaggaggaggggcgcgaccacccggccgccggccgatggcggatgaggctatgggggctgagacgcagtagcggccctgcacttctggaggatgctcgaggcccggccccccaggacgcagggcagtgacgctgccggtgccgctgcggggcgggggctgcgggcgctgcttctctccctgaccgcagccgctgggatttggggctccatgggggagagatctgcttaccagcgcctggctgggggcgaggagggaccgcagaggctgggaggcggcagaatgcagccagaggagggcacaggctggctgctggagctgctgtccgaggtgcagctgcaacagtacttcctgcggctccgagatgacctcaacgtcacccgcctgtcccactttgagtacgtcaagaatgaggacctggagaagatcggcatgggtcggcctggccagcggcggctgtgggaggctgtgaagaggaggaaggccttgtgcaaacgcaagtcgtggatgagtaaggtgttcagtggaaagcgactggaggctgagttcccacctcatcactctcagagcaccttccggaagacctcgcccgcccctgggggcccagcaggggaggggcccctgcagagcctcacctgcctcattggggagaaggacctgcgcctcctggagaagctgggtgatggttcctttggcgtggtgcgcaggggcgagtgggacgcgccctcagggaagacggtgagtgtggctgtgaagtgcctgaagcccgatgtcctgagccagccagaagccatggacgacttcatccgggaggtcaatgccatgcactcgctcgaccaccgaaacctcatccgcctctacggggtggtgctcacgccgcccatgaagatggtgacagagctggcacctctgggatcgttgttggaccggctacgtaagcaccagggccacttcctcctggggactctgagccgctacgctgtgcaggtggctgagggcatgggctacctggagtccaagcgctttattcaccgtgacctggctgcccgcaatctgctgttggctacccgcgacctggtcaagatcggggactttgggctgatgcgagcactacctcagaatgacgaccattacgtcatgcaggaacatcgcaaggtgcccttcgcctggtgtgcccccgagagcctgaagacacgcaccttctcccatgccagcgacacctggatgttcggggtgacactgtgggaaatgttcacctacggccaggagccctggatcggcctcaacggcagtcagatcctgcataagatcgacaaggagggggagcggctgccccggcccgaggactgtccccaggacatctacaacgtcatggtccagtgctgggctcacaagccagaggacagacccacgtttgtggccctgcgggacttcctgctggaggcccagcccacagacatgcgggcccttcaggactttgaggaaccggacaagctgcacatccagatgaatgatgtcatcaccgtcatcgagggaagggccgagaactactggtggcgtggccagaacacacggacgctgtgtgtggggcccttccctcgcaacgtggtgacctccgtggccggcctgtcggcccaggacatcagccagcccctgcagaacagcttcatccacacagggcatggcgacagtgacccccgccactgctggggcttcccggacaggattgacgaactgtatctgggaaaccccatggacccccccgacctcctgagcgtggaactgagcacctcccggcccccccagcatctaggaggggtgaaaaaaccaacctatgaccctgtgagcgaggaccaagaccccttgtccagcgacttcaagaggctgggcctgcggaagccaggcctgccccgagggctgtggctggcgaagccctcggcgcgggtgccgggcaccaaggccagccgaggcagcggggctgaggtcacgctcatcgacttcggtgaggagcccgtggtcccggccctacggccctgcgcgccctccctggcgcagctggccatggacgcctgctccctgctggacgagaccccgcctcagagccccacgcgggcactgccccggcccctgcaccccacgcctgtggtggactgggacgcacgcccgctgccccccccgcccgcctatgacgacgtggcccaggatgaggatgactttgagatctgctccatcaacagcaccctcgtgggcgcgggggtccctgccgggcccagccagggccagaccaactacgcctttgtgcctgagcaggcgcggccgccccctcccctggaggacaacctgttcctcccgccccagggtgggggcaagccgcccagctccgcacagaccgcagagatcttccaggcgctacagcaggagtgcatgaggcaactgcaggctccggccggctccccggccccctctcccagcccggggggtgacgacaagccccaggtgcctcctcgggtacccatcccccctcggcccacgcgcccacacgtccagctgtctccagcccccccgggcgaggaggagaccagccagtggcctggacctgcttcccctccccgggtgcctccgcgggagcccctgtcccctcaaggctcgaggacacccagccccctggtaccacctggcagctccccgctgccaccccggctctcaagctcacctgggaagaccatgcccaccacccagagctttgcctcagaccccaagtacgccaccccccaggtgatccaggcccctggcccgcgggctggtccctgcatcctgcccatcgtccgggatggcaagaaggtcagcagcacccactattacttgctgcccgagcgaccatcctacctggagcgctaccagcgcttcctgcgtgaggcccagagccccgaggagcctacccccctgcctgtgcctctgctgctgcccccacccagcaccccagcccccgccgcccccacggccaccgtgcggccgatgccccaggctgccttggaccccaaggccaacttctccaccaacaacagcaacccaggggcccggccaccacccccgagggccactgctcggctgccacagaggggctgccctggcgatgggccagaggcgggccggccagcagacaagatccagatggccatggtgcatggggtgaccacagaggagtgccaggcggccctgcagtgccacggctggagcgtgcagagggctgcccagtatctgaaggtggagcagctcttcgggctgggtctgcggcccagaggggagtgccacaaagtgctggagatgttcgactggaacctggagcaggccggctgccaccttctgggctcctggggccctgcccaccacaagcgctgagatgcgtctggagagccagagggcctgcctgaaggaatcacctgagcctgtccgtccaccaggagtggggagatgcccccatccagtcctggaggacccgctgctcctgctgctcccggggatggagcaaggccaaggctgcgggaggctgggagccctgccctgcccatccctcctgcaccagcgctgtccctgcacactttggttcagtcccggtgcccctgccaagatgtggaaggggccgggtgaagacaggcttgagggctgccccagcaggctctgggtatgacctgcctctggccctggtcctgggcggggcctgtgggtggagtagtacccccaggccctgccctgggtgacagactgggaggaaaccaggctggacctgggcaggcgggatgtgttggccacagggagaggcggaccggcacccggtgggacctcctaggactgggccttcttccagggggcccctggcagcagctggggtgtcgggcagaatgtgacttgtggccttaccatggacttgaatgggacttggctggcctcaggatcttgtgcctggaaatagcctgaggtggctcaggaagcggagaaagggtgccagaccattctctggcggggaccagggcccaaggccccagggctggaaggagaccaaggggcagccgccctggagggacatcagtgcttcctcttccacccaattcccccacgcggttccatgttttcccaccagcctgttggcgaagttgctgctccggcattcagtacctgcttcttccagagaaataaagttagtttctattttatgtt

SEQ ID NO: 33362 - DNA, 580 bp, Homo sapiens
  source 1..580: mol_type = unassigned DNA
gtcgggctgttttcctgggcgaggagaaagggggccgggccgggccgggcgcggtggctcacgcctgtcatctcagcactttgggaggccgaggcgggcagatcacctgagacgaggacgctgagctggattactgggccagttacaggtcttgttcttactggacatccaagcatcccggagttccttcccgtcctcccacatgcatcccctgtgcagagctgcgctgttgctgggtcagggagcatggagtgcacagctgaacagagaggctgggaggcggcagaatgcagccagaggagggcacaggctggctgctggagctgctgtccgaggtgcagctgcaacagtacttcctgcggctccgagatgacctcaacgtcacccgcctgtcccactttgagtacgtcaagaatgaggacctggagaagatcggcatgggtcggcctggccagcggcggctgtgggaggctgtgaagaggaggaaggccttgtgcaaacgcaagtcgtggatgagtaaggtgttcagtggaaagcgactggaggctgagttcccacctcatcactctcagagcacctt

SEQ ID NO: 33363 - DNA, 3696 bp, Homo sapiens
  source 1..3696: mol_type = unassigned DNA
gttggttctgtgcgcctcagagttggagcacacagctgtattaaaaaggcaaatcgaaggccgggcgcggtgactcacgcctgtcatcctagcactttgggaggccgaggcggctgaatcacttgaggttaggagtttgagatcagcccgggcaacatggtgaaaccccgtctctacaaaaatagaaaaattagccgagcgtgatggtggatgcctgtaatcctagctcctcgggaggctaaggagtataatgtctcaggaaggcgattatgggaggtggaccatatctagtagtgatgaaagtgaggaagaaaagccaaaaccagacaagccatctacctcttctcttctctgtgccaggcaaggagcagcaaatgagcccaggtacacctgttccgaggcccagaaagctgcacacaagaggaaaatatcacctgtgaaattcagcaatacagattcagttttacctcccaaaaggcagaaaagcggttcccaggaggacctcggctggtgtctgtccagcagtgatgatgagctgcaaccagaaatgccgcagaagcaggctgagaaagtggtgatcaaaaaggagaaagacatctctgctcccaatgacggcactgcccaaagaactgaaaatcatggcgctcccgcctgccacaggctcaaagaggaggaagacgagtatgagacatcaggggagggccaggacatttgggacatgctggataaagggaaccccttccagttttacctcactagagtctctggagttaagccaaagtataactctggagccctccacatcaaggatattttatctcctttatttgggacgcttgtttcttcagctcagtttaactactgctttgacgtggactggctcgtaaaacagtatccaccagagttcaggaagaagccaatcctgcttgtgcatggtgataagcgagaggctaaggctcacctccatgcccaggccaagccttacgagaacatctctctctgccaggcaaagttggatattgcgtttggaacacaccacacgaaaatgatgctgctgctctatgaagaaggcctccgggttgtcatacacacctccaacctcatccatgctgactggcaccagaaaactcaaggaatatggttgagccccttatacccacgaattgctgatggaacccacaaatctggagagtcgccaacacattttaaagctgatctcatcagttacttgatggcttataatgccccttctctcaaggagtggatagatgtcattcacaagcacgatctctctgaaacaaatgtttatcttattggttcaaccccaggacgctttcaaggaagtcaaaaagataattggggacattttagacttaagaagcttctgaaagaccatgcctcatccatgcctaacgcagagtcctggcctgtcgtaggtcagttttcaagcgttggctccttgggagccgatgaatcaaagtggttatgttctgagtttaaagagagcatgctgacactggggaaggaaagcaagactccaggaaaaagctctgttcctctttacttgatctatccttctgtggaaaatgtgcggaccagtttagaaggatatcctgctgggggctctcttccctatagcatccagacagctgaaaaacagaattggctgcattcctattttcacaaatggtcagctgagacttctggccgcagcaatgccatgccacatattaagacatatatgaggccttctccagacttcagtaaaattgcttggttccttgtcacaagcgcaaatctgtccaaggctgcctggggagcattggagaagaatggcacccagctgatgatccgctcctacgagctcggggtccttttcctcccttcagcatttggtctagacagtttcaaagtgaaacagaagttcttcgctggcagccaggagccaatggccacctttcctgtgccatatgatttgcctccagaactgtatggaagtaaagatcggccatggatatggaacattccttatgtcaaagcaccggatacgcatgggaacatgtgggtgccctcctgagaatcttgaggcactgtgaaatttaagtgtaagacattgagccacaaacatggaatctcttctttgtactggatgtccacttcccttaaagtcttatttgcacccttacaaaatctttccaaaggtcactcttatgaatggatgttggttatacttttaatggacattaacattcctaataaagtattagtttcttaattcacttttatatgttttggaaagaaaattagtgaacttctctatgttaaaaatacgtactgcttgagtatcccctgtctgaaatgcttgggaccagaagtgtttcagcttttggatttttttgaattttggaatatttgcatagcataatgagatatcttgggaatgggacccaaatctaaacacaaaattcatttatgtttcatatacaccttatatacaataacctaaaggtgattttatatgatattttgagtaattttatgcatgaaacaaagttttgacaggcttttgaccgtgattcatcacatgagttcaggcatggaaattttcatttggagcatcatgtcagcactcaaaaagttctggatcttggagcagttcagattttcagattagggatgctcaaatctatatagatataaaattatcctcacagtaacatagaatctcttggtgctgtcagctgttgggaattgaagattgactttgtgcttccaccctccatccagaaaggcacccttcattccaccagaactttacccaggaagaacacgatcatttcctttttcaccgatgccctctctcagctttctgagtacgtctcttggggtcgctggaggtgatcctaggatctgtctctgagaccaatgtgctgtttcagccccctgcagctaagaattgtattgactgtcctcacagcggcttttcatagctttcagcttcagctttacgaggcttctcctctctccctggcaccctgctggctgcctcactgcttacagacaggtcccaccaaacccaaacacctgcctagggtaaatgggtctctcttctatccccagaaactttcagaggaagcagctcatagaaacatacaaaagcacacaagtattttgggaaaaaatcctaaaaggtgacttaatttgatgccttaaattcacaagtgaggaagctaaggcctagaaggttaaggatgtccccagggtcacacagtgagcggggctcagagcttgagtgtctttgtgctttgtgtacattgtgttctccctagggtgctttagaccctgtttgttttcttctgcatgaggctgatttccagtttgtcatcaacctctttatcttataatttaggatagagttgaacgttagtcttgaaagattttctaaagtagtctttcaaactgttcctcagaggcctaggattttccaaaagtaccttaggaaccttgtaggctgcagtgggggtgtggcgatagagcaggaggcagggagacagggctgcagggcctcccaccttccaacagacaggctctgctgtatctgttgtacatactgggattctgtaaaggacattatctggggtgttgtatgtatttttgtgtgttctgctttttttaaataaacttgaaaagctactg

SEQ ID NO: 33364 - DNA, 2210 bp, Homo sapiens
  source 1..2210: mol_type = unassigned DNA
gttctgtgcgcctcagagttggagcacacagctgtattaaaaaggcaaatcgaaggccgggcgcggtgactcacgcctgtcatcctagcactttgggaggccgaggcggctgaatcacttgaggttaggagtttgagatcagcccgggcaacatggtgaaaccccgtctctacaaaaatagaaaaattagccgagcgtgatggtggatgcctgtaatcctagctcctcgggaggctaaggagtataatgtctcaggaaggcgattatgggaggtggaccatatctagtagtgatgaaagtgaggaagaaaagccaaaaccagacaagccatctacctcttctcttctctgtgccaggcaaggagcagcaaatgagcccaggtacacctgttccgaggcccagaaagctgcacacaagaggaaaatatcacctgtgaaattcagcaatacagattcagttttacctcccaaaaggcagaaaagcggttcccaggaggacctcggctggtgtctgtccagcagtgatgatgagctgcaaccagaaatgccgcagaagcaggctgagaaagtggtgatcaaaaaggagaaagacatctctgctcccaatgacggcactgcccaaagaactgaaaatcatggcgctcccgcctgccacaggctcaaagaggaggaagacgagtatgagacatcaggggagggccaggacatttgggacatgctggataaagggaaccccttccagttttacctcactagagtctctggagttaagccaaagtataactctggagccctccacatcaaggatattttatctcctttatttgggacgcttgtttcttcagctcagtttaactactgctttgacgtggactggctcgtaaaacagtatccaccagagttcaggaagaagccaatcctgcttgtgcatggtgataagcgagaggctaaggctcacctccatgcccaggccaagccttacgagaacatctctctctgccaggaaaatgatgctgctgctctatgaagaaggcctccgggttgtcatacacacctccaacctcatccatgctgactggcaccagaaaactcaaggaatatggttgagccccttatacccacgaattgctgatggaacccacaaatctggagagtcgccaacacattttaaagctgatctcatcagttacttgatggcttataatgccccttctctcaaggagtggatagatgtcattcacaagcacgatctctctgaaacaaatgtttatcttattggttcaaccccaggacgctttcaaggaagtcaaaaagataattggggacattttagacttaagaagcttctgaaagaccatgcctcatccatgcctaacgcagagtcctggcctgtcgtaggtcagttttcaagcgttggctccttgggagccgatgaatcaaagtggttatgttctgagtttaaagagagcatgctgacactggggaaggaaagcaagactccaggaaaaagctctgttcctctttacttgatctatccttctgtggaaaatgtgcggaccagtttagaaggatatcctgctgggggctctcttccctatagcatccagacagctgaaaaacagaattggctgcattcctattttcacaaatggtcagctgagacttctggccgcagcaatgccatgccacatattaagacatatatgaggccttctccagacttcagtaaaattgcttggttccttgtcacaagcgcaaatctgtccaaggctgcctggggagcattggagaagaatggcacccagctgatgatccgctcctacgagctcggggtccttttcctcccttcagcatttggtctagacagtttcaaagtgaaacagaagttcttcgctggcagccaggagccaatggccacctttcctgtgccatatgatttgcctccagaactgtatggaagtaaagatcggccatggatatggaacattccttatgtcaaagcaccggatacgcatgggaacatgtgggtgccctcctgagaatcttgaggcactgtgaaatttaagtgtaagacattgagccacaaacatggaatctcttctttgtactggatgtccacttcccttaaagtcttatttgcacccttacaaaatctttccaaaggtcactcttatgaatggatgttggttatacttttaatggacattaaca

SEQ ID NO: 33365 - DNA, 2068 bp, Homo sapiens
  source 1..2068: mol_type = unassigned DNA
atccgaggcaagcgttggttctgtgcgcctcaggagtataatgtctcaggaaggcgattatgggaggtggaccatatctagtagtgatgaaagtgaggaagaaaagccaaaaccagacaagccatctacctcttctcttctctgtgccaggcaaggagcagcaaatgagcccaggtacacctgttccgaggcccagaaagctgcacacaagaggaaaatatcacctgtgaaattcagcaatacagattcagttttacctcccaaaaggcagaaaagcggttcccaggaggacctcggctggtgtctgtccagcagtgatgatgagctgcaaccagaaatgccgcagaagcaggctgagaaagtggtgatcaaaaaggagaaagacatctctgctcccaatgacggcactgcccaaagaactgaaaatcatggcgctcccgcctgccacaggctcaaagaggaggaagacgagtatgagacatcaggggagggccaggacatttgggacatgctggataaagggaaccccttccagttttacctcactagagtctctggagttaagccaaagtataactctggagccctccacatcaaggatattttatctcctttatttgggacgcttgtttcttcagctcagtttaactactgctttgacgtggactggctcgtaaaacagtatccaccagagttcaggaagaagccaatcctgcttgtgcatggtgataagcgagaggctaaggctcacctccatgcccaggccaagccttacgagaacatctctctctgccaggcaaagttggatattgcgtttggaacacaccacacgaaaatgatgctgctgctctatgaagaaggcctccgggttgtcatacacacctccaacctcatccatgctgactggcaccagaaaactcaaggaatatggttgagccccttatacccacgaattgctgatggaacccacaaatctggagagtcgccaacacattttaaagctgatctcatcagttacttgatggcttataatgccccttctctcaaggagtggatagatgtcattcacaagcacgatctctctgaaacaaatgtttatcttattggttcaaccccaggacgctttcaaggaagtcaaaaagataattggggacattttagacttaagaagcttctgaaagaccatgcctcatccatgcctaacgcagagtcctggcctgtcgtaggtcagttttcaagcgttggctccttgggagccgatgaatcaaagtggttatgttctgagtttaaagagagcatgctgacactggggaaggaaagcaagactccaggaaaaagctctgttcctctttacttgatctatccttctgtggaaaatgtgcggaccagtttagaaggatatcctgctgggggctctcttccctatagcatccagacagctgaaaaacagaattggctgcattcctattttcacaaatggtcagctgagacttctggccgcagcaatgccatgccacatattaagacatatatgaggccttctccagacttcagtaaaattgcttggttccttgtcacaagcgcaaatctgtccaaggctgcctggggagcattggagaagaatggcacccagctgatgatccgctcctacgagctcggggtccttttcctcccttcagcatttggtctagacagtttcaaagtgaaacagaagttcttcgctggcagccaggagccaatggccacctttcctgtgccatatgatttgcctccagaactgtatggaagtaaagatcggccatggatatggaacattccttatgtcaaagcaccggatacgcatgggaacatgtgggtgccctcctgagaatcttgaggcactgtgaaatttaagtgtaagacattgagccacaaacatggaatctcttctttgtactggatgtccacttcccttaaagtcttatttgcacccttacaaaatctttccaaaggtcactcttatgaatggatgttggttatacttttaatggacattaacattcctaataaagtattagtttcttaattc

SEQ ID NO: 33366 - DNA, 2488 bp, Homo sapiens
  source 1..2488: mol_type = unassigned DNA
ccattctccgcagagttggagcacacagctgtattaaaaaggcaaatcgaaggccgggcgcggtgactcacgcctgtcatcctagcactttgggaggccgaggcggctgaatcacttgaggttaggagtttgagatcagcccgggcaacatggtgaaaccccgtctctacaaaaatagaaaaattagccgagcgtgatggtggatgcctgtaatcctagctcctcgggaggctaaggagtataatgtctcaggaaggcgattatgggaggtggaccatatctagtagtgatgaaagtgaggaagaaaagccaaaaccagacaagccatctacctcttctcttctctgtgccaggcaaggagcagcaaatgagcccaggtacacctgttccgaggcccagaaagctgcacacaagaggaaaatatcacctgtgaaattcagcaatacagattcagttttacctcccaaaaggcagaaaagcggttcccaggaggacctcggctggtgtctgtccagcagtgatgatgagctgcaaccagaaatgccgcagaagcaggctgagaaagtggtgatcaaaaaggagaaagacatctctgctcccaatgacggcactgcccaaagaactgaaaatcatggcgctcccgcctgccacaggctcaaagaggaggaagacgagtatgagacatcaggggagggccaggacatttgggacatgctggataaagggaaccccttccagttttacctcactagagtctctggagttaagccaaagtataactctggagccctccacatcaaggatattttatctcctttatttgggacgcttgtttcttcagctcagtttaactactgctttgacgtggactggctcgtaaaacagtatccaccagagttcaggaagaagccaatcctgcttgtgcatggtgataagcgagaggctaaggctcacctccatgcccaggccaagccttacgagaacatctctctctgccaggcaaagttggatattgcgtttggaacacaccacacgaaaatgatgctgctgctctatgaagaaggcctccgggttgtcatacacacctccaacctcatccatgctgactggcaccagaaaactcaaggaactcacctgtgagtgaatctctgatccaggaggagcctcactcagcctgggaactttgaggtgctattgcaaggggaggtcctccacgtctgtccagcccaacctggtcattttacacacggaggcaaaggcccagagagatcacagagcttacccaaaatgaatatggttgagccccttatacccacgaattgctgatggaacccacaaatctggagagtcgccaacacattttaaagctgatctcatcagttacttgatggcttataatgccccttctctcaaggagtggatagatgtcattcacaagcacgatctctctgaaacaaatgtttatcttattggttcaaccccaggacgctttcaaggaagtcaaaaagataattggggacattttagacttaagaagctttgcataattatcaaagcaggaaatgcagatcagtcttctgcagtgttttagctgcttctgaaagaccatgcctcatccatgcctaacgcagagtcctggcctgtcgtaggtcagttttcaagcgttggctccttgggagccgatgaatcaaagtggttatgttctgagtttaaagagagcatgctgacactggggaaggaaagcaagactccaggaaaaagctctgttcctctttacttgatctatccttctgtggaaaatgtgcggaccagtttagaaggatatcctgctgggggctctcttccctatagcatccagacagctgaaaaacagaattggctgcattcctattttcacaaatggtcagctgagacttctggccgcagcaatgccatgccacatattaagacatatatgaggccttctccagacttcagtaaaattgcttggttccttgtcacaagcgcaaatctgtccaaggctgcctggggagcattggagaagaatggcacccagctgatgatccgctcctacgagctcggggtccttttcctcccttcagcatttggtctagacagtttcaaagtgaaacagaagttcttcgctggcagccaggagccaatggccacctttcctgtgccatatgatttgcctccagaactgtatggaagtaaagatcggccatggatatggaacattccttatgtcaaagcaccggatacgcatgggaacatgtgggtgccctcctgagaatcttgaggcactgtgaaatttaagtgtaagacattgagccacaaacatggaatctcttctttgtactggatgtccacttcccttaaagtcttatttgcacccttacaaaatctttccaaaggtcactcttatgaatggatgttggttatacttttaatggacattaacattcctaataaagtattagtttcttaa

SEQ ID NO: 33367 - DNA, 910 bp, Homo sapiens
  source 1..910: mol_type = unassigned DNA
atcctgctcctggccgagtcgcggtgcgcgggctgctggggtccggcagggctggaggcggaccgcgaggaagcggcgcggccgggaagatggggcagggtcgcctcggccccggggcctcggtttcctccgatcacagcgcctcagggggcgcgcacgggcgctgcggagacctgtgtcctgccggggcgcggcgctaggggcccctgctcgggtttttattcccagacctaagcttacagagttggagcacacagctgtattaaaaaggcaaatcgaaggccgggcgcggtgactcacgcctgtcatcctagcactttgggaggccgaggcggctgaatcacttgaggttaggagtttgagatcagcccgggcaacatggtgaaaccccgtctctacaaaaatagaaaaattagccgagcgtgatggtggatgcctgtaatcctagctcctcgggaggctaaggagtataatgtctcaggaaggcgattatgggaggtggaccatatctagtagtgatgaaagtgaggaagaaaagccaaaaccagacaagccatctacctcttctcttctctgtgccaggcaaggagcagcaaatgagcccaggtacacctgttccgaggcccagaaagctgcacacaagaggaaaatatcacctgtgaaattcagcaatacagattcagttttacctcccaaaaggcagaaaagcggttcccaggaggacctcggctggtgtctgtccagcagtgatgatgagctgcaaccagaaatgccgcagaagcaggctgagaaagtggtgatcaaaaaggagaaagacatctctgctcccaatgacggcactgcccaaagaactgaaaatcatggcgctcccgcctgccacaggctcaaagaggaggaagacgagtatgag

SEQ ID NO: 33368 - DNA, 728 bp, Homo sapiens
  source 1..728: mol_type = unassigned DNA
aacgccttcagcaagagccctctcacttcctttgtcttcaacccattctccgcagagttggagcacacagctgtattaaaaaggcaaatcgaaggccgggcgcggtgactcacgcctgtcatcctagcactttgggaggccgaggcggctgaatcacttgaggttaggagtttgagatcagcccgggcaacatggtgaaaccccgtctctacaaaaatagaaaaattagccgagcgtgatggtggatgcctgtaatcctagctcctcgggaggctaaggagtataatgtctcaggaaggcgattatgggaggtggaccatatctagtagtgatgaaagtgaggaagaaaagccaaaaccagacaagccatctacctcttctcttctctgtgccaggcaaggagcagcaaatgagcccaggtacacctgttccgaggcccagaaagctgcacacaagaggaaaatatcacctgtgaaattcagcaatacagattcagttttacctcccaaaaggcagaaaagcggttcccaggaggacctcggctggtgtctgtccagcagtgatgatgagctgcaaccagaaatgccgcagaagcaggctgagaaagtggtgatcaaaaaggagaaagacatctctgctcccaatgacggcactgcccaaagaactgaaaatcatggcgctcccgcctgccacaggctcaaagaggaggaagacgagtatgagacatc

SEQ ID NO: 33369 - DNA, 910 bp, Homo sapiens
  source 1..910: mol_type = unassigned DNA
gcgcatgcgcggcggccgccgaaggggcgggatccgaggcaagcgttggttctgtgcgcctcaggagtataatgtctcaggaaggcgattatgggaggtggaccatatctagtagtgatgaaagtgaggaagaaaagccaaaaccagacaagccatctacctcttctcttctctgtgccaggcaaggagcagcaaatgagcccaggtacacctgttccgaggcccagaaagctgcacacaagaggaaaatatcacctgtgaaattcagcaatacagattcagttttacctcccaaaaggcagaaaagcggttcccaggaggacctcggctggtgtctgtccagcagtgatgatgagctgcaaccagaaatgccgcagaagcaggctgagaaagtggtgatcaaaaaggagaaagacatctctgctcccaatgacggcactgcccaaagaactgaaaatcatggcgctcccgcctgccacaggctcaaagaggaggaagacgagtatgagacatcaggggagggccaggacatttgggacatgctggataaagggaaccccttccagttttacctcactagagtctctggagttaagccaaagtataactctggagccctccacatcaaggatattttatctcctttatttgggacgcttgtttcttcagctcagtttaactactgctttgacgtggactggctcgtaaaacagtatccaccagagttcaggaagaagccaatcctgcttgtgcatggtgataagcgagaggctaaggctcacctccatgcccaggccaagccttacgagaacatctctctctgccaggcaaagttggatattgcgtttggaacacaccacacgaaaatgatgctgctgctctatgaagaaggcctccgggttgtcataca

SEQ ID NO: 33370 - DNA, 597 bp, Homo sapiens
  source 1..597: mol_type = unassigned DNA
gggttatagctctatttgcactcgctgtttagctggtccgaatttcttgtcctgcgtccaagaataatgaggttaggctgacaaccgaaggggaaaagggcggaggagtataatgtctcaggaaggcgattatgggaggtggaccatatctagtagtgatgaaagtgaggaagaaaagccaaaaccagacaagccatctacctcttctcttctctgtgccaggcaaggagcagcaaatgagcccaggtacacctgttccgaggcccagaaagctgcacacaagaggaaaatatcacctgtgaaattcagcaatacagattcagttttacctcccaaaaggcagaaaagcggttcccaggaggacctcggctggtgtctgtccagcagtgatgatgagctgcaaccagaaatgccgcagaagcaggctgagaaagtggtgatcaaaaaggagaaagacatctctgctcccaatgacggcactgcccaaagaactgaaaatcatggcgctcccgcctgccacaggctcaaagaggaggaagacgagtatgagacatcaggggagggccaggacatttgggacatgctggataaagggaa

SEQ ID NO: 33371 - DNA, 748 bp, Homo sapiens
  source 1..748: mol_type = unassigned DNA
cgcggactcggtgcggtctctcgcgggctgcggtcgggcccgggatcctgctcctggccgagtcgcggtgcgcgggctgctggggtccggcagggctggaggcggaccgcgaggaagcggcgcggccgggaagatggggcagggtcgcctcggccccggggcctcggtttcctccgatcacagcgcctcagggggcgcgcacgggcgctgcggagacctgtgtcctgccggggcgcggcgctaggggcccctgctcgggtttttattcccagacctaagcttacaggagtataatgtctcaggaaggcgattatgggaggtggaccatatctagtagtgatgaaagtgaggaagaaaagccaaaaccagacaagccatctacctcttctcttctctgtgccaggcaaggagcagcaaatgagcccaggtacacctgttccgaggcccagaaagctgcacacaagaggaaaatatcacctgtgaaattcagcaatacagattcagttttacctcccaaaaggcagaaaagcggttcccaggaggacctcggctggtgtctgtccagcagtgatgatgagctgcaaccagaaatgccgcagaagcaggctgagaaagtggtgatcaaaaaggagaaagacatctctgctcccaatgacggcactgcccaaagaactgaaaatcatggcgctcccgcctgccacaggctcaaagaggaggaagacgagtatgagacatcaggggagggcca

SEQ ID NO: 33372 - DNA, 2116 bp, Homo sapiens
  source 1..2116: mol_type = unassigned DNA
tccttcggtgggcagccggccggaactcacgaatcagagcagccgacacatcgtccgctcagccaatcgtagcagatgtgtgatcccgccacctccccggaccctggcggttgtcgctgagttggcgaccgcgggagacgctgctgaggcggcttcggttgcgggtcggaacggcgctgctctgcggggccggtccaggctggcagctgccggcgcttggcggtgagggcgggctcccgagtggccccccaccgaaggcggtgggaccagcggctgaggccaggatgccgtccaggcggcgcggcggctcctcactcatcccagatgttggttatctttctgaagtagactgtccatggcctgaacattttccgaaaatcattttgagcaaaatatctgtttaataacaagataaccacatcaagatggttggaaagctgaagcagaacttactattggcatgtctggtgattagttctgtgactgtgttttacctgggccagcatgccatggaatgccatcaccggatagaggaacgtagccagccagtcaaattggagagcacaaggaccactgtgagaactggcctggacctcaaagccaacaaaacctttgcctatcacaaagatatgcctttaatatttattggaggtgtgcctcggagtggaaccacactcatgagggccatgctggacgcacatcctgacattcgctgtggagaggaaaccagggtcattccccgaatcctggccctgaagcagatgtggtcacggtcaagtaaagagaagatccgcctggatgaggctggtgttactgatgaagtgctggattctgccatgcaagccttcttactagaaattatcgttaagcatggggagccagccccttatttatgtaataaagatccttttgccctgaaatctttaacttacctttctaggttattccccaatgccaaatttctcctgatggtccgagatggccgggcatcagtacattcaatgatttctcgaaaagttactatagctggatttgatctgaacagctatagggactgtttgacaaagtggaatcgtgctatagagaccatgtataaccagtgtatggaggttggttataaaaagtgcatgttggttcactatgaacaacttgtcttacatcctgaacggtggatgagaacactcttaaagttcctccagattccatggaaccactcagtattgcaccatgaagagatgattgggaaagctgggggagtgtctctgtcaaaagtggagagatctacagaccaagtaatcaagccagtcaatgtaggagctctatcaaaatgggttgggaagataccgccagatgttttacaagacatggcagtgattgctcctatgcttgccaagcttggatatgacccatatgccaacccacctaactacggaaaacctgatcccaaaattattgaaaacactcgaagggtctataagggagaattccaactacctgactttcttaaagaaaaaccacagactgagcaagtggagtagcagaaccaggagcctcttccatacatgaggaaagattgctgccttttcagcagaagggaaattcctaggattggctgtcccctgccaagcttggtggagcgtctgcaccttggctgcgccgcctgtgcatttgccagtttcctcccactgagaggatggaggtgtccgcacagctttgggcctcgtgagggatctgcctcctgagcaaagagctcttgatcccgatttcatgcacagccctgcagtaaggagcccagaaggaacatgtgtttcctgttaaaactcctcttgttctcttttcttacattatgacgtttgttttcaaggagagggtttaaaaatgggatcctgtaagcagacttgggcagtctccttttgaaataggttgtctgtacatgttctaatgttttgtagaacacgtgtgcctgtttaagtgtattgatgtgaataatattaaatatcctaattatttaattcattgtattgtttctgagaagttgggaaattaccattatacatttacaacctaatgacttttgtattttatttttcaaaataaaagctttcaatgtgaagca

SEQ ID NO: 33373 - DNA, 560 bp, Homo sapiens
  source 1..560: mol_type = unassigned DNA
gagttggcgaccgcgggagacgctgctgaggcggcttcggttgcgggtcggaacggcgctgctctgcggggccggtccaggctggcagctgccggcgcttggcggtgagggcgggctcccgagtggccccccaccgaaggcggtgggaccagcggctgaggccaggatgccgtccaggcggcgcggcggctcctcactcatcccagccctgggaccacgtcctagccccgcagtcccctgggatgagaccctcgtctcgccgggatcggacatttgcccccacgtctaccccggctgcgcttcttgagctcatcgccccatcatcctacccgttatgttggttatctttctgaagtagactgtccatggcctgaacattttccgaaaatcattttgagcaaaatatctgtttaataacaagataaccacatcaagatggttggaaagctgaagcagaacttactattggcatgtctggtgattagttctgtgactgtgttttacctgggccagcatgccatggaatgccatcaccggatagaggaacgtagccagccagt

SEQ ID NO: 33374 - DNA, 562 bp, Homo sapiens
  source 1..562: mol_type = unassigned DNA
attacagtgtaagtgagagctggctgcagatgaagcaggatgttggttatctttctgaagtagactgtccatggcctgaacattttccgaaaatcattttgagcaaaatatctgtttaataacaagataaccacatcaagatggttggaaagctgaagcagaacttactattggcatgtctggtgattagttctgtgactgtgttttacctgggccagcatgccatggaatgccatcaccggatagaggaacgtagccagccagtcaaattggagagcacaaggaccactgtgagaactggcctggacctcaaagccaacaaaacctttgcctatcacaaagatatgcctttaatatttattggaggtgtgcctcggagtggaaccacactcatgagggccatgctggacgcacatcctgacattcgctgtggagaggaaaccagggtcattccccgaatcctggccctgaagcagatgtggtcacggtcaagtaaagagaagatccgcctggatgaggctggtgttactgatgaagtgctggattctgccatgcaagcctt

SEQ ID NO: 33375 - DNA, 1832 bp, Homo sapiens
  source 1..1832: mol_type = unassigned DNA
ttcggttgcgggtcggaacggcgctgctctgcggggccggtccaggctggcagctgccggcgcttggcggtgagggcgggctcccgagtggccccccaccgaaggcggtgggaccagcggctgaggccaggatgccgtccaggcggcgcggcggctcctcactcatcccagatgttggttatctttctgaagtagactgtccatggcctgaacattttccgaaaatcattttgagcaaaatatctgtttaataacaagataaccacatcaagatggttggaaagctgaagcagaacttactattggcatgtctggtgattagttctgtgactgtgttttacctgggccagcatgccatggaatgccatcaccggatagaggaacgtagccagccagtcaaattggagagcacaaggaccactgtgagaactggcctggacctcaaagccaacaaaacctttgcctatcacaaagatatgcctttaatatttattggaggtgtgcctcggagtggaaccacactcatgagggccatgctggacgcacatcctgacattcgctgtggagaggaaaccagggtcattccccgaatcctggccctgaagcagatgtggtcacggtcaagtaaagagaagatccgcctggatgaggctggtgttactgatgaagtgctggattctgccatgcaagccttcttactagaaattatcgttaagcatggggagccagccccttatttatgtaataaagatccttttgccctgaaatctttaacttacctttctaggttattccccaatgccaaatttctcctgatggtccgagatggccgggcatcagtacattcaatgatttctcgaaaagttactatagctggatttgatctgaacagctatagggactgtttgacaaagtggaatcgtgctatagagaccatgtataaccagtgtatggaggttggttataaaaagtgcatgttggttcactatgaacaacttgtcttacatcctgaacggtggatgagaacactcttaaagttcctccagattccatggaaccactcagtattgcaccatgaagagatgattgggaaagctgggggagtgtctctgtcaaaagtggagagatctacagaccaagtaatcaagccagtcaatgtaggagctctatcaaaatgggttgggaagataccgccagatgttttacaagacatggcagtgattgctcctatgcttgccaagcttggatatgacccatatgccaacccacctaactacggaaaacctgatcccaaaattattgaaaacactcgaagggaaagattgctgccttttcagcagaagggaaattcctaggattggctgtcccctgccaagcttggtggagcgtctgcaccttggctgcgccgcctgtgcatttgccagtttcctcccactgagaggatggaggtgtccgcacagctttgggcctcgtgagggatctgcctcctgagcaaagagctcttgatcccgatttcatgcacagccctgcagtaaggagcccagaaggaacatgtgtttcctgttaaaactcctcttgttctcttttcttacattatgacgtttgttttcaaggagagggtttaaaaatgggatcctgtaagcagacttgggcagtctccttttgaaataggttgtctgtacatgttctaatgttttgtagaacacgtgtgcctgtttaagtgtattgatgtgaataatattaaatatcctaattatttaattcattgtattgtttctgagaagttgggaaattaccattatacatttacaacctaatgacttttgtatttt

SEQ ID NO: 33376 - DNA, 2188 bp, Homo sapiens
  source 1..2188: mol_type = unassigned DNA
acgtcgccgcggccccgcccccgcgcgggcacctcccccttccccggctggggcggctggagagccgggagtcgctgggtgcgtggggctgcctcgccgcgtctcgccacgggctctgccagcagacagccttggcacacaggcacaagggctggagcccagagatgagagtgcccaagggagatgtgagcctggcgggctgcccgctaacctgtcgctgaagccccagaagcgggccctcaggccaggcctaccctgcctccggcccagcatgcgcctgtcggtgcggagggtgctgctggcagccggctgcgccctggtcctggtgctggcggttcagctgggacagcaggtgctagagtgccgggcggtgctggcgggcctgcggagcccccggggggccatgcggcctgagcaggaggagctggtgatggtgggcaccaaccacgtggaataccgctatggcaaggccatgccgctcatcttcgtgggtggcgtgcctcgcagtggcaccacgttgatgcgcgccatgctggacgcgcaccccgaggtgcgctgcggcgaggagacccgcatcatcccgcgcgtgctggccatgcgccaggcctggtccaagtctggccgtgagaagctgcggctggatgaggcgggggtgacggatgaggtgctggacgccgccatgcaggccttcatcctggaggtgattgccaagcacggagagccggcccgcgtgctctgcaacaaggacccatttacgctcaagtcctcggtctacctgtcgcgcctgttccccaactccaagttcctgctgatggtgcgggacggccgggcctccgtgcactccatgatcacgcgcaaagtcaccattgcgggctttgacctcagcagctaccgtgactgcctcaccaagtggaacaaggccatcgaggtgatgtacgcccagtgcatggaggtaggcaaggagaagtgcctgcctgtgtactacgagcagctggtgctgcaccccaggcgctcactcaagctcatcctcgacttcctcggcatcgcctggagcgacgctgtcctccaccatgaagacctcattggcaagcccggtggtgtctccctgtccaagatcgagcggtccacggaccaggtcatcaagcctgttaacctggaagcgctctccaagtggactggccacatccctggggatgtggtgcgggacatggcccagatcgcccccatgctggctcagctcggctatgacccttatgcaaacccccccaactatggcaaccctgaccccttcgtcatcaacaacacacagcgggtcttgaaaggggactataaaacaccagccaatctgaaaggatattttcaggtgaaccagaacagcacctcctcccacttaggaagctcgtgatttccagatctccgcaaatgacttcattgccaagaagagaagaaaatgcatttaagtggaaatcggacctctaatccaagcatattgcttgctattaatcgccaaaacaggactgctgatgaggaatgtatttgcatatgtttgcaaaagctgaatcattgaaaacgtaccttgaaactctctatctctggacactccagggtagagaatgaagggtatggaagtagtccggcttttgaaacttaggtattttatatttttcccctcaagaacttttttttaagagacagatttgccatcctccttaatttgcaggactgccttggtggctttgtttgctgggacaaggcccacaacctgtgcctctcctattgacccttactttgaattcaaagaatctatttaagagtttaatatatgaggctttctttgattcctcctcagttctacctagtttcacagaggaaaaaaatactctttgaataaagtgaacagaggctcatttgtttgtgccttactttactgaatgaatagggttttttttttctttccatactggattttgtcaggtagatttgtgatgagcaaaaagctggagaatataggtgcatgtaaggcacagctgaattcctgtgtcagggtccccagggccacccccaggatcgatgattggctagaagaactcagaattcagaagagctattatccttatggttatggtttattacagcaaaaggataaacattaaaatcagcaaaagaggccgggtggagtggctcacgc

SEQ ID NO: 33377 - DNA, 1968 bp, Homo sapiens
  source 1..1968: mol_type = unassigned DNA
aaaggagcctcccagctaaaagccagcaggagagagaccttggccaccaagggtctgccagctcctggtggtccccactccagccacctgccagctcgagcctgaccctcgcctccaccctggctgctgcctgtaccgctctcagggctctgccagcagacagccttggcacacaggcacaagggctggagcccagagatgagagtgcccaagggagatgtgagcctggcgggctgcccgctaacctgtcgctgaagccccagaagcgggccctcaggccaggcctaccctgcctccggcccagcatgcgcctgtcggtgcggagggtgctgctggcagccggctgcgccctggtcctggtgctggcggttcagctgggacagcaggtgctagagtgccgggcggtgctggcgggcctgcggagcccccggggggccatgcggcctgagcaggaggagctggtgatggtgggcaccaaccacgtggaataccgctatggcaaggccatgccgctcatcttcgtgggtggcgtgcctcgcagtggcaccacgttgatgcgcgccatgctggacgcgcaccccgaggtgcgctgcggcgaggagacccgcatcatcccgcgcgtgctggccatgcgccaggcctggtccaagtctggccgtgagaagctgcggctggatgaggcgggggtgacggatgaggtgctggacgccgccatgcaggccttcatcctggaggtgattgccaagcacggagagccggcccgcgtgctctgcaacaaggacccatttacgctcaagtcctcggtctacctgtcgcgcctgttccccaactccaagttcctgctgatggtgcgggacggccgggcctccgtgcactccatgatcacgcgcaaagtcaccattgcgggctttgacctcagcagctaccgtgactgcctcaccaagtggaacaaggccatcgaggtgatgtacgcccagtgcatggaggtaggcaaggagaagtgcctgcctgtgtactacgagcagctggtgctgcaccccaggcgctcactcaagctcatcctcgacttcctcggcatcgcctggagcgacgctgtcctccaccatgaagacctcattggcaagcccggtggtgtctccctgtccaagatcgagcggtccacggaccaggtcatcaagcctgttaacctggaagcgctctccaagtggactggccacatccctggggatgtggtgcgggacatggcccagatcgcccccatgctggctcagctcggctatgacccttatgcaaacccccccaactatggcaaccctgaccccttcgtcatcaacaacacacagcgggtcttgaaaggggactataaaacaccagccaatctgaaaggatattttcaggtgaaccagaacagcacctcctcccacttaggaagctcgtgatttccagatctccgcaaatgacttcattgccaagaagagaagaaaatgcatttaagtggaaatcggacctctaatccaagcatattgcttgctattaatcgccaaaacaggactgctgatgaggaatgtatttgcatatgtttgcaaaagctgaatcattgaaaacgtaccttgaaactctctatctctggacactccagggtagagaatgaagggtatggaagtagtccggcttttgaaacttaggtattttatatttttcccctcaagaacttttttttaagagacagatttgccatcctccttaatttgcaggactgccttggtggctttgtttgctgggacaaggcccacaacctgtgcctctcctattgacccttactttgaattcaaagaatctatttaagagtttaatatatgaggctttctttgattcctcctcagttctacctagtttcacagaggaaaaaaatactctttgaataaagtgaacagaggctcatttgtttgtgccttactttactgaatg

SEQ ID NO: 33378 - DNA, 2084 bp, Homo sapiens
  source 1..2084: mol_type = unassigned DNA
aaattctactgcagtggagtccatcttcacagtcatatgagccccctgaaattgacttccatagttctttaccttcaaggtcttattgttgggctctgccagcagacagccttggcacacaggcacaagggctggagcccagagatgagagtgcccaagggagaccctgaatcgagggtacaaatgaagccccaacctcttcagcagaacttcatcagcacgtttttctgaagagagggaaattatccaatgcacagagaggccggtgaccccagcctgagatccatctctggtttgtcagctgcttctcatattttcacagcagcctctgagatgtgagcctggcgggctgcccgctaacctgtcgctgaagccccagaagcgggccctcaggccaggcctaccctgcctccggcccagcatgcgcctgtcggtgcggagggtgctgctggcagccggctgcgccctggtcctggtgctggcggttcagctgggacagcaggtgctagagtgccgggcggtgctggcgggcctgcggagcccccggggggccatgcggcctgagcaggaggagctggtgatggtgggcaccaaccacgtggaataccgctatggcaaggccatgccgctcatcttcgtgggtggcgtgcctcgcagtggcaccacgttgatgcgcgccatgctggacgcgcaccccgaggtgcgctgcggcgaggagacccgcatcatcccgcgcgtgctggccatgcgccaggcctggtccaagtctggccgtgagaagctgcggctggatgaggcgggggtgacggatgaggtgctggacgccgccatgcaggccttcatcctggaggtgattgccaagcacggagagccggcccgcgtgctctgcaacaaggacccatttacgctcaagtcctcggtctacctgtcgcgcctgttccccaactccaagttcctgctgatggtgcgggacggccgggcctccgtgcactccatgatcacgcgcaaagtcaccattgcgggctttgacctcagcagctaccgtgactgcctcaccaagtggaacaaggccatcgaggtgatgtacgcccagtgcatggaggtaggcaaggagaagtgcctgcctgtgtactacgagcagctggtgctgcaccccaggcgctcactcaagctcatcctcgacttcctcggcatcgcctggagcgacgctgtcctccaccatgaagacctcattggcaagcccggtggtgtctccctgtccaagatcgagcggtccacggaccaggtcatcaagcctgttaacctggaagcgctctccaagtggactggccacatccctggggatgtggtgcgggacatggcccagatcgcccccatgctggctcagctcggctatgacccttatgcaaacccccccaactatggcaaccctgaccccttcgtcatcaacaacacacagcgggtcttgaaaggggactataaaacaccagccaatctgaaaggatattttcaggtgaaccagaacagcacctcctcccacttaggaagctcgtgatttccagatctccgcaaatgacttcattgccaagaagagaagaaaatgcatttaagtggaaatcggacctctaatccaagcatattgcttgctattaatcgccaaaacaggactgctgatgaggaatgtatttgcatatgtttgcaaaagctgaatcattgaaaacgtaccttgaaactctctatctctggacactccagggtagagaatgaagggtatggaagtagtccggcttttgaaacttaggtattttatatttttcccctcaagaacttttttttaagagacagatttgccatcctccttaatttgcaggactgccttggtggctttgtttgctgggacaaggcccacaacctgtgcctctcctattgacccttactttgaattcaaagaatctatttaagagtttaatatatgaggctttctttgattcctcctcagttctacctagtttcacagaggaaaaaaatactctttgaataaagtgaacagaggctcatttgtttgtgccttactttactgaatg

SEQ ID NO: 33379 - DNA, 544 bp, Homo sapiens
  source 1..544: mol_type = unassigned DNA
cttccccggctggggcggctggagagccgggagtcgctgggtgcgtggggctgcctcgccgcgtctcgccacgtgtggtttctatttgttggcgattttgctgtgtggtagagtcgtgctcaccctgcacccacgtgggcctttcttagcttaaaatggagaacatgccaccacctgcctgactgggctgatggctctgccagcagacagccttggcacacaggcacaagggctggagcccagagatgagagtgcccaagggagatgtgagcctggcgggctgcccgctaacctgtcgctgaagccccagaagcgggccctcaggccaggcctaccctgcctccggcccagcatgcgcctgtcggtgcggagggtgctgctggcagccggctgcgccctggtcctggtgctggcggttcagctgggacagcaggtgctagagtgccgggcggtgctggcgggcctgcggagcccccggggggccatgcggcctgagcaggaggagctggtgatggtgggcaccaaccacgtggaataccgctat

SEQ ID NO: 33380 - DNA, 586 bp, Homo sapiens
  source 1..586: mol_type = unassigned DNA
cttccccggctggggcggctggagagccgggagtcgctgggtgcgtggggctgcctcgccgcgtctcgccacgatgtgagcctggcgggctgcccgctaacctgtcgctgaagccccagaagcgggccctcaggccaggcctaccctgcctccggcccagcatgcgcctgtcggtgcggagggtgctgctggcagccggctgcgccctggtcctggtgctggcggttcagctgggacagcaggtgctagagtgccgggcggtgctggcgggcctgcggagcccccggggggccatgcggcctgagcaggaggagctggtgatggtgggcaccaaccacgtggaataccgctatggcaaggccatgccgctcatcttcgtgggtggcgtgcctcgcagtggcaccacgttgatgcgcgccatgctggacgcgcaccccgaggtgcgctgcggcgaggagacccgcatcatcccgcgcgtgctggccatgcgccaggcctggtccaagtctggccgtgagaagctgcggctggatgaggcgggggtgacggatgaggtgctggacgccgccatgcaggccttcatcct

SEQ ID NO: 33381 - DNA, 544 bp, Homo sapiens
  source 1..544: mol_type = unassigned DNA
cttccccggctggggcggctggagagccgggagtcgctgggtgcgtggggctgcctcgccgcgtctcgccacgggctctgccagcagacagccttggcacacaggcacaagggctggagcccagagatgagagtgcccaagggagaccctgaatcgagggtacaaatgaagccccaacctcttcagcagaacttcatcagcacgtttttctgaagagagggaaattatccaatgcacagagaggccggtgaccccagcctgagatccatctctggtttgtcagctgcttctcatattttcacagcagcctctgagatgtgagcctggcgggctgcccgctaacctgtcgctgaagccccagaagcgggccctcaggccaggcctaccctgcctccggcccagcatgcgcctgtcggtgcggagggtgctgctggcagccggctgcgccctggtcctggtgctggcggttcagctgggacagcaggtgctagagtgccgggcggtgctggcgggcctgcggagcccccggggggccatgcggcct

SEQ ID NO: 33382 - DNA, 514 bp, Homo sapiens
  source 1..514: mol_type = unassigned DNA
ttacttctgtaacatagctactggaaaactgagaatttgaagtgtgtctcacactgcatttctattgggtggcgctgttacaaactacaggaaggagctagaattctgtggaaggttttaggcaggggctgacatcctctggccaaaatgacaagagggaattccagagaccagggcaagtctggccacagggagactgcatggcctaggagacctgagccacagccgccaagagaagccctgattccccagagaggaggtgcccgctgccagtccacagatgtgagcctggcgggctgcccgctaacctgtcgctgaagccccagaagcgggccctcaggccaggcctaccctgcctccggcccagcatgcgcctgtcggtgcggagggtgctgctggcagccggctgcgccctggtcctggtgctggcggttcagctgggacagcaggtgctagagtgccgggcggtgctggcgggcctgcggagcccccggggggccatgcggcctgagca

SEQ ID NO: 33383 - DNA, 582 bp, Homo sapiens
  source 1..582: mol_type = unassigned DNA
attgcagggctgatggctgagcctgagcacgtgggcactgggccctgctccagggccactctggctctgccagcagacagccttggcacacaggcacaagggctggagcccagagatgagagtgcccaagggagatgtgagcctggcgggctgcccgctaacctgtcgctgaagccccagaagcgggccctcaggccaggcctaccctgcctccggcccagcatgcgcctgtcggtgcggagggtgctgctggcagccggctgcgccctggtcctggtgctggcggttcagctgggacagcaggtgctagagtgccgggcggtgctggcgggcctgcggagcccccggggggccatgcggcctgagcaggaggagctggtgatggtgggcaccaaccacgtggaataccgctatggcaaggccatgccgctcatcttcgtgggtggcgtgcctcgcagtggcaccacgttgatgcgcgccatgctggacgcgcaccccgaggtgcgctgcggcgaggagacccgcatcatcccgcgcgtgctggccatgcgccaggcctggtccaagtctggccgtgagaag

SEQ ID NO: 33384 - DNA, 1905 bp, Homo sapiens
  source 1..1905: mol_type = unassigned DNA
agagccgggagtcgctgggtgcgtggggctgcctcgccgcgtctcgccacgggctctgccagcagacagccttggcacacaggcacaagggctggagcccagagatgagagtgcccaagggagaccctgaatcgagggtacaaatgaagccccaacctcttcagcagaacttcatcagcacgtttttctgaagagagggaaattatccaatgcacagagaggccggtgaccccagcctgagatccatctctggtttgtcagctgcttctcatattttcacagcagcctctgagatgtgagcctggcgggctgcccgctaacctgtcgctgaagccccagaagcgggccctcaggccaggcctaccctgcctccggcccagcatgcgcctgtcggtgcggagggtgctgctggcagccggctgcgccctggtcctggtgctggcggttcagctgggacagcaggtgctagagtgccgggcggtgctggcgggcctgcggagcccccggggggcaaggccatgccgctcatcttcgtgggtggcgtgcctcgcagtggcaccacgttgatgcgcgccatgctggacgcgcaccccgaggtgcgctgcggcgaggagacccgcatcatcccgcgcgtgctggccatgcgccaggcctggtccaagtctggccgtgagaagctgcggctggatgaggcgggggtgacggatgaggtgctggacgccgccatgcaggccttcatcctggaggtgattgccaagcacggagagccggcccgcgtgctctgcaacaaggacccatttacgctcaagtcctcggtctacctgtcgcgcctgttccccaactccaagttcctgctgatggtgcgggacggccgggcctccgtgcactccatgatcacgcgcaaagtcaccattgcgggctttgacctcagcagctaccgtgactgcctcaccaagtggaacaaggccatcgaggtgatgtacgcccagtgcatggaggtaggcaaggagaagtgcctgcctgtgtactacgagcagctggtgctgcaccccaggcgctcactcaagctcatcctcgacttcctcggcatcgcctggagcgacgctgtcctccaccatgaagacctcattggcaagcccggtggtgtctccctgtccaagatcgagcggtccacggaccaggtcatcaagcctgttaacctggaagcgctctccaagtggactggccacatccctggggatgtggtgcgggacatggcccagatcgcccccatgctggctcagctcggctatgacccttatgcaaacccccccaactatggcaaccctgaccccttcgtcatcaacaacacacagcgggtcttgaaaggggactataaaacaccagccaatctgaaaggatattttcaggtgaaccagaacagcacctcctcccacttaggaagctcgtgatttccagatctccgcaaatgacttcattgccaagaagagaagaaaatgcatttaagtggaaatcggacctctaatccaagcatattgcttgctattaatcgccaaaacaggactgctgatgaggaatgtatttgcatatgtttgcaaaagctgaatcattgaaaacgtaccttgaaactctctatctctggacactccagggtagagaatgaagggtatggaagtagtccggcttttgaaacttaggtattttatatttttcccctcaagaacttttttttaagagacagatttgccatcctccttaatttgcaggactgccttggtggctttgtttgctgggacaaggcccacaacctgtgcctctcctattgacccttactttgaattcaaagaatctatttaagagtttaatatatgaggctttctttgattcctcctcagttctacctag

SEQ ID NO: 33385 - DNA, 3238 bp, Homo sapiens
  source 1..3238: mol_type = unassigned DNA
ctgtgctgtgcgctcctctcccggggaccaccgtcctcagatctccccagggaatgggtcgtcctcttcctgcccccacccgcgagacgcggcagaaaagcccgcggctatcttcccgccagcaacagcctcccgccgagccggccgggacagaggcggcccccacccccactgggcaggggactgcagacggcgctccccgactctcaagacgaccagggagcttcccttttcctcagcggggtgaggggcatctgtcgcccgccgacttggaggtggaggggcagggacattccctcgccatcacctcaggagctagaacgcgcccttctcgcagcagggcgtgggcctcccaatccctccaaggggcggacggcgtgcgcaaccccctggagaagcaacaggcgcccccatccccctccaagccgggtaacgccgaccccctcgtccctcccgctcttcacctccggaagccgggccaaagcctgggcgaacgactgcgcctcactccgccccctgcgccattttatcgccccctccccgacctcccctaccccgagtcagccgggccaacaccagggggagggcaaaccagcagtgattggcaggaaaccgtcccgcctctaggagggttgtgccccgctcaggcgcctcagccccgccctccgcaccgcccaccgtgcccactggctccaccttttcccgtctcatcgacctgctcgactctctgctgctcctcactttttccggccgctgccggaggggtccaggccgagtaagcggagcgccgagcccagctgatgcaacctggctggactcgcgtgacagttcccggcacgcggcggcgacggtgacccaggaaggggctctggtgccgggctgagcgggggaagcaggggtagcggagccatgggggacgctcccagccctgaagagaaactgcaccttatcacccggaacctgcaggaggttctgggggaagagaagctgaaggagatactgaaggagcgggaacttaaaatttactggggaacggcaaccacgggcaaaccacatgtggcttactttgtgcccatgtcaaagattgcagacttcttaaaggcagggtgtgaggtaacaattctgtttgcggacctccacgcatacctggataacatgaaagccccatgggaacttctagaactccgagtcagttactatgagaatgtgatcaaagcaatgctggagagcattggtgtgcccttggagaagctcaagttcatcaaaggcactgattaccagctcagcaaagagtacacactagatgtgtacagactctcctccgtggtcacacagcacgattccaagaaggctggagctgaggtggtaaagcaggtggagcaccctttgctgagtggcctcttataccccggactgcaggctttggatgaagagtatttaaaagtagatgcccaatttggaggcattgatcagagaaagattttcacctttgcagagaagtacctccctgcacttggctattcaaaacgggtccatctgatgaatcctatggttccaggattaacaggcagcaaaatgagctcttcagaagaggagtccaagattgatctccttgatcggaaggaggatgtgaagaaaaaactgaagaaggccttctgtgagccaggaaatgtggagaacaatggggttctgtccttcatcaagcatgtcctttttccccttaagtccgagtttgtgatcctacgagatgagaaatggggtggaaacaaaacctacacagcttacgtggacctggaaaaggactttgctgctgaggttgtacatcctggagacctgaagaattctgttgaagtcgcactgaacaagttgctggatccaatccgggaaaagtttaatacccctgccctgaaaaaactggccagcgctgcctacccagatccctcaaagcagaagccaatggccaaaggccctgccaagaattcagaaccagaggaggtcatcccatcccggctggatatccgtgtggggaaaatcatcactgtggagaagcacccagatgcagacagcctgtatgtagagaagattgacgtgggggaagctgaaccacggactgtggtgagcggcctggtacagttcgtgcccaaggaggaactgcaggacaggctggtagtggtgctgtgcaacctgaaaccccagaagatgagaggagtcgagtcccaaggcatgcttctgtgtgcttctatagaagggataaaccgccaggttgaacctctggaccctccggcaggctctgctcctggtgagcacgtgtttgtgaagggctatgaaaagggccaaccagatgaggagctcaagcccaagaagaaagtcttcgagaagttgcaggctgacttcaaaatttctgaggagtgcatcgcacagtggaagcaaaccaacttcatgaccaagctgggctccatttcctgtaaatcgctgaaaggggggaacattagctagccagcccagcatcttccccccttcttccaccactgagtcatctgctgtctcttcagtctgctccatccatcacccatttacccatctctcaggacacggaagcagcgggtttggactctttattcggtgcagaactcggcaaggggcagcttaccctccccagaacccaggatcatcctgtctggctgcagtgagagaccaacccctaacaagggctgggccacagcagggagtccagccctaccttcttcccttggcagctggagaaatctggtttcaatataactcatttaaaaatttatgccacagtccttataattggaaaaatactggtgcccaggttttcttggagttatccaagcagctgcgcccctagctgggatctggtacctggactaggctaattacagcttctccccaacaggaaactgtgggatttgaaaaggaaagggaagggaaaacagagaacctagtggtctaccaagtggttggcaactttcccaatgtctgcttactctgaggcttggcactgggggccagggcctgccccagggctcctggaatttcccttgatccagctaggctgggacactccctaaatcagctgcgtgttgttagcatcaggcagaatgaatggcagagagtgattctgtcttcatagagggtggggtacttctccataaggcatctcagtcaaatccccatcactgtcataaattcaaataaaatgtctgaacaaggg

SEQ ID NO: 33386 - DNA, 2122 bp, Homo sapiens
  source 1..2122: mol_type = unassigned DNA
ccagcattcccttcgtgccgctaccaagatggcggcgcccatcttgcggtccttttcctggggccggtggtctggtaccctaaatctctcagtattgttgcccttggggctgcgtaaggcccactcgggcgctcaggggttactggcagcgcagaaggctcgaggtctgttcaaggacttcttcccggagacggggacgaaaatagagctcccagagctcttcgaccgtggcacggcgagttttccccaaaccatttactgtggcttcgaccccacggcagactcgcttcatgtgggtcatctacttgcgctgctgggcctgtttcatttgcagcgagcgggccacaacgtgatcgcgctggtgggaggcgccacggcgcgcctgggagacccgagcggccgtaccaaggaacgcgaggcgctggagacagagcgcgtgcgagccaacgcgcgagctctgcgcctagggcttgaggccctggcggctaatcaccagcagcttttcactgatgggcgctcctggggcagcttcactgtgctggacaactcggcctggtaccagaagcagcacctggtggacttcctggcggcagtggggggtcacttccgcatggggacgctgctgagccggcagagcgtgcagctgcggctcaagagccccgagggcatgagcttggccgagttcttttaccaggtgctccaggcctatgacttctattacctcttccagcgttatggatgcagggtccagctgggcggatctgatcaactaggcaacatcatgtccggatatgagttcatcaacaagttgactggagaagatgtatttggaatcaccgttcctctaattacaagtacaactggagcaaagctgggaaagtctgctggcaacgctgtttggctaaacagagataagacatctccatttgaattgtatcaattctttgtcaggcaaccggacgattcagtggaaaggtacctgaagctgttcactttcctgccccttccagagattgatcatatcatgcagctgcatgtcaaagagccagaaaggcggggtcctcagaaacgactggcagcagaagtaacaaagcttgttcatggacgagaaggattggattctgctaaaaggtgtacacaagccctttatcacagtagcatagatgcactggaggtcatgtctgatcaggagttaaaagagttgtttaaagaagctccattttctgaattttttctcgatcctggaacaagtgtcctagatacttgccgcaaagcaaatgccattccagatggtccccgagggtatcgaatgataacagaaggcggagtcagcataaatcaccaacaagtaacaaatcctgagagtgttttaattgttggacaacatattctcaagaatggactttccttacttaaaataggaaaaagaaatttctacattataaaatggcttcagttgtgatgaaaagtccttctggttgtccaaataaacttacccatcattcattctcaagacctctgaagggttggctccagaacttagacctttgcttatgcaaatcagaaaaacagaatggactaggactcagtgtgagtaacttcattatttttatgggccggttaataaatatttgtttaataatgggatgttttattttctgatgtacaaagcttgattaccatagaaaaccatgattttcagggttaatctctttttaaaattatacttcagaagagaaagaaatgctgctttcctatcttacccttcctgctctcctttttgtagtgatgaggaacaatgaaaaagaggtagtgtaaggaattgtgaggctgggcatggtggctcacacctgtaatcccagcacttcgggaggccaaggtgggcaaatcgcttgaggccaggagtttgagaccagcctggccaacagggcgaaaccccgtctctactgaaaatataaaaattagccagatgtggttgcaggcacctgtaaccccagctactcaagaggctgagctgcgagaatcacttgaacccaggagatggaggttgcagtgagctgagatcacgccactgcactccagcctgggagacagcatgagtagtgagtgaaactctgtctca

SEQ ID NO: 33387 - DNA, 962 bp, Homo sapiens
  source 1..962: mol_type = unassigned DNA
cgtcgtcgcgtccgggtgacgtctcccgagggcgtcggcagggtcggcggcgtcggcagcagtgtcgacggcagcggcggcggcgggtgggaaatggcggagtatctggcctccatcttcggcaccgagaaagacaaagtcaactgttcattttatttcaaaattggagcatgtcgtcatggagacaggtgctctcggttgcacaataaaccgacgtttagccagaccattgccctcttgaacatttaccgtaaccctcaaaactcttcccagtctgctgacggtttgcgctgtgccgtgagcgatgtggagatgcaggaacactatgatgagttttttgaggaggtttttacagaaatggaggagaagtatggggaagtagaggagatgaacgtctgtgacaacctgggagaccacctggtggggaacgtgtacgtcaagtttcgccgtgaggaagatgcggaaaaggctgtgattgacttgaataaccgttggtttaatggacagccgatccacgccgagctgtcacccgtgacggacttcagagaagcctgctgccgtcagtatgagatgggagaatgcacacgaggcggcttctgcaacttcatgcatttgaagcccatttccagagagctgcggcgggagctgtatggccgccgtcgcaagaagcatagatcaagatcccgatcccgggagcgtcgttctcggtctagagaccgtggtcgtggcggtggcggtggcggtggtggaggtggcggcggacgggagcgtgacaggaggcggtcgagagatcgtgaaagatctgggcgattctgagccatgccatttttaccttatgtctgctagaaagtgttgtagttgattgaccaaaccagttcataaggggaattttttttaaaaaacaacaaaaaaaaaaacatacaaagatgggtttctgaataaaatttgtagtgataacagta

SEQ ID NO: 33388 - DNA, 940 bp, Homo sapiens
  source 1..940: mol_type = unassigned DNA
ctcccgagggcgtcggcagggtcggcggcgtcggcagcagtgtcgacggcagcggcggcggcgggtgggaaatggcggagtatctggcctccatcttcggcaccgagaaagacaaagtcaactgttcattttatttcaaaattggagcatgtcgtcatggagacaggtgctctcggttgcacaataaaccgacgtttagccagaccatcttgattcaaaacatctatcgtaatccccaaaacagtgcacagacggctgacggctcacactgtgccgtgagcgatgtggagatgcaggaacactatgatgagttttttgaggaggtttttacagaaatggaggagaagtatggggaagtagaggagatgaacgtctgtgacaacctgggagaccacctggtggggaacgtgtacgtcaagtttcgccgtgaggaagatgcggaaaaggctgtgattgacttgaataaccgttggtttaatggacagccgatccacgccgagctgtcacccgtgacggacttcagagaagcctgctgccgtcagtatgagatgggagaatgcacacgaggcggcttctgcaacttcatgcatttgaagcccatttccagagagctgcggcgggagctgtatggccgccgtcgcaagaagcatagatcaagatcccgatcccgggagcgtcgttctcggtctagagaccgtggtcgtggcggtggcggtggcggtggtggaggtggcggcggacgggagcgtgacaggaggcggtcgagagatcgtgaaagatctgggcgattctgagccatgccatttttaccttatgtctgctagaaagtgttgtagttgattgaccaaaccagttcataaggggaattttttttaaaaaacaacaaaaaaaaaaacatacaaagatgggtttctgaataaaatttgtagtgataacagta

SEQ ID NO: 33389 - DNA, 1019 bp, Homo sapiens
  source 1..1019: mol_type = unassigned DNA
gtccgggtgacgtctcccgagggcgtcggcagggtcggcggcgtcggcagcagtgtcgacggcagcggcggcggcgggtgggaaatggcggagtatctggcctccatcttcggcaccgagaaagacaaagtcaactgttcattttatttcaaaattggagcatgtcgtcatggagacaggtgctctcggttgcacaataaaccgacgtttagccagaccatcttgattcaaaacatctatcgtaatccccaaaacagtgcacagacggctgacggctcacactaccattgccctcttgaacatttaccgtaaccctcaaaactcttcccagtctgctgacggtttgcgctgtgccgtgagcgatgtggagatgcaggaacactatgatgagttttttgaggaggtttttacagaaatggaggagaagtatggggaagtagaggagatgaacgtctgtgacaacctgggagaccacctggtggggaacgtgtacgtcaagtttcgccgtgaggaagatgcggaaaaggctgtgattgacttgaataaccgttggtttaatggacagccgatccacgccgagctgtcacccgtgacggacttcagagaagcctgctgccgtcagtatgagatgggagaatgcacacgaggcggcttctgcaacttcatgcatttgaagcccatttccagagagctgcggcgggagctgtatggccgccgtcgcaagaagcatagatcaagatcccgatcccgggagcgtcgttctcggtctagagaccgtggtcgtggcggtggcggtggcggtggtggaggtggcggcggacgggagcgtgacaggaggcggtcgagagatcgtgaaagatctgggcgattctgagccatgccatttttaccttatgtctgctagaaagtgttgtagttgattgaccaaaccagttcataaggggaattttttttaaaaaacaacaaaaaaaaaaacatacaaagatgggtttctgaataaaatttgtagtgataacagt

SEQ ID NO: 33390 - DNA, 1675 bp, Homo sapiens
  source 1..1675: mol_type = unassigned DNA
ccctccctgacattgctggcacacaggcatgattgctggttccattggatatggatctggattgtcagcgtatttgaacagtattaagggagggttttgcagtagagacagaaggtgacgtaaggtggttcctaaggtgggttcggtcagtcccctaatagtttgttttcagtgtattgagaccaggagaattgatttacttcagacctattttttgaaactccctgttggtctggtgtcatgcgtttagagagactctgaacttcgttttctgttttccttagataatgatagcacttcatgagcaccatatgtgaagcacacatacgttctgtctgactctcagaacagtgccacattggcattgtcatcatttacagatgacatctgagagctagggtgacttgcccaagcccaagcagctggtagcagagttgggatcttaaccctcaccacaccggtgttttcaagagagaacttggtcgtggagaactggagaacagatactgcctaagttacatttagttttagactaatttaatactccatttaagaaacaaacagaacagctgtgcagttaggaaagtggaggggatttgaatgaggaggaggcgggttagagttagaaccgtctttgctgaacaagtagtgtgtttgcagaaagggaagttgaagttacgttgtcctaaaatacagcaaggaagaggaggtgcttaataccacggaaaaaagtctgtgtcatgtttctgtgaggttaaaagtaatttgatagtgtatgtcatgctgctgacatattccatgtgtttgatatcttcccagcaaaataatcagctctcattttcccttacagagtcaactgttcattttatttcaaaattggagcatgtcgtcatggagacaggtgctctcggttgcacaataaaccgacgtttagccagaccattgccctcttgaacatttaccgtaaccctcaaaactcttcccagtctgctgacggtttgcgctgtgccgtgagcgatgtggagatgcaggaacactatgatgagttttttgaggaggtttttacagaaatggaggagaagtatggggaagtagaggagatgaacgtctgtgacaacctgggagaccacctggtggggaacgtgtacgtcaagtttcgccgtgaggaagatgcggaaaaggctgtgattgacttgaataaccgttggtttaatggacagccgatccacgccgagctgtcacccgtgacggacttcagagaagcctgctgccgtcagtatgagatgggagaatgcacacgaggcggcttctgcaacttcatgcatttgaagcccatttccagagagctgcggcgggagctgtatggccgccgtcgcaagaagcatagatcaagatcccgatcccgggagcgtcgttctcggtctagagaccgtggtcgtggcggtggcggtggcggtggtggaggtggcggcggacgggagcgtgacaggaggcggtcgagagatcgtgaaagatctgggcgattctgagccatgccatttttaccttatgtctgctagaaagtgttgtagttgattgaccaaaccagttcataaggggaattttttttaaaaaacaacaaaaaaaaaaacatacaaagatgggtttctgaataaaatttgtagtgataacagta

SEQ ID NO: 33391 - DNA, 1867 bp, Homo sapiens
  source 1..1867: mol_type = unassigned DNA
ccgcgacggcgcgcccccggcggctgctgcggcggcgggagcgaggcgaccgctgaggccgcggagagtgacggcggcccggccgacgggagccggggcggggcggcggcccagcgaaggagcgcgcgggcggtctggccccgccccctccccgcccgccttcccggtgaccttcaggggcccgggtggcgggcgcaggcccctgcggcggcggcgggatgttcgtgcaggaggagaagatcttcgcgggcaaggtgctgcggctgcacatctgcgcgtccgacggcgccgagtggctggaggaggccaccgaggacacctcggtggagaagctcaaggagcgctgcctcaagcactgtgctcatgggagcttagaagatcccaaaagtataacccatcataaattaatccacgctgcctcagagagggtgctgagtgatgccaggaccatcctggaagagaacatccaggaccaagatgtcctattattgataaaaaagcgtgctccatcaccacttcccaagatggctgatgtctcagcagaagaaaagaaaaaacaagaccagaaagctccagataaagaggccatactgcgggccaccgccaacctgccctcctacaacatggaccgggccgcggtccagaccaacatgagagacttccagacagaactccggaagatactggtgtctctcatcgaggtggcgcagaagctgttagcgctgaacccagatgcagtggaattgtttaagaaggcgaatgcaatgctggacgaggacgaggatgagcgtgtggacgaggctgccctgcggcagctcacggagatgggctttccggagaacagagccaccaaggcccttcagctgaaccacatgtcggtgcctcaggccatggagtggctaattgaacacgcagaagacccgaccatagacacgcctcttcctggccaagctcccccagaggccgagggggccacagcagctgcctccgaggctgccgcgggagccagcgccaccgatgaggaggccagagatgagctgacggaaatcttcaagaagatccggaggaaaagggagtttcgggctgatgctcgggccgtcatttccctgatggagatggggttcgacgagaaagaggtgatagatgccctcagagtgaacaacaaccagcagaatgccgcgtgcgagtggctgctgggggaccggaagccctctccggaggagctggacaagggcatcgaccccgacagtcctctctttcaggccatcctggataacccggtggtgcagctgggcctgaccaacccgaaaacattgctagcatttgaagacatgctggagaacccactgaacagcacccagtggatgaatgatccagaaacggggcctgtcatgctgcagatctctagaatcttccagacactaaatcgcacgtaggtggcgttgttccactcggctatcaggccacagcagccccctggtgcggcccgagaccgggcagagtggacctcacctggaaactcaccttcagcgcctcagccctggactgttagaggtgctgcagctgctcctgctctctgatcttattgcttataaactttggtgacggtagtgtgtaaggccgtatttttagcatctgacaggtgtttacaaaaaagtggttgtcgcactgggaagtggagtgatggcctcgtctccagtgctcctctgggctcttgagttgctgcttgaattgccgtgtagacatttgcttggagagtccacttgttatttgacggaggtaggtttcaacccagagttaatgtcaagcatgctaatttaactagtcactcacagatgacttttctttaataaagtcccttttccta

SEQ ID NO: 33392 - DNA, 716 bp, Homo sapiens
  source 1..716: mol_type = unassigned DNA
ttccatggcggcctctcaggtcctgggggagaagattaacatcctgtcgggagagactgtcaaagctggggacagggacccgctggggaacgactgtcccgagcaagataggctcccccagcgctcctggaggcagaagtgtgcctcctacgtgttggccctgaggccctggagcttcagtgcctcactcacaccggtggccctgggcagtgcccttgcctacagatcccacggtgtcctggatcccaggctcttggtgggttgtgccgtggctgtcctggctgtgcacggggccggtaatttggtcaacacttactatgacttttccaagggcattgaccacaaaaagagtgatgacaggacacttgtggaccgaatcttggagccgcaggatgtcgtccggttcggagtcttcctctacacgttgggctgcgtctgtgccgcttgcctctactacctgtcccctctgaaactggagcacttggctcttatctactttggaggcctgtctggctcctttctctacacaggagtcctcatctagccactgaagcagagtgcccacatcaggagcagccagtgctcaagctcccagaaactgcctagtgacctgccttctagacctgcctcctgagaatggggctggccaccttcgaggagagggaagtgagccccttcctgcctcggggtgggcagcatctggagctgacaattgt

SEQ ID NO: 33393 - DNA, 3646 bp, Homo sapiens
  source 1..3646: mol_type = unassigned DNA
gcgggcctccagaggccggcgcacaagatggcggctctggcggcctaaagaaggcggccgcggctcagccgtgggctctaacgcggggctgggggccggagacagacttcgcccaggtgacgggtagtaggggcggcgccgcttggcctcgtggggtgtaagacccacttgctgttgcccccggaccttgccgccacaccagccctgtcctggggcggaaccgaaggaaggtcgggccctgctgccccgccccgtccttcctccttcccgggcggtcactgtgcgtggctcacttttagagtttacttcaaccacgtggagcttccatggcggcctctcaggtcctgggggagaagattaacatcctgtcgggagagactgtcaaagctggggacagggacccgctggggaacgactgtcccgagcaagataggctcccccagcgctcctggaggcagaagtgtgcctcctacgtgttggccctgaggccctggagcttcagtgcctcactcacaccggtggccctgggcagtgcccttgcctacagatcccacggtgtcctggatcccaggctcttggtgggttgtgccgtggctgtcctggctgtgcacggggccggtaatttggtcaacacttactatgacttttccaagggcattgaccacaaaaagagtgatgacaggacacttgtggaccgaatcttggagccgcaggatgtcgtccggttcggagtcttcctctacacgttgggctgcgtctgtgccgcttgcctctactacctgtcccctctgaaactggagcacttggctcttatctactttggaggcctgtctggctcctttctctacacaggaggaattggattcaagtacgtggctctgggagacctcatcatcctcatcacttttggcccgctggctgtgatgttcgcctacgccatccaggtggggtccctggccatcttcccactggtctatgccatccccctcgccctcagcaccgaggccattctccattccaacaacaccagggacatggagtccgaccgggaggctggtatcgtcacgctggccatcctcatcggccccacgttctcctacattctctacaacacactgctcttcctgccctacctggtcttcagcatcctggccacacactgcaccatcagcctggcactccccctgcttaccattcccatggccttctcccttgagagacagtttcgaagccaggccttcaacaaactgccccagaggactgccaagctcaacctcctgctgggacttttctatgtctttggcatcattctggcaccagcaggcagtctgcccaaaatttaaggggacaagtagctccccccacgacatgtctccctttcttagaatatattaaagtcagagtctctgaggaaggaatgtgatttggcagtcagggtactaagcatgggtgggaactcctgccttataaaaattgtttttgtgttcttaaagataatatgttgtttttctgttttttgttttttccattttatggggaatttaaaaaccattcttgtatcagaaggtgaattaggcgcatggtctttgttttattaataatttccactagagggtgttctcaggtcactttgcagtgaagtggacttagttcctccttgttctgtacaaaatgtctccagactttgtaaaggagctgcccagtttggcctcctgtcccgaaaagaccctaataactaggcagagtgttgtcctgctttcttcgtctcgtaggatgtgctatgattggtgccaggcctcactaacacaggggctacctgtctcttattctcagcacctgtgtcctgagatacgctgcctgagacagagagagtccctcattaacagcctgtgtggctgtcagctttttgcctaaattgtgattcagatgcttttgttctctctcctttcacttattgccacagttgaggaaaagtgtcagattaccctgcagcaagacaagccaaggactgggagggaaaaaaaaaccactctggaggcaactgagaaaatcactgcttttggataggaatcagtagggtggctgttttccctttgttgaatctactagagtgacaggaaggactcccagccctttcagtaactatcaggagccctgaaacggtagaggcactgccatccttgtgggatactcaaagcccacagggcttttccctccctattgcatcttctgatgctccccacacctaccctccacctctccacctctgtggtgttcccatttgtgtgtttcccatctgtggagccagactgagcaatagcttagcagcgagtcagggacagctgccactttccacagagccacaggatgggcagagcagggacccagggaatgaatagccagtggacaaacagtcttgagctctgttcagccagagtgatgggccctgccagttaaggggctgtgtcttcatccttgaagacagatgtgcaatattgaccctgcctctccccagggctttgtggaaagatagttgagggctttagtgagatcacactcagagtggggcaattccagcatttatcctggctgcgtttcattgcattgtctgtgaagtataatttctgggccagaattgctcagttgcatttgatccaggactatagattggaaatgggtcatcattgttttctgttgtgattatagccattctagtaggcgtttaaggtcatggcctgcagaaaatgatgtaagaactagttcttaatctttcagatcaagctaatgatgatatggaaccttgagttcgaattgattggtttacttggaaaaaaacatgtttgaaaattgcaaaagttccgccgggcgcggtggctcatgcctgtaatcccagcactttgggaggccgagacgggcggatcacgaggtcaggagatcgagaccatcttggctaacacggtgaaaccccgtttctactaaaaatacaaaaaattagccaggcgtgttggcgggcgcctgtagtcccagctacctgggcggctgaggcaggagcatggcgtgaacccaggaggcggagcttgcagtgagctgagatcatgccactgcactccaacctgggggacacagcaagactccgtctcaaaaaaaaaaaaagaaaaagaaaattgcaaaagttcctctaaagttaaatcaaaggtggtttgtctagcagagagccagaatcttctaatagtgggcagagcccagagacaaggggaagaaagatgaccttctccccagtccttcccagcaccatttttgtttcacaccaggcttgtggcattttggtgctcacaggggttttgccttctgacctctccttggagtaggccattctcatgcagggctcaccctgaggcaggaggaccaagggctccctgcgtccacggaccacgtatgccttggtggtcactcccatcggggctatcagttctgcactgtgccctggtgcggattttaatgcatatttttatatataaatgttcccaaaggccaaatttgttgccaggttttatacgcaggtcaccataatttgtattatgttccctgagtcaatgaaggttttctttagacttcttaattaaaaagagaagaaagaaaatgttca

SEQ ID NO: 33394 - DNA, 5972 bp, Homo sapiens
  source 1..5972: mol_type = unassigned DNA
gtcccgcgccgcaagttctcctggggcgaccggaggctgctcccccgaccccctggtgtccccggagtggctgcgcggacgtcgagttggcatttcttcgcttcctcctgggccggcgcgcggcgcggcacaccaggctcccctgggctcggggacccggccatgggccgaggcgcgggccgcccgcccgctgggagccacggcttagcagccgaccgctagctgcgccgccgcccggggaccggcatgaggaccgccgcggggggacgtctgcggcccgcgtcggcgctggggacaaagaagccatgcagtgacacccgctaagacttgttggtagccatgtcggagccccacagggtccagttcacctctctcccaggttccctgaatcctgcgtttttgaagaagtcccggaaggaggaggctggggcaggagaacagcatcaggactgtgagccggctgcagcagctgttcggattacactcaccctctttgaaccagatcacaaacgctgcccagagttcttctacccagagctggtgaagaatatccgagggaaggtaaaaggccttcagcctggagataagaagaaagatctgtcagatcctttcaatgacgaagaaaaggaaaggcataaagtagaggcccttgcccgaaaatttgaagaaaaatacggtggaaagaaacgtagaaaagaccgaatacaggacttgatcgatatggggtatggttatgatgaatccgactccttcatcgataactctgaggcgtatgatgagcttgttcctgcttctttgactacgaagtatggaggattttacattaactcgggaaccctgcagtttagacaagcatcagagtctgaagatgacttcattaaagaaaagaagaaaaaatctccaaagaagcggaagttgaaggaaggtggtgagaagataaagaagaagaaaaaagatgacacttatgacaaggagaagaaatcgaaaaagtccaagttttccaaagccggcttcacagccctcaatgccagtaaggagaagaagaagaagaaatattctggggctttaagcgttaaagagatgctaaagaaatttcagaaagagaaagaggctcagaaaaaaagggaggaggagcataagcctgttgcggtcccatcagcggaagctcagggcctgcgggaactggagggtgcctctgaccccttgctctcactctttggctctacttctgacaacgacttgctccaggcggccactgccatggactcgctgacggatttggacttggagcatctgctcagtgagtctccagaaggaagtcccttccgagatatggatgatggaagtgattcccttggggtgggattggaccaggaattcaggcagccctcttctctccccgaaggcctgccagcacccctggagaagcgcgttaaggagctggctcaggctgccagagctgctgagggggagagcagacagaagttcttcacccaggatattaatggaatcctattagacatagaggcgcagactcgggagctgagcagtcaggtccgctctggggtgtatgcctatcttgcgtcattcctgccctgcagcaaggatgccctgctcaagcgtgctcggaaacttcacctctatgaacaggggggccgtctgaaggagcctctccagaagctcaaggaagccattggcagggcgatgccagagcagatggccaagtaccaggacgaatgccaggcacacacgcaggcaaaggttgccaagatgctggaagaggagaaagacaaggagcagagggaccggatttgttcggatgaggaagaagatgaagaaaaagggggcaggaggataatgggacctcggaagaagttccaatggaatgatgagatcagggagctactgtgccaggtggtgaagatcaaactggagagccaggacctggagaggaacaacaaagcccaggcttgggaggactgtgtgaagggctttctggatgcggaagtcaagcccctctggcccaaaggctggatgcaggccagaactctgtttaaggagagcagacgaggccatgggcacctgacttcaatcctggccaagaagaaagttatggccccttctaaaatcaaggtgaaggaatcgtctacgaagcctgataaaaaggtttctgtcccatcaggacagattggtggccccattgctttgccctcagatcaccaaacaggaggcctgagtattggggcctcgagcagggagctcccatcccaggcatcgggcggccttgctaaccctcctcctgtcaacctggaggactcattggatgaagacttgatccgcaatccagcctcctcggtggaagccgtgtccaaggaattggctgcattgaatagcagagcagctgggaactctgaattcacactgcctgcaccctcaaaagcacctgcagaaaaagttggaggcgttttatgtacagaagaaaaaaggaactttgcgaagcctagtccttctgctccaccaccagctagctctctgcagtcacccctcaattttctggcagaacaggctctggcactggggcagtcctctcaggagaaaaaaccagagagttctggctacaaagagctgtcctgccaggctcccctcaataagggcctgccagaagtacatcagtccaaagctaagcaccacagcttgccacggacgtctcacgggccccaagtggcagttcctgtgcctggcccccaggtcaaagtctttcatgccggcactcagcagcagaaaaacttcacgcccccatctccatttgccaataagctccaaggcccaaaggcttctcccacacagtgtcatcgttccctcctgcagttagtgaagacagcggccaaaggccagggcttccatccctctgcaccagccacctcaggaggcctgtcagcctccagcagcagctctcacaagaccccagcctcgtcctcttctgccctgagccatccagcaaagccacattcagtcagctctgcaggctcatcttacaagaataatccctttgccagctcaatctccaaacatggggtttcttctggcagctcttcctcgggaggaacaccagtccagagttctgtttctgggagcctggtccctggcatacagcctccctccgtgggacaggccaccagccgacccgtcccaagttcagcagggaaaaaaatgcctgtttcccagaagttgactctggtagcccctccaggcggtccaaacggagattccagtggtgggacccagggagtggcaaagttgctgacctcgccgtccctaaagccctctgcagttagtagtgtgacatcgtctacctccttgtcaaaaggagcgagtgggactgtgctgctggccggctcctctttgatggcttcaccctacaaatccagcagcccaaagctgtctggggccatgagctcgaactccttgggaattataacccctgtccctattcctgtccatgtgctctccttcagcgctgactcctctgccaaagcaggggtctccaaggatgccatcgtcacaggccctgcccccgggtccttccaccatggccttggccacagtcttctggctggcttgcactccagcccgccccatgcagcgcctctcccacacgctgcggtgcccacccatatcccgcagagtctgccaggtgcttctcagcttcacgggaaagggcctgctgtaccacggaaattgtgaccgcttcagaggcaaggcttgccacttgggtctgggtggaatcagaacgtgcaggtctcccaggatgtacactcactgcgccctttctgctgcttggtgttcttctggaggagcgtgagttctcagcggagcgcttctcggcacttctgatgtgcctcccatggagggagccgggcccttgctgctcaggaggtgcagactgccccgtgctctgggccttgcagctctgtcgctagacggttgttagaggggcagctctaggctggggcttgcgctgggccgtggtgggaggcacagtgtttacaggctctggtggcagagcagttggcacacctgtgggtgaatctgcctgatcccctggcatttggtcagagtacctcagagcaccccactgctcaggggctccttctggctgcagtaagctccctggatggtcacagtgccgccccatccccaggctgtgtgctcaaagcggacaaaactcaggccagagccacagctgggagacctgcactgtccctgcgaaatactaagaacacctagggtgtgctcactgtgggggccagtttctcctcggaacatgacaatgaagctcttttagagaaaagacctttgtagattcaacaattatgataggatttttacagacacctattttgggctcagttttcatcattaccattaaatgcattggatagaaggggactgttcttcacacatcatattataggaagacataattccagtgcctttatggtggagcagaattcgacaacacatgtccattcagccctctgaatggatctgagacgaagacctttttaaagatatgtctgtattgaagagaaagccagttttgagttttttacacttgcacatcattatctgtgccgtcctgactagaaggttgtctgggcccccaaattccaagtcccagtatagccagggctcccattttgtttttccagagttcgtggaggtggactgcagagcccagagcccttcatctctctgagggtcaaggataccaggggtcccaagtcacagatagacattccagtttgtattcttaggaatcattcttaggcagtgcggcagaagcaggcctctgtgaagtgtctgccgggtagaaataggccttgaagtcctggggctctccaggcagtggggttatgtgtcgactgaagggtgatgtgcagaagagcttggagagtggatcagagagactaggacagttactgcagagctcctaagtcaccactcaaccagtggctgtttcacaaggatttgagggcacttgcctgtcttgtgaggtctgtgccacaaggtgagtctgaactgactgctccagctaagtgatcaggcacgttgagagtatacggtgtcctcagcacatacacctgtgggaaaacggaccgctcttggctcctgactcccagggtacagcgcccagtaactcatccttcattcagaggtttgctggccttcccggtttcccaaggagcaagacctctgtccgccctttggcccggcctctgctctgtctcctttttttacataagaaccaatccgtgtttcacattgggctaagtggattccttatccctttgttatatatattttttgcaacttggatttccagtttgtttacagagtagtcttaggtagtagcaaaagagccaaagaagagatttgtattgctgagctcaaagccaagcagaggccggcagtggaggctgagcagggactctccaggcttctctgcccataaacacccgggtcccaggccctccttcctttccctttggtgctccctcctccccacgtaccattgcgcgtgcagctggagcagaataccctcatttttaggaatctagtgatgcctcttgcctcagggaaacgtttctttgatggggagtttgagatttcttttccttgtttatgctttatttgtggtaatgaaagagcgaatgactgaacagccatggcaaggcagacctacaggcgaggccgcagcagagggtggggcagagcagcctcggggtctgggggctgcaggggtttccctggcgcagcgaaagtctctgagcacttaccgggcgtgaccgtttcttaggtgtgagaggggctgtggcttttgtgcagcgactatgttggtgttaggggtggtgtggagattgttaatcttgtataaagcaattcaataaattgtttcaaggtttccaaaa

SEQ ID NO: 33395 - DNA, 6336 bp, Homo sapiens
  source 1..6336: mol_type = unassigned DNA
ttctgtgaacatttggaattctgtattcaaaatctattttgaccattcccaagtgattttgaaggtctttggcatgtcataatttgttattttgtcaaggccagtgtttgggtgtgagagtggtgcacagggcaggagtgtgtaactttgttaggaagtgagcctagccacaccctcctgagtcactggttctttactatcctggggtaggcaatatcttttgttcagctgataaaagctttgtcattgtgaagattggctcccaatgataggaaactgctggtgatgaaaataaaggggtcttaaagattattctcagccagaaaaaataagtgttagacaaattaaatggaaaataattaatattttagtagtctttacaatttggaggtctaaggctctgtcagcatgggttctttaaggtcaaggatctaggatacacatgcacaggaaaaaagactggaagtatgctaagcagtgactatctctgaatgattgtgaaaaaattttaggatgaataagcagaaaaaaacaataaatgacaaaatataacaatggagttttcttgacaatgaaattctcttaaacttaaatctctttaattaggcaggtaaactattttatcatcttcgtttgacctggcccttcttttcaatgttaacagaagccatgcagtgacacccgctaagacttgttggtagccatgtcggagccccacagggtccagttcacctctctcccaggttccctgaatcctgcgtttttgaagaagtcccggaaggaggaggctggggcaggagaacagcatcaggactgtgagccggctgcagcagctgttcggattacactcaccctctttgaaccagatcacaaacgctgcccagagttcttctacccagagctggtgaagaatatccgagggaaggtaaaaggccttcagcctggagataagaagaaagatctgtcagatcctttcaatgacgaagaaaaggaaaggcataaagtagaggcccttgcccgaaaatttgaagaaaaatacggtggaaagaaacgtagaaaagaccgaatacaggacttgatcgatatggggtatggttatgatgaatccgactccttcatcgataactctgaggcgtatgatgagcttgttcctgcttctttgactacgaagtatggaggattttacattaactcgggaaccctgcagtttagacaagcatcagagtctgaagatgacttcattaaagaaaagaagaaaaaatctccaaagaagcggaagttgaaggaaggtggtgagaagataaagaagaagaaaaaagatgacacttatgacaaggagaagaaatcgaaaaagtccaagttttccaaagccggcttcacagccctcaatgccagtaaggagaagaagaagaagaaatattctggggctttaagcgttaaagagatgctaaagaaatttcagaaagagaaagaggctcagaaaaaaagggaggaggagcataagcctgttgcggtcccatcagcggaagctcagggcctgcgggaactggagggtgcctctgaccccttgctctcactctttggctctacttctgacaacgacttgctccaggcggccactgccatggactcgctgacggatttggacttggagcatctgctcagtgagtctccagaaggaagtcccttccgagatatggatgatggaagtgattcccttggggtgggattggaccaggaattcaggcagccctcttctctccccgaaggcctgccagcacccctggagaagcgcgttaaggagctggctcaggctgccagagctgctgagggggagagcagacagaagttcttcacccaggatattaatggaatcctattagacatagaggcgcagactcgggagctgagcagtcaggtccgctctggggtgtatgcctatcttgcgtcattcctgccctgcagcaaggatgccctgctcaagcgtgctcggaaacttcacctctatgaacaggggggccgtctgaaggagcctctccagaagctcaaggaagccattggcagggcgatgccagagcagatggccaagtaccaggacgaatgccaggcacacacgcaggcaaaggttgccaagatgctggaagaggagaaagacaaggagcagagggaccggatttgttcggatgaggaagaagatgaagaaaaagggggcaggaggataatgggacctcggaagaagttccaatggaatgatgagatcagggagctactgtgccaggtggtgaagatcaaactggagagccaggacctggagaggaacaacaaagcccaggcttgggaggactgtgtgaagggctttctggatgcggaagtcaagcccctctggcccaaaggctggatgcaggccagaactctgtttaaggagagcagacgaggccatgggcacctgacttcaatcctggccaagaagaaagttatggccccttctaaaatcaaggtgaaggaatcgtctacgaagcctgataaaaaggtttctgtcccatcaggacagattggtggccccattgctttgccctcagatcaccaaacaggaggcctgagtattggggcctcgagcagggagctcccatcccaggcatcgggcggccttgctaaccctcctcctgtcaacctggaggactcattggatgaagacttgatccgcaatccagcctcctcggtggaagccgtgtccaaggaattggctgcattgaatagcagagcagctgggaactctgaattcacactgcctgcaccctcaaaagcacctgcagaaaaagttggaggcgttttatgtacagaagaaaaaaggaactttgcgaagcctagtccttctgctccaccaccagctagctctctgcagtcacccctcaattttctggcagaacaggctctggcactggggcagtcctctcaggagaaaaaaccagagagttctggctacaaagagctgtcctgccaggctcccctcaataagggcctgccagaagtacatcagtccaaagctaagcaccacagcttgccacggacgtctcacgggccccaagtggcagttcctgtgcctggcccccaggtcaaagtctttcatgccggcactcagcagcagaaaaacttcacgcccccatctccatttgccaataagctccaaggcccaaaggcttctcccacacagtgtcatcgttccctcctgcagttagtgaagacagcggccaaaggccagggcttccatccctctgcaccagccacctcaggaggcctgtcagcctccagcagcagctctcacaagaccccagcctcgtcctcttctgccctgagccatccagcaaagccacattcagtcagctctgcaggctcatcttacaagaataatccctttgccagctcaatctccaaacatggggtttcttctggcagctcttcctcgggaggaacaccagtccagagttctgtttctgggagcctggtccctggcatacagcctccctccgtgggacaggccaccagccgacccgtcccaagttcagcagggaaaaaaatgcctgtttcccagaagttgactctggtagcccctccaggcggtccaaacggagattccagtggtgggacccagggagtggcaaagttgctgacctcgccgtccctaaagccctctgcagttagtagtgtgacatcgtctacctccttgtcaaaaggagcgagtgggactgtgctgctggccggctcctctttgatggcttcaccctacaaatccagcagcccaaagctgtctggggccatgagctcgaactccttgggaattataacccctgtccctattcctgtccatgtgctctccttcagcgctgactcctctgccaaagcaggggtctccaaggatgccatcgtcacaggccctgcccccgggtccttccaccatggccttggccacagtcttctggctggcttgcactccagcccgccccatgcagcgcctctcccacacgctgcggtgcccacccatatcccgcagagtctgccaggtgcttctcagcttcacgggaaagggcctgctgtaccacggaaattgtgaccgcttcagaggcaaggcttgccacttgggtctgggtggaatcagaacgtgcaggtctcccaggatgtacactcactgcgccctttctgctgcttggtgttcttctggaggagcgtgagttctcagcggagcgcttctcggcacttctgatgtgcctcccatggagggagccgggcccttgctgctcaggaggtgcagactgccccgtgctctgggccttgcagctctgtcgctagacggttgttagaggggcagctctaggctggggcttgcgctgggccgtggtgggaggcacagtgtttacaggctctggtggcagagcagttggcacacctgtgggtgaatctgcctgatcccctggcatttggtcagagtacctcagagcaccccactgctcaggggctccttctggctgcagtaagctccctggatggtcacagtgccgccccatccccaggctgtgtgctcaaagcggacaaaactcaggccagagccacagctgggagacctgcactgtccctgcgaaatactaagaacacctagggtgtgctcactgtgggggccagtttctcctcggaacatgacaatgaagctcttttagagaaaagacctttgtagattcaacaattatgataggatttttacagacacctattttgggctcagttttcatcattaccattaaatgcattggatagaaggggactgttcttcacacatcatattataggaagacataattccagtgcctttatggtggagcagaattcgacaacacatgtccattcagccctctgaatggatctgagacgaagacctttttaaagatatgtctgtattgaagagaaagccagttttgagttttttacacttgcacatcattatctgtgccgtcctgactagaaggttgtctgggcccccaaattccaagtcccagtatagccagggctcccattttgtttttccagagttcgtggaggtggactgcagagcccagagcccttcatctctctgagggtcaaggataccaggggtcccaagtcacagatagacattccagtttgtattcttaggaatcattcttaggcagtgcggcagaagcaggcctctgtgaagtgtctgccgggtagaaataggccttgaagtcctggggctctccaggcagtggggttatgtgtcgactgaagggtgatgtgcagaagagcttggagagtggatcagagagactaggacagttactgcagagctcctaagtcaccactcaaccagtggctgtttcacaaggatttgagggcacttgcctgtcttgtgaggtctgtgccacaaggtgagtctgaactgactgctccagctaagtgatcaggcacgttgagagtatacggtgtcctcagcacatacacctgtgggaaaacggaccgctcttggctcctgactcccagggtacagcgcccagtaactcatccttcattcagaggtttgctggccttcccggtttcccaaggagcaagacctctgtccgccctttggcccggcctctgctctgtctcctttttttacataagaaccaatccgtgtttcacattgggctaagtggattccttatccctttgttatatatattttttgcaacttggatttccagtttgtttacagagtagtcttaggtagtagcaaaagagccaaagaagagatttgtattgctgagctcaaagccaagcagaggccggcagtggaggctgagcagggactctccaggcttctctgcccataaacacccgggtcccaggccctccttcctttccctttggtgctccctcctccccacgtaccattgcgcgtgcagctggagcagaataccctcatttttaggaatctagtgatgcctcttgcctcagggaaacgtttctttgatggggagtttgagatttcttttccttgtttatgctttatttgtggtaatgaaagagcgaatgactgaacagccatggcaaggcagacctacaggcgaggccgcagcagagggtggggcagagcagcctcggggtctgggggctgcaggggtttccctggcgcagcgaaagtctctgagcacttaccgggcgtgaccgtttcttaggtgtgagaggggctgtggcttttgtgcagcgactatgttggtgttaggggtggtgtggagattgttaatcttgtataaagcaattcaataaattgtttcaaggtttccaaaa

SEQ ID NO: 33396 - DNA, 5878 bp, Homo sapiens
  source 1..5878: mol_type = unassigned DNA
gtcccgcgccgcaagttctcctggggcgaccggaggctgctcccccgaccccctggtgtccccggagtggctgcgcggacgtcgagttggcatttcttcgcttcctcctgggccggcgcgcggcgcggcacaccaggctcccctgggctcggggacccggccatgggccgaggcgcgggccgcccgcccgctgggagccacggcttagcagccgaccgctagctgcgccgccgcccggggaccggcatgaggaccgccgcggggggacgtctgcggcccgcgtcggcgctggggacaaagaagccatgcagtgacacccgctaagacttgttggtagccatgtcggagccccacagggtccagttcacctctctcccaggttccctgaatcctgcgtttttgaagaagtcccggaaggaggaggctggggcaggagaacagcatcaggactgtgagccggctgcagcagctgttcggattacactcaccctctttgaaccagatcacaaacgctgcccagagttcttctacccagagctggtgaagaatatccgagggaaggtaaaaggccttcagcctggagataagaagaaagatctgtcagatcctttcaatgacgaagaaaaggaaaggcataaagtagaggcccttgcccgaaaatttgaagaaaaatacggtggaaagaaacgtagaaaagaccgaatacaggacttgatcgatatggggtatggttatgatgaatccgactccttcatcgataactctgaggcgtatgatgagcttgttcctgcttctttgactacgaagtatggaggattttacattaactcgggaaccctgcagtttagacaagcatcagagtctgaagatgacttcattaaagaaaagaagaaaaaatctccaaagaagcggaagttgaaggaaggtggtgagaagataaagaagaagaaaaaagatgacacttatgacaaggagaagaaatcgaaaaagtccaagttttccaaagccggcttcacagccctcaatgccagtaaggagaagaagaagaagaaatattctggggctttaagcgttaaagagatgctaaagaaatttcagaaagagaaagaggctcagaaaaaaagggaggaggagcataagcctgttgcggtcccatcagcggaagctcagggcctgcgggaactggagggtgcctctgaccccttgctctcactctttggctctacttctgacaacgacttgctccaggcggccactgccatggactcgctgacggatttggacttggagcatctgctcagtgagtctccagaaggaagtcccttccgagatatggatgatggaagtgattcccttggggtgggattggaccaggaattcaggcagccctcttctctccccgaaggcctgccagcacccctggagaagcgcgttaaggagctggctcaggctgccagagctgctgagggggagagcagacagaagttcttcacccaggatattaatggaatcctattagacatagaggcgcagactcgggagctgagcagtcaggtccgctctggggtgtatgcctatcttgcgtcattcctgccctgcagcaaggatgccctgctcaagcgtgctcggaaacttcacctctatgaacaggggggccgtctgaaggagcctctccagaagctcaaggaagccattggcagggcgatgccagagcagatggccaagtaccaggacgaatgccaggcacacacgcaggcaaaggttgccaagatgctggaagaggagaaagacaaggagcagagggaccggatttgttcggatgaggaagaagatgaagaaaaagggggcaggaggataatgggacctcggaagaagttccaatggaatgatgagatcagggagctactgtgccaggtggtgaagatcaaactggagagccaggacctggagaggaacaacaaagcccaggcttgggaggactgtgtgaagggctttctggatgcggaagtcaagcccctctggcccaaaggctggatgcaggccagaactctgtttaaggagagcagacgaggccatgggcacctgacttcaatcctggccaagaagaaagttatggccccttctaaaatcaaggtgaaggaatcgtctacgaagcctgataaaaaggtttctgtcccatcaggacagattggtggccccattgctttgccctcagatcaccaaacaggaggcctgagtattggggcctcgagcagggagctcccatcccaggcatcgggcggccttgctaaccctcctcctgtcaacctggaggactcattggatgaagacttgatccgcaatccagcctcctcggtggaagccgtgtccaaggaattggctgcattgaatagcagagcagctgggaactctgaattcacactgcctgcaccctcaaaagcacctgcagaaaaagttggaggcgttttatgtacagaagaaaaaaggaactttgcgaagcctagtccttctgctccaccaccagctagctctctgcagtcacccctcaattttctggcagaacaggctctggcactggggcagtcctctcaggagaaaaaaccagagagttctggctacaaagagctgtcctgccaggctcccctcaataagggcctgccagaagtacatcagtccaaagctaagcaccacagcttgccacggacgtctcacgggccccaagtggcagttcctgtgcctggcccccaggtcaaagtctttcatgccggcactcagcagcagaaaaacttcacgcccccatctccatttgccaataagctccaaggcccaaaggcttctcccacacagtgtcatcgttccctcctgcagttagtgaagacagcggccaaaggccagggcttccatccctctgcaccagccacctcaggaggcctgtcagcctccagcagcagctctcacaagaccccagcctcgtcctcttctgccctgagccatccagcaaagccacattcagtcagctctgcaggctcatcttacaagaataatccctttgccagctcaatctccaaacatggggtttcttctggcagctcttcctcgggaggaacaccagtccagagttctgtttctgggagcctggtccctggcatacagcctccctccgtgggacaggccaccagccgacccgtcccaagttcagcagggaaaaaaatgcctgtttcccagaagttgactctggtagcccctccaggcggtccaaacggagattccagtggtgggacccagggagtggcaaagttgctgacctcgccgtccctaaagccctctgcagttagtagtgtgacatcgtctacctccttgtcaaaaggagcgagtgggactgtgctgctggccggctcctctttgatggcttcaccctacaaatccagcagcccaaagctgtctggggccatgagctcgaactccttgggaattataacccctgtccctattcctgtccatgtgctctccttcagcgctgactcctctgccaaagcaggggtctccaaggatgccatcgtcacaggccctgcccccgggtccttccaccatggccttggccacagtgcttctcagcttcacgggaaagggcctgctgtaccacggaaattgtgaccgcttcagaggcaaggcttgccacttgggtctgggtggaatcagaacgtgcaggtctcccaggatgtacactcactgcgccctttctgctgcttggtgttcttctggaggagcgtgagttctcagcggagcgcttctcggcacttctgatgtgcctcccatggagggagccgggcccttgctgctcaggaggtgcagactgccccgtgctctgggccttgcagctctgtcgctagacggttgttagaggggcagctctaggctggggcttgcgctgggccgtggtgggaggcacagtgtttacaggctctggtggcagagcagttggcacacctgtgggtgaatctgcctgatcccctggcatttggtcagagtacctcagagcaccccactgctcaggggctccttctggctgcagtaagctccctggatggtcacagtgccgccccatccccaggctgtgtgctcaaagcggacaaaactcaggccagagccacagctgggagacctgcactgtccctgcgaaatactaagaacacctagggtgtgctcactgtgggggccagtttctcctcggaacatgacaatgaagctcttttagagaaaagacctttgtagattcaacaattatgataggatttttacagacacctattttgggctcagttttcatcattaccattaaatgcattggatagaaggggactgttcttcacacatcatattataggaagacataattccagtgcctttatggtggagcagaattcgacaacacatgtccattcagccctctgaatggatctgagacgaagacctttttaaagatatgtctgtattgaagagaaagccagttttgagttttttacacttgcacatcattatctgtgccgtcctgactagaaggttgtctgggcccccaaattccaagtcccagtatagccagggctcccattttgtttttccagagttcgtggaggtggactgcagagcccagagcccttcatctctctgagggtcaaggataccaggggtcccaagtcacagatagacattccagtttgtattcttaggaatcattcttaggcagtgcggcagaagcaggcctctgtgaagtgtctgccgggtagaaataggccttgaagtcctggggctctccaggcagtggggttatgtgtcgactgaagggtgatgtgcagaagagcttggagagtggatcagagagactaggacagttactgcagagctcctaagtcaccactcaaccagtggctgtttcacaaggatttgagggcacttgcctgtcttgtgaggtctgtgccacaaggtgagtctgaactgactgctccagctaagtgatcaggcacgttgagagtatacggtgtcctcagcacatacacctgtgggaaaacggaccgctcttggctcctgactcccagggtacagcgcccagtaactcatccttcattcagaggtttgctggccttcccggtttcccaaggagcaagacctctgtccgccctttggcccggcctctgctctgtctcctttttttacataagaaccaatccgtgtttcacattgggctaagtggattccttatccctttgttatatatattttttgcaacttggatttccagtttgtttacagagtagtcttaggtagtagcaaaagagccaaagaagagatttgtattgctgagctcaaagccaagcagaggccggcagtggaggctgagcagggactctccaggcttctctgcccataaacacccgggtcccaggccctccttcctttccctttggtgctccctcctccccacgtaccattgcgcgtgcagctggagcagaataccctcatttttaggaatctagtgatgcctcttgcctcagggaaacgtttctttgatggggagtttgagatttcttttccttgtttatgctttatttgtggtaatgaaagagcgaatgactgaacagccatggcaaggcagacctacaggcgaggccgcagcagagggtggggcagagcagcctcggggtctgggggctgcaggggtttccctggcgcagcgaaagtctctgagcacttaccgggcgtgaccgtttcttaggtgtgagaggggctgtggcttttgtgcagcgactatgttggtgttaggggtggtgtggagattgttaatcttgtataaagcaattcaataaattgtttcaaggtttcc

SEQ ID NO: 33397 - DNA, 14443 bp, Homo sapiens
  source 1..14443: mol_type = unassigned DNA
atggcggagccgcgcagagtagcgttcattagcttgtcaccggtgcggcggcgcgaggccgagtacccggggcccgagcgtgagcccgagtacccccgcgagcccccccggctggagccgcagccgtaccgcgagccggcccgggcggagccgccggccccgcgggagcctgccccccgctcggacgcgcagcccccgtcgcgggagaagccgctcccccagcgcgaggtcagccgcgccgagccgcccatgtcgctgcagcgggagcccccgcggcccgagccgccgccgccgttcccgccgctgcccttgcagccgcccccgccgcgggagtcggcttcccgggctgagcagccgccgcggccgccgagggagacggtgcgcctggagctggtgcttaaggaccccaccgacgagagctgcgtggagttcagttacccggagctgctgctgtgcggagaacaacggaagaagctcattcacacagaagacccatttaatgatgaacatcaggagaggcaagaggtggaaatgttggctaagaagtttgaaatgaaatatggtgggaaaccccgtaaacaccggaaggatcggctacaagatttaattgatataggctttggctatgatgagacagatccatttattgataactcagaggcttatgatgaattagttcccgcttctctaacaacaaaatatggaggcttttatatcaacactggcactctacagtttcgccaagcttcagatactgaagaagatgatattacagacaaccaaaagcacaagccacccaaggtccccaaaataaaagaagatgatattgagatgaagaagcggaagcggaaagaggaaggggaaaaggagaagaagccaaggaaaaaagttcccaaacaactgggagttgtggctctaaattcacacaagtctgaaaaaaagaagaaacgttataaagattctctttctctagctgccatgattagaaaattccagaaagagaaggatgcattaaagaaggagtctaaccccaaagtcccagtgaccttgtcaaccccttctctgaataaacccccatgtgctgctgcagcactggggaatgacgtcccggacttaaatctgagcagcggtgatccagaccttcccatttttgttagcacaaatgaacatgagctgtttcaggaagctgaaaatgccctagagatgctagatgattttgacttcgacagattactggatgctgcttctgatggtagccccctatctgagtcggggggtgaaaatggaaccaccacccagccaacctacacttctcaggttatgcccaaagtggtacctacactcccagagggtctacctgtacttcttgaaaaacgtatcgaagaccttcgtgtagctgccaaactttttgatgaagaaggaaggaaaaaattctttacacaggatatgaataatattcttctggacattgagttacagctacaagaactaggccctgtcattcgcagtggtgtctactcccaccttgaagcttttgtgccatgcaataaagaaacactagtaaaacgtctgaagaagttacatctcaatgtccaggatgatcgtttaagagaacctctgcaaaaactgaaactggctgttagcaatgtcatgcctgaacagctatttaaataccaggaggactgccaggctcgtagtcaagctaagtgtgccaaattgcagacagatgaagaacgagaaaaaaatggatctgaagaggatgatgatgagaaaccaggaaaacgtgtcataggaccaagaaagaaattccactgggatgacactatcagaactttgttatgtaaccttgttgagatcaaattgggatgctatgagttagaaccaaataaaagccagtctgctgaagattatcttaagtcttttatggagacagaagtgaagcccctgtggcctaagggctggatgcaggcaagaatgctttttaaggaaagccggagtgttcataatcatcttacttctgctccggcaaagaaaaaggtgattcctgcacctaaacccaaagtaaaggaggtgatggtaaagacccttcctctccattctttccccactatgcttaaggagtgtagtccaaaaaaggaccagaaaactccaacatccctggtggcttcggttagcggtcctccaacgagctccagcacagctgccattgctgcagctagctctagctctgcaccagcccaagaaaccatctgcctcgacgactcactagatgaagacctttctttccattcaccttcactggatcttgtttctgaagctttagcggttatcaacaatgggaacaagggccctccagttggctcaaggataagcatgccaaccacaaagcctcgtccaggactgagagaagaaaaattagcaagtatcatgagtaagctgccactagctactcccaaaaaactagattctactcagactacacattcttcaagtcttattgctggtcacacagggccagtaccaaagaaaccccaggatttagctcatactggcatctcttcaggccttattgctggttcttccattcagaaccctaaagtttctttagaacctttgccagccaggctacttcaacaaggacttcagaggtcaagccagattcacacttcttcctcttcacagacccatgtctcctcttcttcccaagcccaaattgctgcctcttctcatgctctgggaacatccgaggcccaagatgcttcttcgttaacacaagtaacaaaggtgcaccagcattcagctgtccagcagaactatgtgtctccattacaggccaccatcagtaaatcccagaccaaccccgtcgtgaagttaagtaataatccccaactctcctgttcctcctcacttattaagacttcagataagccacttatgtaccgccttcccttatctaccccctcacctggaaatggttctcaagggtcccaccccctggtttctaggacagtacctagcaccactacctccagtaactatttagccaaggctatggtgtcacagatctccacgcagggtttcaaatctcccttctcgatggctgcctccccaaaacttgccgcatctcccaagcctgccacatctcctaaacccctgccctcgcctaagccttctgcctcacccaagccctctctgtcagctaagccttcagtatcaactaaacttatttctaaatccaacccaactcccaagcctactgtatccccaagtagttccagtccaaatgcactagttgcccagggtagccactccagcactaacagcccagtccataaacagcccagtggaatgaacatcagcagacagtctcccaccttgaatttattgccctctagtcgcacttcaggccttccacctacaaaaaatcttcaggccccctcaaagctaacaaactcatcatccactggaactgttgggaagaacagcttgagtggaattgcaatgaatgtacctgccagcagaggtagcaaccttaactcaagcggagctaataggactagtctgtctgggggaacaggaagtggaacacagggtgctaccaaaccattgtctactccacatagaccatccactgcctcagggtcttcagtggtaacagccagtgtgcagtccacagcaggagcatcattattggctaatgcctcacctctgactctcatgacatcacctttgtctgtaacaaatcaaaatgtgactccttttgggatgctgggtggccttgttccagtgaccatgcccttccagtttcccttggagatatttggctttggaacggacacagctggagtgacaaccacctcgggatctacctcagccgctttccaccatagcctaactcagaatttactaaagggtttacagccaggaggagctcagcatgcagcaacgctttcccactcacctctgcctgcacacttacagcaagcatttcacgatggaggccaaagtaaaggggacactaaattaccacggaaatctcagtgactgcccagcaagcaaaggagacgaaatgtttagttgactgatggaatctacctgatgggaaagtacttatgtggtcatagggctgctgtttctgtcgatgtttacattctctcgtcccaagcactgtggtgaggaggaaaaagaaaagaaaacattacttgagcaaagccaggtgcaggaggaagaaatgcttttgtgcaaagttagtgacctttggtctcttctaaagaatgacagagttaccgtattaacagacttgaaagagactcagttgtcaaacccacagaaatacaaatttgatttttcccgggggaggaagaaggaagtgaagagaatttgggtaaactccatccatcctgggggttggatctgaacacttacagacataattggtaataaaaggcattaaaaactggaattaggccagtttgtcaggaataatgatcatgtctatttgaatggactgtgtagcagatttgccacaaaaagaaataataatgattctatctccgatagacagtagctgcatagcacaccctcgaaaatcctgaacaaacttgaatctcctccagtgtgtagcaacttccctcaatcagtggactaaagatccttcaggaaagttattttagcacagtgatatatattattaaatcatctagatttttaaaaatcaggaagttgagcctgttgctcttaagagatgaaacctagatgtcccctttttgtaaaagggtcaatttcatcttccgttcagaagcaggtacttaactcttttcttcaggtgatttgtgcatctagtattgactggttaattcttatttccattcttgatgttaaaatgtgactgtgttcacatttttctcctgagaaatggggatctttacagggttattgctttgctgcttttagcccttgcagcaacataaactctaagtttccccagttcatctaacttcacaacttctccttctgttcttttagctagtggtccttcaggtgattattagctattggtataaacaggtagaagtgtacactatgtttcttcattggtcattcaaatggcatgaatatagtttttgaatttttaagatggtattttaaagggaggaatcacattaggatcacaatcacgacatatttttactccctgtatccagtgtagtgaaattgtttggagcatttgagatcctaaagcttcactatttactcagtgtattggtatgtgagtaaatctgcagaaaataagactccttagttattatagcttccttatgcaaatagcatattcaacaaaggatgttaagggaaaaatttatggttctccttggatacatttgatttgatgggtttttttgccgcattattctagttttttaagcttctgaatattttcatactatatcagagaatggtgtaaactctaaatggtataagcttcatccatttataatgacactaacctaaaaaaaatagactggtagtgacaagatttattgcatatgtgtttattatacattaccctataccattagatttactcaattaagagtattaaccaggcccttttttcttttatacacaaaagtcccagataccctacaggactgtgaataaataaccacagatcggttcagatctgtatgcctatattttgacttcaaagtcacattggcttgcttcatagcgaaaaagttaataaataactgaaaactttagttccaagaacttgttacagtaaagggaaaggattatttcaaaggaatcactgatataatttcttgactctaagaatttagtttatcaataaaacaaatatggatgtagtatgaaccccagtagatattttggaaggatactgggaggatgttgcagagaggtttgacttgaattcagtatgtttgatgaagatttgcttggtttcaattaaggaagcttgcccaatttttttaattttttcaaatgtagtggacctcttgcttttacgaaatatgaataaaaaggtctttgcttcatactaggggaagtgatgggattttcctttgggaaggtagcctttgttttacttctcataccacaagagaagtcgaagtgcgtattaatttctcttcctgaatacttgtatatatgtttgtctgtatgtatatatacatacacacatacattcatataaatgactagtttgagtcaaaaaatcatttgaatttcttaaaaccatcaattctgaatcatgccatatgaagatccctggtgactgtcatcattagaaaagaacaagataatcagttcttttccctgtaacattttatactaaccagtaaaaatatctgaaggcccttggctccaagaatacaatgtggagattcttctgtgttctctttagtcttgattccttgaggactactgtcagatccctaccttaaacccccacctgcactgacgacttacattcatttcagtcaggaccccccttttatgttgtatgaatcagtcaaacatcgttgtatttctgtatagataaagtatgatcagagagtttctacatgtaaatagtaatctatttctttcctagatcataacattgaaaaaggtgcccatactttatggtcacctgtctttaccgtttttattactaaaaacaaacatataaattggttattttttagcacagagacttgtgactcatactgtatttttgcacttaaaaatcaaattatgttattttttaaaatggtgagtcattggaaaggatatctatagagcaacgtgtatttctgaagagcattagcaacatccaaatgcaaaaataatcagcacacatgattatatcccactccttgggattcttgattcaggaagattaagctgtttgttttcaactgttttatattttaaattgccttcactgatatataagctgttactgtacatacaagttaatcctcagtattcacaagcaataacagtcagcagggttgtcctcggagatagctgtgctgagcctcagttggagactgggagcaaagtgtcaagctcattcagagcatccagaataaatgcaagcaataatttccattataattcaattataattcttgtatgcttttgaggtcagagggtaaatgaaatcgtgattttaaaacagcctgaagaaaaaggttttgggaaaggaaatgaggctaatctgtagtcataaaattctgatactttgcggaaattagaagatggtgatagtgcattcttttgtgcccaccccccctctgatggatgttgttagcccaaattacatttttcatatcatggacattgaatagggtttattgaatcaggaaggtaaggggaagaaccgggcacatatgtgttggaatactgtgggtttgacacctggttgaaaacaacttattggacatgatttttaacccaggatatttttttcccaaagcagatctaaattgtttactacccagggttggaaagggcaggcacctctaatctagtctttgtcctctggttgccctctcccacacccctttccacctatacttggttcaagacattttctgaaacgaaaattctgctgttgttcaaactgccattggttatgagaactctgcgtcctttgggatcatctcttagaactccagtgatctatcatatttgctgctacatttgtaaaatgaactttgcctgtattggttgactttaatttacagttctttatttctaggatgttttgtcctctagtttgactcatgtatagaattaggatactttattttaggagtgtaccgtaaaagcacactggtccctttgttgtttttattatttaggtttggaatttgtttgctttttttttgtttgttttttgttttgtttctgtttttgtttttttttaaagttggaaatagaagaatgagaaaaatctataatcaggccaaacttgagaactttcctgtgcttcagcactgtaattctgctgacctaatgttctcaaaagaggcacttttactttctattgtgcatgtatgattgttgttttttgcttttgagggggcttttgtgtttgtaataatgaagcagaagaaaagtgcagtagtagataaatgatcacaacatgttatgcaattttattttataaaattttaaggggaaaagtttaactctttgtaaatcatttcttagctctggtaaaatgcttatattactcctctaaaacatgctcaattcaggcctttgtctttgttaagtgccttttttctttcttttttcctctcttttgaaactgttgtcacattatcttaaagtacagactgataagtcaggggattcaggaggaagaatctcacacttgtcaacatcatgtcatgctgtgtaaccctcttcctttgctttctatgtatatggatatatgtgtaagatacatacattacatatatataaaactaggagctgctgtaccattgcatcctttccaaacactcccctttccatgtttgcaaaacttctgccttgtttattccattgcttttagttgattaaagtgggtggattagaaaagtatcttttcggccgggtgcggtggctcacgcctgtaatcccagctctttgggaggctgaggcaggtggatcacgaggtcaggagatcgagaccatcctggctaatatggtgaaaccccgtctctactaaaaatacaaaaaattagccaggcgtggtggcaggcgcctgtagtcccagctacttgggaggctgaggcaggagaatgacataaacccgggaggcggaagttgcagtgagctgagatcgcgccactgcactccagcctgggcgacagagcaagactccgtctcaaaaaaagaaaataaaagtatagaaaagtatcttttcacaagaggccaccttcgccctttgaatatctgcttgtagaagttaacaataacaacacacacacacacacacacacacacgtcagttactacaagtaaaataaacttagtgaatcattgactattcttggatataacccacttttctgtgctctttaaacttggcataagtaatataggagacagcattggaataacaagagtaccttgcaagtcacattggtaaggtgcgctagactaaacatgtgacaaggctagcgttagaaccgcagtttggtgtctaagtttagaagcaggttagcaactgtcaacatgaaaaatgtatcatattttcttctggaaaatgatttttgaagaaatcatatagctgcatatctatctgttaaaaggttaataaactcagaagtagaaagacttcagatgctgaggaaaacatataatctatagcattcttgagagattttccatttgctttttatttgctagataattacatttggcttaatctgattttatggttatttagatttctcccttgagcaaaataacataattttcagtatctaagattcatcgattttttgttgaaaacaaatagatgtgacatgttaagggagaccaagttgaaccatccctcagacccagtacaaatatacctagtaagtgcccccctttcaatacattctaattgggaagaagaagagactagtggcttaaaaggagaaagcagaagctcctggtagtgttacctgatagcagaacttaccaggcagttggaattcacgagtgttattcttgaatgactatgtctagggggaatattgtttaaccttcgtgcctcagattacccattagacaattgggtataatcatattcacctacctcccagggatatcagagactttactatttcaaaaatattttgagtttttgtaaaatgtcctatataattaaaaatagtattatcatcttcctgcagaggctaaaaaatgttttccttataatgagtataaaaagcaccctatggtttttaaatttaaaaaaatcactggaattttaatttagatacatatttgttatttaaacattatctttgaggtgggataaaatgtttagtttcaggttaacaagggagagaaataacactaagtttaagtagttttttttagccttttacggtgttactgtgatttttcgtcaaggttgtggagctaaagttagataaagttatgatgcttggttattggagttgataaatgatcctggaagttttaactgtctcacttttccatcttctcagtctaatttccttttattgcttgtttgaggacggatagctaagctttttaactttctaagaatgagtatgatgtctcattcttgcaaatcagagattgtgtactaattccattaactgtaggtgtatccagctctgcactgaaggggtgagcactacacacagtcagctggatactcttgtagccattgcacctttgtaattcatgcttcttcaacccatgaaagaggtggagccatcagctgctcaggttgtaagaaaatgggagacggaaggcaggattcactttctaactgggtcggggtggggaaggtcagggtagaaggaaacatgttttccccagctcccaggaggagacgaagatcattttatcccaccttccatccctgtatattaagtagtactactacatagaattttcccgttatcgtttaaaataatagcaacaggaaaagaaaaatggatgctgcagttttagttggggctaaatgctgagcaacgattgttggagtgtgtgtgtaaatttaaattgtagcacatattcagggtcaggaaagcaaaatgttggggatgaggaaccagtgttaccaggttcaagtgagttagtagaaagcaccaggtccaagcagacaaagcatctggttaatttccagaattggctaaggtccactgaatctctaatgatagggtgtgtgtgtgtgtgtgtgtgtgtgtgtgtgtgtctgtaagtcactttttggatttttgttgctttttccagataaggccttagtagcctctaaatatcaactatgcagataaacatactccttttttttttcacatgtccctgtcttttccattctcagataacaaatgttaagacccaaagaaataaggcataagggtttttgttgaatgtgtgtttgttcttctagggaaaattaacagaagcataaaatagagatactttgtgtgttcatctatcgtaaaatgtgaactctgtattcaaaaactatctacagatgctttcactggtgcaaagctgtagttagtatcatggaatgtctttgggttgttaatgataaaatcatcccagtgttcaattctgagagttttagattatatgacacaatgttcaggtttatagagctgaatgggtgatcaaactctaattaaaaatagctttgaatattaatgttgaattcttctttcttggtttcctttagtcttcattctttattcagagctcttaatcatattgctacactagaatatgaattgtatattaggagtctggggaggaaaggttaaattgtcttttacatcctcttctcactcactctggcaacctatcctgtgtccccatagaactgagaagtaaagccctgtgcaggcctgctttagaagactttacatcccagcagaggattcaggcagggactctcaggattttaatcagactgcctttgaataatgtgatattaaattttatttttctcatagactctcaaagtaccacttgcttgaaagtagctacttgtgatctttaatttccttatattgtgatagttctacttttcagtctttcctgtgtatctccatttcatagtgcgttagtacttaaacttcggacacttttccaaactgttaaacaagtcaggaatgcttttcagaatcgcagtagtattattagggtctctgtgtctaggacttacagtcatcagtggtcatcactgggactagaggtgttcttttttttcctcttctcctttgtattaaaaaatagattttgctactgtataatgcggcatttcatgacttcctcttgttacttttcaaggttattctaaagagatggagatcttcattagaggctatttctcataatagtctgccttgcttattttcatactccccctgaaataagcctacttttgcaaacaggccatatgaatcaaattttatgtttgttcctcacaaaattttctacacattatttgttcccactttgctaataataatataatgattttattgtaaatctgtgttttaaatattttataacagagcactaatggaaacctaataaatacaaacaagataactattacccaagataacatggaaatacttctgtttttgaagttaacaacaccgtctgccctcaaagcacatttaggagtatcaaccaagaccagccagttgacatgtttttctgtgtggcaacctgcccttaaattgtcagatcttaactatcttgtgtttgctgtgcttgcagccataagctttcctccttttttgcttatccctgctgtttgtagggttagtgtgccctctgtcagaaaattgggttttctttactatacctgcaaaattaccaagggttaccccaatattgtctagaggaattaaaaagaacttattctcagttgacaaaagtattactgttatacatagttaattggaaagttggccaactttggtcacctatttttgagtcttggctatgcctttgtaattagttacatataccttctgagaccttcagataatcaatgggcctttccccattagaggtaggttcccagcctacaagtatttcctgtgatccatggcaagcctccagagaaaagattcaagctttgcactgcccttttgttgattgtcattgaaaacttactttatttcagaaagtatcaaaaataccaaattggtctttcagagagtatgtaaatctggggcttgcccttggatttcacttgttaaacaccctcaaacttaaaagaagaaaatagatctccagctggtgaaaattttgtgccccaaataatatattaatccaagtctaccaaggtaactaagtaatggatgttttctctcttttattacaagcaagaaagttcatttgcagttgtaaaaatgattaccgaactccagacctatttgctataactgattggaaataatgattctgatttttagtctgggtaaacacatacttcggtgtgaattttgataagggaaagacttgtttggtagcccaaggaaaaacaggatgtatttatacagtgaatgttcactctgcagaggaacttccctccagttacatcttcctcatacattagccacctccacacttgacatagatgccaacatgtttcaaaaccaatcttgaaggagcctaaagagttgatggtcctctaggtgaaagacaagaattactgtattgcatttgcttatagggaggtgtgtttttgctaacttgaagggatatactgtatttcaaataagtgtgtgacttaatattttgggatttttttttcctcctttaaaaactggacctgaacacaagctttgagttgatgtttgtaataatctcaggacctgaaagattgtagcatttagtgtgtcttaaaaattatgtactgtaccagccatggatttttgtaaatatacctgtctcccttttttgtattttagtaaaaaaaaaaaaaaataaatttaaataaaagggggtggtgatgacatgtgaatgggtgcgggtatgtgtgcgtgtgtgtttgtataaggctcttttgagatgaactggtgcttgtttaatttccagctcaaatcggagcaggaatatggacaaactgctgctactgaaccctgcactgagccgaggtatttccatttggttaactaaacgctagctaccaggaaatgacgcagaagtcacgttcttcttcccactgccatcttgcctttgcattctcagttctacgtgccctttgaactttaatggtaaaacatttcacactttggatggtttgcttgtctctagtttttagaaagctcttatcactccttcctaagaaaaaagaagggcaggtaaatttttttaaccaaaaaaaaatcacacatttcataaaaccctgatgaattttggatatgtgagagggcataaacattcctaaatatggacctgtgaatttagtaaattacccccatgaatatactccttcagtgcagggatttttgtgttttttttttttttttaatttttttgcaacagccttgctcatattccaggtgtagctagcaaacccctgtttttgaagcaagagccttatttgattcagtgtagatgtttcctgtctatcctttgtgacagggccttttaatgagtgttttttctttttgtatatgttacgtgtttgttgttgtattaaataaagaggaatgtacatact

SEQ ID NO: 33398 - DNA, 6064 bp, Homo sapiens
  source 1..6064: mol_type = unassigned DNA
atggcggagccgcgcagagtagcgttcattagcttgtcaccggtgcggcggcgcgaggccgagtacccggggcccgagcgtgagcccgagtacccccgcgagcccccccggctggagccgcagccgtaccgcgagccggcccgggcggagccgccggccccgcgggagcctgccccccgctcggacgcgcagcccccgtcgcgggagaagccgctcccccagcgcgaggtcagccgcgccgagccgcccatgtcgctgcagcgggagcccccgcggcccgagccgccgccgccgttcccgccgctgcccttgcagccgcccccgccgcgggagtcggcttcccgggctgagcagccgccgcggccgccgagggagacggtgcgcctggagctggtgcttaaggaccccaccgacgagagctgcgtggagttcagttacccggagctgctgctgtgcggagaacaacggaagaagctcattcacacagaagacccatttaatgatgaacatcaggagaggcaagaggtggaaatgttggctaagaagtttgaaatgaaatatggtgggaaaccccgtaaacaccggaaggatcggctacaagatttaattgatataggctttggctatgatgagacagatccatttattgataactcagaggcttatgatgaattagttcccgcttctctaacaacaaaatatggaggcttttatatcaacactggcactctacagtttcgccaagcttcagatactgaagaagatgatattacagacaaccaaaagcacaagccacccaaggtccccaaaataaaagaagatgatattgagatgaagaagcggaagcggaaagaggaaggggaaaaggagaagaagccaaggaaaaaagttcccaaacaactgggagttgtggctctaaattcacacaagtctgaaaaaaagaagaaacgttataaagattctctttctctagctgccatgattagaaaattccagaaagagaaggatgcattaaagaaggagtctaaccccaaagtcccagtgaccttgtcaaccccttctctgaataaacccccatgtgctgctgcagcactggggaatgacgtcccggacttaaatctgagcagcggtgatccagaccttcccatttttgttagcacaaatgaacatgagctgtttcaggaagctgaaaatgccctagagatgctagatgattttgacttcgacagattactggatgctgcttctgatggtagccccctatctgagtcggggggtgaaaatggaaccaccacccagccaacctacacttctcaggttatgcccaaagtggtacctacactcccagagggtctacctgtacttcttgaaaaacgtatcgaagaccttcgtgtagctgccaaactttttgatgaagaaggaaggaaaaaattctttacacaggatatgaataatattcttctggacattgagttacagctacaagaactaggccctgtcattcgcagtggtgtctactcccaccttgaagcttttgtgccatgcaataaagaaacactagtaaaacgtctgaagaagttacatctcaatgtccaggatgatcgtttaagagaacctctgcaaaaactgaaactggctgttagcaatgtcatgcctgaacagctatttaaataccaggaggactgccaggctcgtagtcaagctaagtgtgccaaattgcagacagatgaagaacgagaaaaaaatggatctgaagaggatgatgatgagaaaccaggaaaacgtgtcataggaccaagaaagaaattccactgggatgacactatcagaactttgttatgtaaccttgttgagatcaaattgggatgctatgagttagaaccaaataaaagccagtctgctgaagattatcttaagtcttttatggagacagaagtgaagcccctgtggcctaagggctggatgcaggcaagaatgctttttaaggaaagccggagtgttcataatcatcttacttctgctccggcaaagaaaaaggtgattcctgcacctaaacccaaagtaaaggaggtgatggtaaagacccttcctctccattctttccccactatgcttaaggagtgtagtccaaaaaaggaccagaaaactccaacatccctggtggcttcggttagcggtcctccaacgagctccagcacagctgccattgctgcagctagctctagctctgcaccagcccaagaaaccatctgcctcgacgactcactagatgaagacctttctttccattcaccttcactggatcttgtttctgaagctttagcggttatcaacaatgggaacaagggccctccagttggctcaaggataagcatgccaaccacaaagcctcgtccaggactgagagaagaaaaattagcaagtatcatgagtaagctgccactagctactcccaaaaaactagattctactcagactacacattcttcaagtcttattgctggtcacacagggccagtaccaaagaaaccccaggatttagctcatactggcatctcttcaggccttattgctggttcttccattcagaaccctaaagtttctttagaacctttgccagccaggctacttcaacaaggacttcagaggtcaagccagattcacacttcttcctcttcacagacccatgtctcctcttcttcccaagcccaaattgctgcctcttctcatgctctgggaacatccgaggcccaagatgcttcttcgttaacacaagtaacaaaggtgcaccagcattcagctgtccagcagaactatgtgtctccattacaggccaccatcagtaaatcccagaccaaccccgtcgtgaagttaagtaataatccccaactctcctgttcctcctcacttattaagacttcagataagccacttatgtaccgccttcccttatctaccccctcacctggaaatggttctcaagggtcccaccccctggtttctaggacagtacctagcaccactacctccagtaactatttagccaaggctatggtgtcacagatctccacgcagggtttcaaatctcccttctcgatggctgcctccccaaaacttgccgcatctcccaagcctgccacatctcctaaacccctgccctcgcctaagccttctgcctcacccaagccctctctgtcagctaagccttcagtatcaactaaacttatttctaaatccaacccaactcccaagcctactgtatccccaagtagttccagtccaaatgcactagttgcccagggtagccactccagcactaacagcccagtccataaacagcccagtggaatgaacatcagcagacagtctcccaccttgaatttattgccctctagtcgcacttcaggccttccacctacaaaaaatcttcaggccccctcaaagctaacaaactcatcatccactggaactgttgggaagaacagcttgagtggaattgcaatgaatgtacctgccagcagaggtagcaaccttaactcaagcggagctaataggactagtctgtctgggggaacaggaagtggaacacagggtgctaccaaaccattgtctactccacatagaccatccactgcctcagggtcttcagtggtaacagccagtgtgcagtccacagcaggagcatcattattggctaatgcctcacctctgactctcatgacatcacctttgtctgtaacaaatcaaaatgtgactccttttgggatgctgggtggccttgttccagtgaccatgcccttccagtttcccttggagatatttggctttggaacggacacagctggagtgacaaccacctcgggatctacctcagccgctttccaccatagcctaactcagaatttactaaagggtttacagccaggaggagctcagcatgcagcaacgctttcccactcacctctgcctgcacacttacagcaagcatttcacgatggaggccaaagtaaaggggacactaaattaccacggaaatctcagtgactgcccagcaagcaaaggagacgaaatgtttagttgactgatggaatctacctgatgggaaagtacttatgtggtcatagggctgctgtttctgtcgatgtttacattctctcgtcccaagcactgtggtgaggaggaaaaagaaaagaaaacattacttgagcaaagccaggtgcaggaggaagaaatgcttttgtgcaaagttagtgacctttggtctcttctaaagaatgacagagttaccgtattaacagacttgaaagagactcagttgtcaaacccacagaaatacaaatttgatttttcccgggggaggaagaaggaagtgaagagaatttgggtaaactccatccatcctgggggttggatctgaacacttacagacataattggtaataaaaggcattaaaaactggaattaggccagtttgtcaggaataatgatcatgtctatttgaatggactgtgtagcagatttgccacaaaaagaaataataatgattctatctccgatagacagtagctgcatagcacaccctcgaaaatcctgaacaaacttgaatctcctccagtgtgtagcaacttccctcaatcagtggactaaagatccttcaggaaagttattttagcacagtgatatatattattaaatcatctagatttttaaaaatcaggaagttgagcctgttgctcttaagagatgaaacctagatgtcccctttttgtaaaagggtcaatttcatcttccgttcagaagcaggtacttaactcttttcttcaggtgatttgtgcatctagtattgactggttaattcttatttccattcttgatgttaaaatgtgactgtgttcacatttttctcctgagaaatggggatctttacagggttattgctttgctgcttttagcccttgcagcaacataaactctaagtttccccagttcatctaacttcacaacttctccttctgttcttttagctagtggtccttcaggtgattattagctattggtataaacaggtagaagtgtacactatgtttcttcattggtcattcaaatggcatgaatatagtttttgaatttttaagatggtattttaaagggaggaatcacattaggatcacaatcacgacatatttttactccctgtatccagtgtagtgaaattgtttggagcatttgagatcctaaagcttcactatttactcagtgtattggtatgtgagtaaatctgcagaaaataagactccttagttattatagcttccttatgcaaatagcatattcaacaaaggatgttaagggaaaaatttatggttctccttggatacatttgatttgatgggtttttttgccgcattattctagttttttaagcttctgaatattttcatactatatcagagaatggtgtaaactctaaatggtataagcttcatccatttataatgacactaacctaaaaaaaatagactggtagtgacaagatttattgcatatgtgtttattatacattaccctataccattagatttactcaattaagagtattaaccaggcccttttttcttttatacacaaaagtcccagataccctacaggactgtgaataaataaccacagatcggttcagatctgtatgcctatattttgacttcaaagtcacattggcttgcttcatagcgaaaaagttaataaataactgaaaactttagttccaagaacttgttacagtaaagggaaaggattatttcaaaggaatcactgatataatttcttgactctaagaatttagtttatcaataaaacaaatatggatgtagtatgaaccccagtagatattttggaaggatactgggaggatgttgcagagaggtttgacttgaattcagtatgtttgatgaagatttgcttggtttcaattaaggaagcttgcccaatttttttaattttttcaaatgtagtggacctcttgcttttacgaaatatgaataaaaaggtctttgcttcatacta

SEQ ID NO: 33399 - DNA, 2299 bp, Homo sapiens
  source 1..2299: mol_type = unassigned DNA
gcggatgtcggtgtgagcgagcggcgcctgaacacacggcggctgccgagcgcctgacccgggcctgcgccagagcctgcaccgagctccggggccccacacccgctacggtggccctgcgcccgttgctactgaggcggcgtgctctgcattcttcgctgtccaggcctgccggctctggtgtctgctggctcctccttgctcgcctgctccctcctgcttgcctgagtcaccgccgccgccgccgccacagccatggccgagagtggtgaaagcggcggtcctccgggctcccaggatagcgccgccggagccgaaggtgctggcgcccccgcggccgctgcctccgcggagcccaaaatcatgaaagtcaccgtgaagaccccgaaggaaaaggaggaattcgccgtgcccgagaatagctccgtccagcagtttaaggaagaaatctctaaacgttttaaatcacatactgaccaacttgtgttgatatttgctggaaaaattttgaaagatcaagataccttgagtcagcatggaattcatgatggacttactgttcaccttgtcattaaaacacaaaacaggcctcaggatcattcagctcagcaaacaaatacagctggaagcaatgttactacatcatcaactcctaatagtaactctacatctggttctgctactagcaacccttttggtttaggtggccttgggggacttgcaggtctgagtagcttgggtttgaatactaccaacttctctgaactacagagtcagatgcagcgacaacttttgtctaaccctgaaatgatggtccagatcatggaaaatccctttgttcagagcatgctctcaaatcctgacctgatgagacagttaattatggccaatccacaaatgcagcagttgatacagagaaatccagaaattagtcatatgttgaataatccagatataatgagacaaacgttggaacttgccaggaatccagcaatgatgcaggagatgatgaggaaccaggaccgagctttgagcaacctagaaagcatcccagggggatataatgctttaaggcgcatgtacacagatattcaggaaccaatgctgagtgctgcacaagagcagtttggtggtaatccatttgcttccttggtgagcaatacatcctctggtgaaggtagtcaaccttcccgtacagaaaatagagatccactacccaatccatgggctccacagacttcccagagttcatcagcttccagcggcactgccagcactgtgggtggcactactggtagtactgccagtggcacttctgggcagagtactactgcgccaaatttggtgcctggagtaggagctagtatgttcaacacaccaggaatgcagagcttgttgcaacaaataactgaaaacccacaactgatgcaaaacatgttgtctgccccctacatgagaagcatgatgcagtcactaagccagaatcctgaccttgctgcacagatgcagaatcctgatacactatcagcaatgtcaaaccctagagcaatgcaggccttgttacagattcagcagggtttacagacattagcaacggaagccccgggcctcatcccagggtttactcctggcttgggggcattaggaagcactggaggctcttcgggaactaatggatctaacgccacacctagtgaaaacacaagtcccacagcaggaaccactgaacctggacatcagcagtttattcagcagatgctgcaggctcttgctggagtaaatcctcagctacagaatccagaagtcagatttcagcaacaactggaacaactcagtgcaatgggatttttgaaccgtgaagcaaacttgcaagctctaatagcaacaggaggtgatatcaatgcagctattgaaaggttactgggctcccagccatcatagcagcatttctgtatcttgaaaaaatgtaatttatttttgataacggctcttaaactttaaaatacctgctttatttcattttgactcttggaattctgtgctgttataaacaaacccaatatgatgcattttaaggtggagtacagtaagatgtgtgggtttttctgtatttttcttttctggaacagtgggaattaaggctactgcatgcatcacttctgcatttattgtaattttttaaaaacatcaccttttatagttgggtgaccagattttgtcctgcatctgtccagtttatttgctttttaaacattagcctatggtagtaatttatgtagaataaaagcattaaaaagaa

SEQ ID NO: 33400 - DNA, 4118 bp, Homo sapiens
  source 1..4118: mol_type = unassigned DNA
ggaaactgcgatttagtttttggtgaaaggagtggaaaaaaaccatgaactgacctaccccgccccattttgcttttagtccttcacactggcttcgcctgcactttgggcaatggagcgggaaaggaaaaggcacgcaggctgagctcaaagtcgcgccagccggggatgactcggcgacgccgccaggcgcgttacccggcgtgctccgcgcggcgccggcgaagggacgtgggggaaggggcagggaggaggaagcggtggctgctgcggatgtcggtgtgagcgagcggcgcctgaacacacggcggctgccgagcgcctgacccgggcctgcgccagagcctgcaccgagctccggggccccacacccgctacggtggccctgcgcccgttgctactgaggcggcgtgctctgcattcttcgctgtccaggcctgccggctctggtgtctgctggctcctccttgctcgcctgctccctcctgcttgcctgagtcaccgccgccgccgccgccacagccatggccgagagtggtgaaagcggcggtcctccgggctcccaggatagcgccgccggagccgaaggtgctggcgcccccgcggccgctgcctccgcggagcccaaaatcatgaaagtcaccgtgaagaccccgaaggaaaaggaggaattcgccgtgcccgagaatagctccgtccagcagtttaaggaagaaatctctaaacgttttaaatcacatactgaccaacttgtgttgatatttgctggaaaaattttgaaagatcaagataccttgagtcagcatggaattcatgatggacttactgttcaccttgtcattaaaacacaaaacaggcctcaggatcattcagctcagcaaacaaatacagctggaagcaatgttactacatcatcaactcctaatagtaactctacatctggttctgctactagcaacccttttggtttaggtggccttgggggacttgcaggtctgagtagcttgggtttgaatactaccaacttctctgaactacagagtcagatgcagcgacaacttttgtctaaccctgaaatgatggtccagatcatggaaaatccctttgttcagagcatgctctcaaatcctgacctgatgagacagttaattatggccaatccacaaatgcagcagttgatacagagaaatccagaaattagtcatatgttgaataatccagatataatgagacaaacgttggaacttgccaggaatccagcaatgatgcaggagatgatgaggaaccaggaccgagctttgagcaacctagaaagcatcccagggggatataatgctttaaggcgcatgtacacagatattcaggaaccaatgctgagtgctgcacaagagcagtttggtggtaatccatttgcttccttggtgagcaatacatcctctggtgaaggtagtcaaccttcccgtacagaaaatagagatccactacccaatccatgggctccacagacttcccagagttcatcagcttccagcggcactgccagcactgtgggtggcactactggtagtactgccagtggcacttctgggcagagtactactgcgccaaatttggtgcctggagtaggagctagtatgttcaacacaccaggaatgcagagcttgttgcaacaaataactgaaaacccacaactgatgcaaaacatgttgtctgccccctacatgagaagcatgatgcagtcactaagccagaatcctgaccttgctgcacagatgatgctgaataatcccctatttgctggaaatcctcagcttcaagaacaaatgagacaacagctcccaactttcctccaacaaatgcagaatcctgatacactatcagcaatgtcaaaccctagagcaatgcaggccttgttacagattcagcagggtttacagacattagcaacggaagccccgggcctcatcccagggtttactcctggcttgggggcattaggaagcactggaggctcttcgggaactaatggatctaacgccacacctagtgaaaacacaagtcccacagcaggaaccactgaacctggacatcagcagtttattcagcagatgctgcaggctcttgctggagtaaatcctcagctacagaatccagaagtcagatttcagcaacaactggaacaactcagtgcaatgggatttttgaaccgtgaagcaaacttgcaagctctaatagcaacaggaggtgatatcaatgcagctattgaaaggttactgggctcccagccatcatagcagcatttctgtatcttgaaaaaatgtaatttatttttgataacggctcttaaactttaaaatacctgctttatttcattttgactcttggaattctgtgctgttataaacaaacccaatatgatgcattttaaggtggagtacagtaagatgtgtgggtttttctgtatttttcttttctggaacagtgggaattaaggctactgcatgcatcacttctgcatttattgtaattttttaaaaacatcaccttttatagttgggtgaccagattttgtcctgcatctgtccagtttatttgctttttaaacattagcctatggtagtaatttatgtagaataaaagcattaaaaagaagcaaatcatttgcactctataatttgtggtacagtattgcttattgtgactttggcatgcatttttgcaaacaatgctgtaagatttatactactgataattttgttttatttgtatacaatatagagtatgcacatttgggactgcatttctggaaacatactgcaataggctctctgagcaaaacacctgtaactaaaaaagtgaagataagaaaatactcttaaagctgagtatttcctaattgtatagaatcttacagcatctttgacaaacatctcccagcaaaagtgccggttagtcaggtttgttgaaaatacagtagaaaagctgattctggttatctctttaaggacaattaattgtacagacacataatgtaacattgtctcaacattcattcacagattgactgtaaattaccttaatctttgtgcagactgaaggaacactgtagtataccccaaagtgcatttgcctaggacttctcagcttctcccataggtagtttaacaggcattaaaatttgtaattgaaatgttgctttcactgaaaaagtgtcttgatgtttcagttatttttaatcgccataaaaaaatagaactatcttttgggtttatctgttttctcatgcacaggcaatacacaaatttaaaatgagttgtgagccaattgtttctgaagtgttttggtagttctattaagaaatagttaaatattgtgcttttcagagcctcagagaaagggggacggggtgggggggtggggcagcggaatctgtcctggatggggccagcttaaataatactggcaaccaagattctgttaggatttctgtgcatatagtgtagtaaagaagtatcattcaggggtgaaaaacaaagagccgttttaatgatgttgagtacatttggctgttttatagcctttttcttccctcccccaaagaattctgtttgcctaactcccaaactgttggggtggtacattcctttaggaccaattaaaacataattgagggtcagtgatacatttggctgactctggttcagtattctcttaggtgattatattctctcatgtacagttacaggaaattaaaatgttaaagtaacctaaaatgaattcagaccaataaaatcaagggaaatacaagttgattgcattacttctgtatgttgcttgctattaaaaaggttaagaggccaggttacccaccagtccttgcactgttctgacactttccccaggaggaaaacaagtacaaaggttacggtggaggcataagtagaagagattgttaagaagggtattcatgtgtctttgctctttctgctttatgcctcagtttggtttaaaaacttctgtactggcaaatggtggtattcagtgtgggatagtgtcataactaatttgacaatttattaatcataaaataacaataaatctctagcttttacacttga

SEQ ID NO: 33401 - DNA, 3418 bp, Homo sapiens
  source 1..3418: mol_type = unassigned DNA
tgccagagttgctgggagtgcgcgcggtcggatcacaaggcggcggcggaggaggcccagagaccggagcgcggagacctcagccagcggcctacgcccaggcctttctccaccggaggaccagggaaccgcagtcttcatcacagaggtaccgtgctccgcgctccccgcctgacccggcccagcccgctgcggcggtgcctccttccttcctccttccctcgcgctctctctttcgcccgcccgcgccttccctgcccgcctgcgtcaccgcggccgccatggctgagaatggcgagagcagcggccccccgcgcccctcccgcggccctgctgcggcccaaggctcggctgctgccccggctgagcctaaaatcatcaaagtcacggtgaagactcccaaagagaaagaggagttcgcggtgcccgagaacagctcggttcagcagtttaaggaagcgatttcgaaacgcttcaaatcccaaaccgatcagctagtgctgatttttgccggaaaaatcttaaaagatcaagataccttgatccagcatggcatccatgatgggctgactgttcaccttgtcatcaaaagccagaaccgacctcagggccagtccacgcagcctagcaatgccgcgggaactaacactacctcggcgtcgactcccaggagtaactccacacctatttccacaaatagcaacccgtttgggttggggagcctgggaggacttgcaggccttagcagcctgggcttgagctcgaccaacttctctgagctccagagccagatgcagcagcagcttatggccagccctgagatgatgatccaaataatggaaaatccctttgttcagagcatgctttcgaatcccgatctgatgaggcagctcattatggctaatccacagatgcagcaattgattcagagaaacccagaaatcagtcacctgctcaacaacccagacataatgaggcagacactcgaaattgccaggaatccagccatgatgcaagagatgatgagaaatcaagacctggctcttagcaatctagaaagcatcccaggtggctataatgctttacggcgcatgtacactgacattcaagagccgatgctgaatgccgcacaagagcagtttgggggtaatccatttgcctccgtggggagtagttcctcctctggggaaggtacgcagccttcccgcacagaaaatcgcgatccactacccaatccatgggcaccaccgccagctacccagagttctgcaactaccagcacgaccacaagcactggtagtgggtctggcaatagttccagcaatgctactgggaacaccgttgctgccgctaattatgtcgccagcatctttagtaccccaggcatgcagagcctgctgcaacagataactgaaaacccccagctgattcagaatatgctgtcggcgccctacatgagaagcatgatgcagtcgctgagccagaatccagatttggctgcacagatgatgctgaatagcccgctgtttactgcaaatcctcagctgcaggagcagatgcggccacagctcccagccttcctgcagcagatgcagaatccagacacactatcagccatgtcaaacccaagagcaatgcaggctttaatgcagatccagcaggggctacagacattagccactgaagcacctggcctgattccgagcttcactccaggtgtgggggtgggggtgctgggaaccgctataggccctgtaggcccagtcacccccataggccccataggccctatagtcccttttacccccataggccccattgggcccataggacccactggccctgcagccccccctggctccaccggctctggtggccccacggggcctactgtgtccagcgctgcacctagtgaaaccacgagtcctacatcagaatctggacccaaccagcagttcattcagcaaatggtgcaggccctggctggagcaaatgctccacagctgccgaatccagaagtcagatttcagcaacaactggaacagctcaacgcaatggggttcttaaaccgtgaagcaaacttgcaggccctaatagcaacaggaggcgacatcaatgcagccattgaaaggctgctgggctcccagccatcgtaatcacatttctgtacctggaaaaaaaatgtatcttatttttgataatggctcttaaatctttaaacacacacacaaaatcgttctttactttcattttgattcttttaaatctgtctagttgtaagtctaatatgatgcattttaagatggagtccctccctcctacttccctcactccctttctcctttgcttatttttcctaccttcccttcctcttgtctccccactccctccctctttgtttccttccttccttatttcctttagtttccttccttagccgttttgagtggtgggaatcaatgctgtttcactcaaaagtgttgcatgcaaacacttctctttattctgcatttattgtgatttttggaaacaggtatcaaccttcacagttgggtgaacaagtgttgtcctacagatgtccaatttatttgcatttttaaacattagcctatgatagtaatttaatgtagaatgaagatattaaaaacagaagcaaattatttgaagctctctaatttgtggtacgatattgcttattgtgactttggcatgtatttttgctagcaaaatgctgtaagatttataccattgatcttttttgctatatttgtatacagtacagtaagcacaattggcactgtacatctaaaaatattacagtagaatctgagtgtaatatgtgtaaccaaaatgagaaagaatacaagaaatgtttctggagctagttatgtctcacaattttgtagaatcttacagcatctttgataaacttctcagtgaaaatgttggctaggcaagttcagttaaaatatagtagaaatgtttatcctggtatctctaagtatacatttaattgtacagaaaatttacagtgtaacattgtgtcaacatttgcagattgactgtatatgaccttaatctttgtgcagcctgaaggatcagtgtagtaatgccaggaaagtgctttttacctaagacttccttctcagcttctcccataaagagaccctaatatgcattttgatttgtaattggaaatgtaactttcactgaaagtgtcatgtgatgtttgcattacttttaactgctatgtataaaggaaagtgtgtcttttgacttcatcagttatttctcttgtgcacagagaaaaatgcattaaaaatgactaaaaaaaataaaaaattaaaaaatggataaatcttttctttttgccttttggccctaggatcgtgtttaggaggattatcccaccccgaga

SEQ ID NO: 33402 - DNA, 2167 bp, Homo sapiens
  source 1..2167: mol_type = unassigned DNA
acaaggcggcggcggaggaggcccagagaccggagcgcggagacctcagccagcggcctacgcccaggcctttctccaccggaggaccagggaaccgcagtcttcatcacagaggtaccgtgctccgcgctccccgcctgacccggcccagcccgctgcggcggtgcctccttccttcctccttccctcgcgctctctctttcgcccgcccgcgccttccctgcccgcctgcgtcaccgcggccgccatggctgagaatggcgagagcagcggccccccgcgcccctcccgcggccctgctgcggcccaaggctcggctgctgccccggctgagcctaaaatcatcaaagtcacggtgaagactcccaaagagaaagaggagttcgcggtgcccgagaacagctcggttcagcagtttaaggaagcgatttcgaaacgcttcaaatcccaaaccgatcagctagtgctgatttttgccggaaaaatcttaaaagatcaagataccttgatccagcatggcatccatgatgggctgactgttcaccttgtcatcaaaagccagaaccgacctcagggccagtccacgcagcctagcaatgccgcgggaactaacactacctcggcgtcgactcccaggagtaactccacacctatttccacaaatagcaacccgtttgggttggggagcctgggaggacttgcaggccttagcagcctgggcttgagctcgaccaacttctctgagctccagagccagatgcagcagcagcttatggccagccctgagatgatgatccaaataatggaaaatccctttgttcagagcatgctttcgaatcccgatctgatgaggcagctcattatggctaatccacagatgcagcaattgattcagagaaacccagaaatcagtcacctgctcaacaacccagacataatgaggcagacactcgaaattgccaggaatccagccatgatgcaagagatgatgagaaatcaagacctggctcttagcaatctagaaagcatcccaggtggctataatgctttacggcgcatgtacactgacattcaagagccgatgctgaatgccgcacaagagcagtttgggggtaatccatttgcctccgtggggagtagttcctcctctggggaaggtacgcagccttcccgcacagaaaatcgcgatccactacccaatccatgggcaccaccgccagctacccagagttctgcaactaccagcacgaccacaagcactggtagtgggtctggcaatagttccagcaatgctactgggaacaccgttgctgccgctaattatgtcgccagcatctttagtaccccaggcatgcagagcctgctgcaacagataactgaaaacccccagctgattcagaatatgctgtcggcgccctacatgagaagcatgatgcagtcgctgagccagaatccagatttggctgcacagatgatgctgaatagcccgctgtttactgcaaatcctcagctgcaggagcagatgcggccacagctcccagccttcctgcagcagatgcagaatccagacacactatcagccatgtcaaacccaaccagcagttcattcagcaaatggtgcaggccctggctggagcaaatgctccacagctgccgaatccagaagtcagatttcagcaacaactggaacagctcaacgcaatggggttcttaaaccgtgaagcaaacttgcaggccctaatagcaacaggaggcgacatcaatgcagccattgaaaggctgctgggctcccagccatcgtaatcacatttctgtacctggaaaaaaaatgtatcttatttttgataatggctcttaaatctttaaacacacacacaaaatcgttctttactttcattttgattcttttaaatctgtctagttgtaagtctaatatgatgcattttaagatggagtccctccctcctacttccctcactccctttctcctttgcttatttttcctaccttcccttcctcttgtctccccactccctccctctttgtttccttccttccttatttcctttagtttccttccttagccgttttgagtggtgggaatcaatgctgtttcactcaaaagtgttgcatgcaaacacttctctttattctgcatttattgtga

SEQ ID NO: 33403 - DNA, 2407 bp, Homo sapiens
  source 1..2407: mol_type = unassigned DNA
agggacctgatagtgcgggttctggcccagaaggcctcaggggtggctgtgtagcaagatgagggaggtttggagccctgcataaagagaaggacgggaccacagctgactgctgtgtccccacagatctgggcctcctgctgccaccatggccaaaggtggagaagccctgccacagggcagcccagcaccagtccaggatccccacctcatcaaggtgacagtgaagacgcccaaagacaaggaggatttctcagttacagacacatgcactatccagcagctgaaggaagagatatctcagcgctttaaggcccaccccgatcagcttgttctaatctttgctggcaaaatcctcaaggatcctgactcactggcacagtgtggagtgcgagatggcctcactgtccacctggtcatcaagaggcagcaccgtgccatgggcaatgagtgcccagctgcctctgtccctacccagggcccaagtcctggatcactccctcagccaagctccatttacccagcagatgggccccctgcctttagcttaggtctcctcacaggcctcagtaggctgggcttggcctatcgtggcttccctgaccagccaagctccctgatgcggcagcatgtgtctgtgcctgagtttgtgactcagctcattgatgaccccttcatcccgggtctgctgtccaacacaggcctagtacgccagctggttcttgacaacccccatatgcagcagctgatccagcacaaccctgagattgggcatattcttaacaacccggaaattatgcggcagacactggagtttttacgtaaccctgccatgatgcaggagatgatacgtagccaggaccgggtgctcagtaacttggagagcattcctggtggctacaatgtgctttgcactatgtacacagatattatggacccaatgcttaacgcagtccaggagcagtttggcggcaatccctttgccactgccactactgataatgccaccaccaccaccagccaaccttcaaggatggagaattgtgaccctctccccaacccctggacttccacacatggaggctcaggtagcaggcaaggaaggcaggatggggatcaggatgcacctgacattagaaataggtttccaaactttctgggtattataaggctctatgactatctccagcaattacacgagaacccccagtccctaggaacttatctacaggggactgcatctgccctcagccaaagccaggaaccaccaccatcagtaaacagagttcccccatcgtcaccctcatctcaggagcctgggtcaggccagcctctccccgaggagtcagtagcaatcaagggaaggtcctcctgcccagctttcctgagataccccacagagaacagtactggacaaggtggagaccaagatggtgcagggaaaagctctactggacatagcacaaacttgcctgatcttgtctcggggctgggagattctgccaacagggttccatttgctcccttatctttttcccccacggcagccattcctggaatccctgagcctccctggctgccatccccggcttatccaagatctctgaggccagatggcatgaatccagctccacagttacaggatgagatacaaccacagctgccactgctgatgcaccttcaggcagccatggcaaacccccgtgccctgcaagccctgcggcagattgagcagggtctacaggtcctagctactgaagcacctcgcctcctactctggttcatgccttgcctagcagggacgggtagtgtggcaggaggtatagagtctagagaagatccccttatgtctgaggatcctctcccaaatccacctcctgaggtgttcccagcactggactctgcagagctgggcttcctttcccctccctttctccatatgctgcaagatttagttagtacaaatccccagcagctgcagcctgaggctcactttcaggtgcagctggagcaactgcggtccatgggctttctgaatcgtgaagccaatcttcaggccctcattgctacggggggcgacgtggatgctgctgtggagaagctgagacagtcgtaggagccttattcattcaaaccatacgttttcctctgtgcctttttcccatatcctagttccctagctctcccatttttgaatacagctgcattataaaccaaatttactatgaagtcctttgctgtggaggcaatgttgttccagagtcaacgaggaagactaatggccaaaacatagtggaggtgctgtgtgtgagtcaaccacttgtaccactataccactggggggccccagtctaagctctgcttatgcctatcttgagatgcaattacacccaatttccaatgtgaa

SEQ ID NO: 33404 - DNA, 817 bp, Homo sapiens
  source 1..817: mol_type = unassigned DNA
cagaaggcctcaggggtggctgtgtagcaagatgagggaggtttggagccctgcataaagagaaggacgggaccacagctgactggatgatcttggtctccaatccccatgcccctagctgtgtccccacagatctgggcctcctgctgccaccatggccaaaggtggagaagccctgccacagggcagcccagcaccagtccaggatccccacctcatcaaggtgacagtgaagacgcccaaagacaaggaggatttctcagttacagacacatgcactatccagcagctgaaggaagagatatctcagcgctttaaggcccaccccgatcagcttgttctaatctttgctggcaaaatcctcaaggatcctgactcactggcacagtgtggagtgcgagatggcctcactgtccacctggtcatcaagaggcagcaccgtgccatgggcaatgagtgcccagctgcctctgtccctacccagggcccaagtcctggatcactccctcagccaagctccatttacccagcagatgggccccctgcctttagcttaggtctcctcacaggcctcagtaggctgggcttggcctatcgtggcttccctgaccagccaagctccctgatgcggcagcatgtgtctgtgcctgagtttgtgactcagctcattgatgaccccttcatcccgggtctgctgtccaacacaggcctagtacgccagctggttcttgacaacccccatatgcagcagctgatccagcacaaccctgagattgggcatattcttaacaacccggaaattatgcggcagacactg

SEQ ID NO: 33405 - DNA, 2451 bp, Homo sapiens
  source 1..2451: mol_type = unassigned DNA
ggcggcggcggcatggcggagccgagcggggccgagacgaggccccccattcgggtcaccgtcaagacccccaaggacaaggaggaaattgtgatctgcgatcgagcctcggtcaaggagttcaaagaggaaatctcccggaggtttaaggctcagcaggatcagctggtcctgatcttcgcaggcaagatcctcaaggatggggacacactgaaccagcacggaatcaaggacgggctcactgtccatctggtcatcaagacccctcagaaggctcaagatccagctccgcctgcagctcccagtcttcctgcagcagatgcagaacccagagtcactctccatccttaccaatccccgagccatgcaggcattgctgcagatccagcagggactacagaccttgcagaccgaggcccctgggctggtacccagccttggctcctttgggatatcccggaccccagcaccctcagcaggcagcaacgcagggtctacgcccgaggcccccacttcctcaccagccacgccagccacatcttctccaacaggggcttccagcgcccagcagcaactcatgcagcagatgatccagcttttggctggaagtggaaactcacaggtgcagacgccagaagtgagatttcagcagcagctggagcagctcaactccatgggcttcatcaatcgtgaggctaacctgcaggccctgattgccacaggaggggacatcaacgcagctatcgagagactgctgggctcccagctctcctaatccctcggcccatgcctcctgcctctcccctccctcgatgtcagcattcggttcttctgtcaatccttaccctctgcagcttgtcctcccttccgtcttctccctcatcctttccaaacagcagggtgactttagaggcatgggctccaaccccttagctctgtctgagaattatggttttactgctacgtctctaacagactcttctctcctggtctccttgagcagtgctacttaaacagttttcacagtttcattgattgactctacctccttgccccacaccacttttgcaatctttaaactttcagtggctgtgcagagtcgagggaggaaccagctctctggtttactggaacatagtcttccatctataccactagggttttgtcttatgtttacttttggtaactctcttccttctttttctccctaccccccaacccctagcccaaccaatgctagaatttcttgctctgaaggaggagcaggtgaaacaggtggtaattttccttctcggcccctattctggttcattcagcactttttggtgggaactgttggaaattccagggtaaggaggaagatgcctgttctccctgtctgaagagggagatgagacagctctctggacaggaattaacaaacgctggagcagcccagaggaaattcgtgtgaaagaggagggaatgagattattcggaggaagggaatgggggagacagcctgagtaaaaggcttggaagttggaattaacagtggggagcagaagcactcatagctcttttaggcagaagaatccaggcccgagctggcagaagagacttagagatgctaatggaatttaaactgaaaaaaggagcccaatgaagctaagcgccacgccccacaaggggtcatattggctttagttcctcaagcatatgtgcttatatgcacacacacacacatttccatggacccaggtcttgcttgtgtccccaggcaccagtagtttgagcccccctcaaaagacatgaagggggttggggtctgtgtgagtagtggggaggtgcatgtgtatccacatgtgtgcatacactcttaagttgggtgggaagtggattccttgttggtttctggttcagagtgctctcccaccaccagagacaagtgggtaaaaaggtcagtccattgcaggaatatatatccgggagagctaggtcccttggggctctggatgctgggtaacccagaggtaatgtgggtaccctttctgaagctgtcagggctgtgactagcacccttatcacccctcactgccttgtgggaatagtagagggtttttttcctccagagcccctggcctttcagttcttaactatttccctccaggccagaaagttttctttgaggaaggagaggagagggtggcaatgatgcctttgatctggaattggacatttctctgtcagagcacagaggaggctcatatcacctcttccctctcctacttggcccagctgcttggaggaccgaccccatggctgagaatatgacggcaagaggaacagagtttgctccaagtgggaaagggtcccaagcagtccagagaagatgtctgtgtggctttccctccctgcctcccccagctcccacactggcctttgtaaataaatggcgtggtctttgttgtg

SEQ ID NO: 33406 - DNA, 3576 bp, Homo sapiens
  source 1..3576: mol_type = unassigned DNA
gttggaggcgcagaagccgagccgggccggccgggcgggcggggaggaggaggagccgggcgggctggcgggcggccgggtggcggcggcggcatggcggagccgagcggggccgagacgaggccccccattcgggtcaccgtcaagacccccaaggacaaggaggaaattgtgatctgcgatcgagcctcggtcaaggagttcaaagaggaaatctcccggaggtttaaggctcagcaggatcagctggtcctgatcttcgcaggcaagatcctcaaggatggggacacactgaaccagcacggaatcaaggacgggctcactgtccatctggtcatcaagacccctcagaaggctcaagatccagctgctgccactgcttcttccccctccacacctgaccctgcctcagcaccctccaccacgcctgcttcacccgccacccctgcccagccctccacctctggcagtgcctcttcagatgctggcagtggaagccggaggagcagtggtggggggccctctccgggggctggggagggatcccccagtgctactgcgtccatactctctggctttgggggcatcctggggctgggcagcctaggcctgggctctgccaacttcatggagctgcagcagcagatgcagcggcagctgatgtccaatcctgagatgctgtcacagatcatggagaaccccctggtccaggatatgatgtctaaccctgatctgatgcgtcacatgattatggccaacccccagatgcagcagttgatggagcggaaccctgagatcagccacatgctcaataaccctgaactcatgaggcagacaatggagcttgctcggaatccagccatgatgcaagagatgatgcggaaccaggaccgggccctgagcaaccttgagagcatccctggagggtataatgccctccgccgcatgtacacggacatccaggagcccatgttcagtgctgcccgggaacagtttggcaacaatcccttctcttccctggccgggaactccgacagctcatcctcccagcctctgcggactgagaatcgagagcccctccctaacccctggagcccctcgccccccacctcccaggcccccgggtccggtggggagggcaccggaggatcggggaccagccaggtgcacccgacagtctcgaacccctttgggatcaatgcggctagcctggggtcagggatgttcaatagcccagaaatgcaagccctcctccagcagatctctgagaacccccagctgatgcagaatgtgatctcagcaccctacatgcgcagcatgatgcagacgcttgcccagaaccccgactttgctgctcagatgatggtgaatgtgccgctcttcgcggggaacccccaactgcaggagcagctccgcctgcagctcccagtcttcctgcagcagatgcagaacccagagtcactctccatccttaccaatccccgagccatgcaggcattgctgcagatccagcagggactacagaccttgcagaccgaggcccctgggctggtacccagccttggctcctttgggatatcccggaccccagcaccctcagcaggcagcaacgcagggtctacgcccgaggcccccacttcctcaccagccacgccagccacatcttctccaacaggggcttccagcgcccagcagcaactcatgcagcagatgatccagcttttggctggaagtggaaactcacaggtgcagacgccagaagtgagatttcagcagcagctggagcagctcaactccatgggcttcatcaatcgtgaggctaacctgcaggccctgattgccacaggaggggacatcaacgcagctatcgagagactgctgggctcccagctctcctaatccctcggcccatgcctcctgcctctcccctccctcgatgtcagcattcggttcttctgtcaatccttaccctctgcagcttgtcctcccttccgtcttctccctcatcctttccaaacagcagggtgactttagaggcatgggctccaaccccttagctctgtctgagaattatggttttactgctacgtctctaacagactcttctctcctggtctccttgagcagtgctacttaaacagttttcacagtttcattgattgactctacctccttgccccacaccacttttgcaatctttaaactttcagtggctgtgcagagtcgagggaggaaccagctctctggtttactggaacatagtcttccatctataccactagggttttgtcttatgtttacttttggtaactctcttccttctttttctccctaccccccaacccctagcccaaccaatgctagaatttcttgctctgaaggaggagcaggtgaaacaggtggtaattttccttctcggcccctattctggttcattcagcactttttggtgggaactgttggaaattccagggtaaggaggaagatgcctgttctccctgtctgaagagggagatgagacagctctctggacaggaattaacaaacgctggagcagcccagaggaaattcgtgtgaaagaggagggaatgagattattcggaggaagggaatgggggagacagcctgagtaaaaggcttggaagttggaattaacagtggggagcagaagcactcatagctcttttaggcagaagaatccaggcccgagctggcagaagagacttagagatgctaatggaatttaaactgaaaaaaggagcccaatgaagctaagcgccacgccccacaaggggtcatattggctttagttcctcaagcatatgtgcttatatgcacacacacacacatttccatggacccaggtcttgcttgtgtccccaggcaccagtagtttgagcccccctcaaaagacatgaagggggttggggtctgtgtgagtagtggggaggtgcatgtgtatccacatgtgtgcatacactcttaagttgggtgggaagtggattccttgttggtttctggttcagagtgctctcccaccaccagagacaagtgggtaaaaaggtcagtccattgcaggaatatatatccgggagagctaggtcccttggggctctggatgctgggtaacccagaggtaatgtgggtaccctttctgaagctgtcagggctgtgactagcacccttatcacccctcactgccttgtgggaatagtagagggtttttttcctccagagcccctggcctttcagttcttaactatttccctccaggccagaaagttttctttgaggaaggagaggagagggtggcaatgatgcctttgatctggaattggacatttctctgtcagagcacagaggaggctcatatcacctcttccctctcctacttggcccagctgcttggaggaccgaccccatggctgagaatatgacggcaagaggaacagagtttgctccaagtgggaaagggtcccaagcagtccagagaagatgtctgtgtggctttccctccctgcctcccccagctcccacactggcctttgtaaataaatggcgtggtctttgttgtga

SEQ ID NO: 33407 - DNA, 5575 bp, Homo sapiens
  source 1..5575: mol_type = unassigned DNA
agcggcctttctctgttcgcgatgtgacgtaacgcgcctgcggactgggcccagcttgtcctctatgacttacccagaaggcaacgcttctctttctggtcaaaatggctggtaagcaggccgtttcagcatcaggcaagtggctggatggtattcgaaaatggtattacaatgctgcaggattcaataaactggggttaatgcgagatgatacaatatacgaggatgaagatgtaaaagaagccataagaagacttcctgagaacctttataatgacaggatgtttcgcattaagagggcactggacctgaacttgaagcatcagatcttgcctaaagagcagtggaccaaatatgaagaggaaaatttctaccttgaaccgtatctgaaagaggttattcgggaaagaaaagaaagagaagaatgggcaaagaagtaatcatgtagttgaagtctgtggatgcagctgttatgaagatggttaaacttgaaacaaacaattttaagaattatttggtctgaagatgttttactttaaataaatgtctattgtaatggctggagtttttgaattccaaaccttatactgaataactactgaatccctttactgttaaatttttttccaaactttcaagatatatttagttgtgtttaactgctacttggagctcagaagccactttatcagttttcctcactggttggatagcctatcagtttatggaaggatataacttccgtaagttacatccttatggaagctactgaataaaagaagggggtatgcaccccctagtttgccaagattgagaaatagcctcttcactggtatgcaaacagatttgattttgcatcctatcatttaaaaagaaattatgtctgcaccccaacataggcatacttaagtaatatacatactcctgtgctaacatgtatactagaaaacaaaaagatgttagaaaaataaaagtataaagacaaatcatactgtccccatatcccagtgacttttccactttggaaatgattgttatgaagtttaagggttggatactagtcagttaaaagttttaagattatagggtaatttttaaaaatataaattagaatcattggcaaggcatggtggctcatgcctgtaatcccagcactttgggaggccgaggcgggcgggtcacctgaagtcaggaatttgagaccagcctggccaacatggtgaaaccctgtctctactaaaaatacaaaaaattagctaggcgtgatggtaggcacctgtaatcccagctactcgggaggctgagggaggagaattgcttgaccccaggaggtggaggttgcagtgagcctagatcacaccactgcacttcagcctgagcgacattgactgtctcaaaaaaaaaattaggattattcaatgttgtcatcatttccactcctaaattctgaaatgctttctttggtagaggtgagagtgtggagccacagctagtagagaaggaacagtaggacctgcagcctccctggttttccaggacaagtcattgctgtgtgtggcaggaatgccttacctcaaataacaaaacagtgtgaaaaacgaatttgtgttacatttaaagtttgtaaagcaatgagaaatgtgtgtatcataaagagcatctttaaatttttgctaaaatattagcctcttaaattctctaggaaccccctcccccgcttttttttttcctttcgctggtcgttatttttctaaacctatcctgaaatcatgtcaattttcttttgtatggttgaagacaactagatcacttgataatggttttgctcaggtcacattgtgacaaggttttaatgtagtcctactttgcagaaggaggccaagaagatgggctgtctagaaccccctttaaaagcatttgtctattcagaaaattttcctgagtagatctctgcaaaggctcttttaatagtgatttcaagatcacgtttgcaggactctggtctattcgttcagacgtctactgtgcacaattacaaggagactacaactgaggcatctcaaagagcactgtcaaggtgtgtagggagccgggtgggtggagggaggctgggctctgaccctagaaaccatgcttatgaatgctgttaatgtttaaagcaagcctaagggcactgctgaaggacaggggaacaaatagaactgaccaagactgaggtataacaggaacccccaggctatccacctgctcaaggtaaagtgtggtattacataaggcaacctctgattttgtaagagttcttcctaaagccaaagtgtatgcctattctatgtttccagattacttcattcttctaaatgagaacaagtgtgcaaaagttctttgaacactagatcaatgttttgtgttcattataaattatggttatcgtcctgcttgttatgaagactaagaaagtagatctagtatttggctcacacaggtgaatgggtgagaatttgttaatccatcagtgaagtcctttcatttgaaagagagggcctttctattatcaaaagccgtcctgtgtggaaaatcaccatgagagtgcctgaaacacaggcactctgcattgtcctgtagaccaaatctacattgtcctgtagtctggtctacattgtcctgtagaccgaatggtagagtgattcagagctaattctgggttagactgcacaggtctgaatctatttgctcactgtgtagtgctttaggaatacaatttaacctctccgtgcttcagtttgtttgtccctaagatagagctaatgatagaaacctacttcacccagttgtgaaaattaactgactgcatgtcaagcactaacagtttctggcatatagtatgcataatgtaaattatgtgctgagaagcgagaaagaataacttgggaaaacgctgaatatcatcaatgtcgaatagctaaccagtagctaaggtccaaggtctcctctcttccttctatgtggcactcttgtttctggttcatctactccccttgggtgtcacctccttgagtgaagtacctgctggagatgagaagagtggaactggatctgcatgacagctttgattaggatggagctaagacttggctatctccctgttttgtgttttggatgggtgacattttaaaactgccaatattcaaatcctgctaatttgctttgtacagtttaaaatgtttgatatcttttgttgtttaaagtttgagattggttttgaatatacagttttcctacatcttgaagaaagttatgtttgtttactctgaagtggtctatgttctgtttgtttgttttactatactttgcaaaaaaacagatggctggcttatgttcactgttgtagtgcactacctagtatcacttggccttcctgttgtcaagatgtaggaagcagcgtaagggatgtcgggccttcagacccccaattgccagctgtggtcctagttccagattgcatggaaatatttgataacattcctgcactgagttatcatggtctgaatatttatgtgacgctctacgagtggtaccaaaatgttagtgatggagtttttactaatggcaccttttcctgtttttaaattctagaatcttaataaatccaaagtgtacattttggtagtgatttcatttagttatttactttaaggactcccttttcaagcattaactctgcactaattttgacttatgaaaagattcagcagtaagaataaaaactgggccaaagcccaaagtaataatccttcacaaataggatggagttttaaaaatatgggcatcctgtgtgtagctttgaaaataaccaaactacttggaattaaaaagttaggtgaacatgaagattgtcataaccaaatccttgacagcttgatggatgaagagcagatgggtttatggtgtatgggaggaagcatggattttaggagggacagtatcagagagggatggttagaaagtgagtaagacaggttgctctttggaaaacaaggaaaatccctttattagaacaaggcatgaaattctgccactaggtggcgatgccctataactttacaacttagtgtacatcacacgagcactatggaagatttctccattctgcgccccaccaactccctcccctccttcatttttcaggatgacaacaccttagaggtttatggccatcaggagaatttactactaagctatatactgatgtaatgaaatctaatatatgttgtgcaatgaattatgagatgttatttagtttcaggattttattacttcaatcagttatgaccatatttccttttatatgattgctcactctttaaacataccagatgactgtataaggaacacctaataaagtctatagatgttaaaatattttaaatgttttaatttatatgccataatttgtttacattctggttatactggcgttcatattaaaagccataacatgttagaatctgagatctcaggtcggatagtgcctctaagttatattttgctaagaaattttattgtattagcaattgagcaagaaagaagaactgaatcattatacggtggttaatttttagcatagatgtcagaaagcctgttaatattccagaggcttatgataaactatttaaattgtcattctggattctgattatatctcctacaaagaaagagtgtattatttattgaactttttgtttgaatacatgtgcctatttttgcataaatgtaaaaatgtaattttaaaataaacccctgaaaacttctggtaacattatccagttgaataattgttctgttagtattctaaatattttaagaaaattgtatacatatctgtgacaattgtattcacaagccaaaccaaaaaaagataattatttgttttacaaaggagtcagcttacaatttttctcttatgcatgcatttaaaatgtggtttgccattaaactggaaacactgatctgaggccaatgatttaggcaagtcattagtctaaagattggcttcctcagctagaaaatgaagggctttgactaaaaagtctttttcatttcagtaccaaaacattctgggtctgtgatttaacttacgctctttattgttgggatgaactaatactgatggaatactagctttgtactaggcactgttcgtatgttgtctcttttaatcctccctgcaaccttctggcatggctattataatgcccattgtatggaagaagaaattaggcttcgaaagtccattttatgcttgttcattacataattttctggattttttaaattgatgtatgtgtttatgttccaggctaggcagaagctaggaagaatatagcagcctcgtcactgttgaaatctggggctagataattctttgttgtgggggcctcctctgtgtgttacaggatatttagcagcatcctggcttctacacgataggtaccagtagcgcctcctgcctccaactgtaacaaccaaaaatgttttgagacattgtctggaaatgttcccctgggggagcagaatt

SEQ ID NO: 33408 - DNA, 1985 bp, Homo sapiens
  source 1..1985: mol_type = unassigned DNA
tactgactttcagcaccaacttgtggtcccaggtaagtttccacgctggtactttagccctgggctcgaacctgcggacacgctgtggctgcaactccccgcccgccagacctcagtacgcagcgcggctggtgagaaacataatgcactctgacttccacgcgtggaatggggagatggactgcacggcgggcggacctgctcgggctgatggacggcaggtggactgatgtgcgcagggactggcggcagcgcggtcagagccagtcagccaaagccaggccagcacaatagactgtcccggttcccgccaggaggcggccgagcaccaactgtacggtactgcgcctgcgccgcgaccgccaacgcgcccagtctacgcttgcgcggcgcaacagggccgactgcagctggaagatggcggcgtccgtggtctgtcgggccgctaccgccggggcacaagtgctattgcgcgcccgccgctcgccggccctgctgcggacgccagccttgcggagtacggcaaccttcgctcaggcgctccagttcgtgccggagacgcaggttagcctgctggacaacggcctgcgtgtggcctccgagcagtcctctcagcccacttgcacggtgggagtgtggattgatgttggcagccgttttgagactgagaagaataatggggcaggctactttttggagcatctggctttcaagggaacaaagaatcggcctggcagtgccctggagaaggaggtggagagcatgggggcccatcttaatgcctacagcacccgggagcacacagcttactacatcaaggcgctgtccaaggatctgccgaaagctgtggagctcctgggtgacattgtgcagaactgtagtctggaagactcacagattgagaaggaacgtgatgtgatcctgcgggagatgcaggagaatgatgcatctatgcgagatgtggtctttaactacctgcatgccacagcattccagggcacacctctagcccaggctgtggaggggcccagtgagaatgtcaggaagctgtctcgtgcagacttgaccgagtacctcagcacacattacaaggcccctcgaatggtgctggcagcagctggaggagtggagcaccagcaactgttagacctcgcccagaagcacctcggtggcatcccatggacatatgcagaggacgctgtgcccactcttactccatgccgcttcactggcagtgagatccgccaccgtgatgatgctctaccttttgcccacgtggccattgcagtagagggtcctggctgggccagcccggacaatgtggccttgcaagtggccaatgccatcatcggccactatgactgcacttatggtggtggcgtgcacctgtccagcccactggcttcaggtgctgtggccaacaagctatgccagagtttccagaccttcagcatctgctatgcagagacgggcttgctgggtgcacactttgtctgtgaccgaatgaaaatcgatgacatgatgttcgtcctgcaagggcagtggatgcgcctgtgtaccagtgccacggagagtgaggtggcccggggcaaaaacatcctcagaaatgccctggtatctcatctagatggcactactcctgtgtgtgaggacatcggacgcagcctcctgacctatggccgccgcatccccctggctgaatgggaaagccggattgcggaggtggatgccagtgtggtacgtgagatctgctccaagtacatctatgaccagtgcccagcagtggctggatatggccccattgagcagctcccagactacaaccggatccgtagcggcatgttctggctgcgcttctaggcgggaagcctatgtaagcaagagggcagggccggggtttgtggtcccccccccaccacaaacacagcacttcggctcctctaacctgtgccacaggtgaccaccaataaaatcctctgctgaga

SEQ ID NO: 33409 - DNA, 2615 bp, Homo sapiens
  source 1..2615: mol_type = unassigned DNA
actatccaaaacatttctattttcctaacacaaaaactatagctaagtttttatattctatgtagccccagcctaggacgtaaattccacgagaccaaaagccttgtgatgattccccgaggttgctgaccctcccggtgtgtcccgggcctgctctgggggacacagcggcgaatacgttgaacgaggcccctgtttcacggagctaaagatccagtaaggacttcacccagcgagaggcaactacgccgggcttcgatacccaatacctctgcagaaaggtggagtggcaggaatctcctgaagcctccaacgtccaggaacgcggaaacccagggcctccagtgcaggtgtcatcccggagggcgcatgcggagtcccaagagaggcgcgtcccattggacaatgctgagcggaagagcccaagatagcggggggagttgtgacaggctgctgcagacgtacttagaaaaggggtgcatactggatattcaggctaggagaagaacgcaaaaagcagtgacgtacattattctctgcatatatttacttgggaaattgtgcgtctccctattctgagtcttggaggaattggactggtccaaccttataaagagagcagtagagcgcggcagtatagagagtacctcacgaaggggacgtgggaaagtgttagcggggaacgctgggaaactcccggcctccgccaccatcttgctttcctttaatccggcagtgaccgtgtgtcagaacaatcttgaatcatgaagctactaaccagagccggctctttctcgagattttattccctcaaagttgcccccaaagttaaagccacagctgcgcctgcaggagcaccgccacaacctcaggaccttgagtttaccaagttaccaaatggcttggtgattgcttctttggaaaactattctcctgtatcaagaattggtttgttcattaaagcaggcagtagatatgaggacttcagcaatttaggaaccacccatttgctgcgtcttacatccagtctgacgacaaaaggagcttcatctttcaagataacccgtggaattgaagcagttggtggcaaattaagtgtgaccgcaacaagggaaaacatggcttatactgtggaatgcctgcggggtgatgttgatattctaatggagttcctgctcaatgtcaccacagcaccagaatttcgtcgttgggaagtagctgaccttcagcctcagctaaagattgacaaagctgtggcctttcagaatccgcagactcatgtcattgaaaatttgcatgcagcagcttaccggaatgccttggctaatcccttgtattgtcctgactataggattggaaaagtgacatcagaggagttacattacttcgttcagaaccatttcacaagtgcaagaatggctttgattggacttggtgtgagtcatcctgttctaaagcaagttgctgaacagtttctcaacatgaggggtgggcttggtttatctggtgcaaaggccaactaccgtggaggtgaaatccgagaacagaatggagacagtcttgtccatgctgcttttgtagcagaaagtgctgtcgcgggaagtgcagaggcaaatgcatttagtgttcttcagcatgtcctcggtgctgggccacatgtcaagaggggcagcaacaccaccagccatctgcaccaggctgttgccaaggcaactcagcagccatttgatgtttctgcatttaatgccagttactcagattctggactctttgggatttatactatctcccaggccacagctgctggagatgttatcaaggctgcctataatcaagtaaaaacaatagctcaaggaaacctttccaacacagatgtccaagctgccaagaacaagctgaaagctggatacctaatgtcagtggagtcttctgagtgtttcctggaagaagtcgggtcccaggctctagttgctggttcttacatgccaccatccacagtccttcagcagattgattcagtggctaatgctgatatcataaatgcggcaaagaagtttgtttctggccagaagtcaatggcagcaagtggaaatttgggacatacaccttttgttgatgagttgtaatactgatgcacacattacaggagagagctgaacgttctctcagcccagagcagcaaacacatgaaagtcagaagtctctaatatatcatttgtcttttttccagtgaggtaaaataaggcataaatgcaggtaattattcccagctgacctaaagtcaataaaacattctgtttaagtgtttttcttacgtttttctcaatgagttaatcaacaagtatttattatgtgctgatatctttgttttagatgctttaaaggagacaggaatataattattgagtatagaagcatcagaaactattaaaattaaggctaagtggctatcggggtaaatagtgccagattactattggtggcgtttaagatgaaagcaagttcaaaatttgtcattttgggtgtcaacagctaaatggtctggtttttacccctgttttgccttttttgcaataaaattatttccaaaaaacatacatttcctatcaatcata

SEQ ID NO: 33410 - DNA, 604 bp, Homo sapiens
  source 1..604: mol_type = unassigned DNA
gaccacgatgagtgtgccgcacttccggccagatcgccggatttccgctgagtgacccttacaagtccttcttgatcctgaactgggttaggtgccgctgttgctgctcgtgttgaatctagaaccgtagccagacatgggactggaggacgagcaaaagatgcttaccgaatccggagatcctgaggaggaggaagaggaagaggaggaattagtggatcccctaacaacagtgagagagcaatgcgagcagttggagaaatgtgtaaaggcccgggagcggctagagctctgtgatgagcgtgtatcctctcgatcacatacagaagaggattgcacggaggagctctttgacttcttgcatgcgagggaccattgcgtggcccacaaactctttaacaacttgaaataaatgtgtggacttaattcaccccagtcttcatcatctgggcatcagaatatttccttatggttttggatgtaccatttgtttcttatttgtgtaactgtaagttcacatgaacctcatgggtttggcttaggctggtagcttctatgtaattcgcaatgattccatctaaataaaagttctatgatctgcaaa

SEQ ID NO: 33411 - DNA, 586 bp, Homo sapiens
  source 1..586: mol_type = unassigned DNA
gagtcaaccggatcggtgactgtggagggcgagctgagccctgtgcgtgagtggggtctggttgtgcagtgttcgtggaccctgggaggctaggggcgccccgctgggctgggaaaggataaggagtgcaggggcaggagtctggggttggggatggacccccgcggggactgcggcgcttcgcgaaagcgagccaagcgcctgtccaccctcggtcctgcagggccgccgccacaatgggccgcgagtttgggaatctgacgcggatgcggcatgtgatcagctacagcttgtcaccgttcgagcagcgcgcctatccgcacgtcttcactaaaggaatccccaatgttctgcgccgcattcgggagtctttctttcgcgtggtgccgcagtttgtagtgttttatcttatctacacatgggggactgaagagttcgagagatccaagaggaagaatccagctgcctatgaaaatgacaaatgagcaacgcatccggatgacggttccctgtctctgaaagacctttctctggaagaggagtctgcattgtagtgtctcaaagacacaataaacttcctatggtc

SEQ ID NO: 33412 - DNA, 429 bp, Homo sapiens
  source 1..429: mol_type = unassigned DNA
gccggaaatgacgaacgagtcaaccggatcggtgactgtggagggcgagctgagccctgtgcggccgccgccacaatgggccgcgagtttgggaatctgacgcggatgcggcatgtgatcagctacagcttgtcaccgttcgagcagcgcgcctatccgcacgtcttcactaaaggaatccccaatgttctgcgccgcattcgggagtctttctttcgcgtggtgccgcagtttgtagtgttttatcttatctacacatgggggactgaagagttcgagagatccaagaggaagaatccagctgcctatgaaaatgacaaatgagcaacgcatccggatgacggttccctgtctctgaaagacctttctctggaagaggagtctgcattgtagtgtctcaaagacacaataaacttcctatggtctgca

SEQ ID NO: 33413 - DNA, 839 bp, Homo sapiens
  source 1..839: mol_type = unassigned DNA
cttagagacagtaggaaaatggtatctcccggaagttacctcacgacctccaagagcggcttccaaccttgccggaaatgacgaacgagtcaaccggatcggtgactgtggagggcgagctgagccctggccgccgccacaatgggccgcgagtttgggaatctgacgcggatgcggcatgtgatcagctacagcttgtcaccgttcgagcagcgcgcctatccgcacgtcttcactaaaggaatccccaatgttctgcgccgcattcgggagtctttctttcgcgtggtgccgcagtttgtagtgttttatcttatctacacatgggggactgaagagttcgagagatccaagaggaagaatccagctgcctatgaaaatgacaaatgagcaacgcatccggatgacggttccctgtctctgaaagacctttctctggaagaggagtctgcattgtagtgtctcaaagacacaataaacttcctatggtctgcactgttgtgatattacatttttgtgagtagaatcctgtgtgaccactaatattcaagttcatgaagcgcccctcctcagcatgagtcttgaagttttgcctggtctcgggttttggtgaaagagcagggctccccctttgttccattatctacaagaaagtagctgcaggtactcctgcatctaaccatttgtgggtgacatgggctatggcgagtgctggttcttggccctctgctcccatagcaacaataaagtctactaactatattgtaattagtatgtgtcagggacgcttttattttttattttttgagatggagtcttgctctctcacccaggctgga

SEQ ID NO: 33414 - DNA, 2788 bp, Homo sapiens
  source 1..2788: mol_type = unassigned DNA
gctccgtgcgcaagcgctttcggcggcgattaggtggtttccggttccgctatcttctttttcttcagcgaggcggccgagctgacgcaaacatgcagatctttgtgaagaccctcactggcaaaaccatcacccttgaggtcgagcccagtgacaccattgagaatgtcaaagccaaaattcaagacaaggagggtatcccacctgaccagcagcgtctgatatttgccggcaaacagctggaggatggccgcactctctcagactacaacatccagaaagagtccaccctgcacctggtgttgcgcctgcgaggtggcattattgagccttctctccgccagcttgcccagaaatacaactgcgacaagatgatctgccgcaagtgctatgctcgccttcaccctcgtgctgtcaactgccgcaagaagaagtgtggtcacaccaacaacctgcgtcccaagaagaaggtcaaataaggtggttctttccttgaagggcagcctcctgcccaggccccgtggccctggagcctcaataaagtgtccctttcattgactggagcagcaattggtgtcctcatggctgatctgtccagggaggtggctgaagagtgggcatctcccttagggactctactcagcactccattctgtgccacctgtggggtcttctgtcctagattctgtcacatcggcattggtccctgccctatgcccctgactctggatttgtcatctgtaaaactggagtaaaaacctcagtcgtgtaattggtgggactgaggatcagttttgtcattgctgggatcctgtcaggcactttgaggtgtccctcaggccttggccctgaagtgtctaggtgtgtggagatgggtagaaaattaggtacacccaatggtgtagaacgttgattctcaaatttttttattttatacaaatggggtctcactatgttgtccaggctggtcttgaactcctgggctcaagccatccgcccatctcagcccctcaaagtgttgggattacaagcaagaactgccatgcctgacccagttctcagttttttgtttgtttgtttgtttgtttgttttgagacggagtcttgctctgtcgcccaggctggagtgcagtggcgcagtctcggcttactacaacctctgcctccggggttcacatccttctcctgcctcagcctcccgagtagctgggactacaggtgcccgccacaactcctggctaattttttgtatttttagtagagacggggtttcactgggttagccaggttggtctcgatctcctgaccttgtgatccattcgccttggcctcccagaatgctggtattacaggcgtgagccagcacgcctggcccagttactcagttttgaatctgaggccgtgacatcactcatggtctgcagtcagtgctctgcccctgagctgtaccctctcctatgataatcactcttaagaagggcaacccttggtgttttccccttaaggtcacccaggctggaatgcagtggtgtggtcatggctccctgtaccctggaactcaggcttgggtgatcctctctcctttgcctccgaagtagccaggactacaggtgtgcacccaccaccacactcagataattgctttggtgtttttaaagcttgtaatgatcagtaggctgaggtgggcaaatcataaggtcaagagttttttagatggggtgagcacagaccaattcctgttttatttactgatttaaaattttgagacagtctcactgtcacccaggttggggtgcagtggtaggatcatagcttgctgcagccttgatctcccaggatcttgcctcagcctcccgagtagctgggactgcatgcttgtgccaccacactcggttaatattttgtagagatggggtcttgctatgttgcccaggctggcttcaaactcctgaacttaaaagcctcctgtttagttttggttttttatcactttttttttttttttttgagatggagccttgctcccatcgtgcaggctggagtgcggtggcgcagtctcggctcactgcagcttctgcctctcgggttcaagcgattctcctttctcagcctcttgagtagctggaattaccagtgtgcgccaccaccaccacgcctggctagtttttctgtttttagtagagacagggttttgctatgttggccaggctggtcttgaactactgacctcttgtgatctacctgtcttggccttccaaagtgctaggattacaagcgtaagccacagcgcctggccttgctacatttttttttttttttttttttttacagacatggtctcgctatgttgcccagaatggttttgcactgggtccaagcagttctgccgcagcctcccaaagtgctgggattacaggggtgaggcaccttgctggcccctgttttgattagggtgcagtgctggtgaagccggtgcacgaggccagtgatgcatcctaatgaggggtggagttggcgggacttcctgggccagtttggggactttcacaaaagacccccatgactcagggttttgagttcttaactgatcgaatgaaggattcaaaattaaccactccaaggggggattgaaggaagaaccactcttaatggacaaaaagaaagaaaggggagggagtaacagggatatgagctctagccgcccaagctagcaatggcaacccttctgggtccccttccagcatgtggaagctttcctttcgcttcattcaataaacagctgctgctc

SEQ ID NO: 33415 - DNA, 2810 bp, Homo sapiens
  source 1..2810: mol_type = unassigned DNA
gctccgtgcgcaagcgctttcggcggcgattaggtggtttccggttccgctatcttctttttcttcagcgaggcggccgagctggttggtggcggcggtcgtgcggacgcaaacatgcagatctttgtgaagaccctcactggcaaaaccatcacccttgaggtcgagcccagtgacaccattgagaatgtcaaagccaaaattcaagacaaggagggtatcccacctgaccagcagcgtctgatatttgccggcaaacagctggaggatggccgcactctctcagactacaacatccagaaagagtccaccctgcacctggtgttgcgcctgcgaggtggcattattgagccttctctccgccagcttgcccagaaatacaactgcgacaagatgatctgccgcaagtgctatgctcgccttcaccctcgtgctgtcaactgccgcaagaagaagtgtggtcacaccaacaacctgcgtcccaagaagaaggtcaaataaggtggttctttccttgaagggcagcctcctgcccaggccccgtggccctggagcctcaataaagtgtccctttcattgactggagcagcaattggtgtcctcatggctgatctgtccagggaggtggctgaagagtgggcatctcccttagggactctactcagcactccattctgtgccacctgtggggtcttctgtcctagattctgtcacatcggcattggtccctgccctatgcccctgactctggatttgtcatctgtaaaactggagtaaaaacctcagtcgtgtaattggtgggactgaggatcagttttgtcattgctgggatcctgtcaggcactttgaggtgtccctcaggccttggccctgaagtgtctaggtgtgtggagatgggtagaaaattaggtacacccaatggtgtagaacgttgattctcaaatttttttattttatacaaatggggtctcactatgttgtccaggctggtcttgaactcctgggctcaagccatccgcccatctcagcccctcaaagtgttgggattacaagcaagaactgccatgcctgacccagttctcagttttttgtttgtttgtttgtttgtttgttttgagacggagtcttgctctgtcgcccaggctggagtgcagtggcgcagtctcggcttactacaacctctgcctccggggttcacatccttctcctgcctcagcctcccgagtagctgggactacaggtgcccgccacaactcctggctaattttttgtatttttagtagagacggggtttcactgggttagccaggttggtctcgatctcctgaccttgtgatccattcgccttggcctcccagaatgctggtattacaggcgtgagccagcacgcctggcccagttactcagttttgaatctgaggccgtgacatcactcatggtctgcagtcagtgctctgcccctgagctgtaccctctcctatgataatcactcttaagaagggcaacccttggtgttttccccttaaggtcacccaggctggaatgcagtggtgtggtcatggctccctgtaccctggaactcaggcttgggtgatcctctctcctttgcctccgaagtagccaggactacaggtgtgcacccaccaccacactcagataattgctttggtgtttttaaagcttgtaatgatcagtaggctgaggtgggcaaatcataaggtcaagagttttttagatggggtgagcacagaccaattcctgttttatttactgatttaaaattttgagacagtctcactgtcacccaggttggggtgcagtggtaggatcatagcttgctgcagccttgatctcccaggatcttgcctcagcctcccgagtagctgggactgcatgcttgtgccaccacactcggttaatattttgtagagatggggtcttgctatgttgcccaggctggcttcaaactcctgaacttaaaagcctcctgtttagttttggttttttatcactttttttttttttttttgagatggagccttgctcccatcgtgcaggctggagtgcggtggcgcagtctcggctcactgcagcttctgcctctcgggttcaagcgattctcctttctcagcctcttgagtagctggaattaccagtgtgcgccaccaccaccacgcctggctagtttttctgtttttagtagagacagggttttgctatgttggccaggctggtcttgaactactgacctcttgtgatctacctgtcttggccttccaaagtgctaggattacaagcgtaagccacagcgcctggccttgctacatttttttttttttttttttttttacagacatggtctcgctatgttgcccagaatggttttgcactgggtccaagcagttctgccgcagcctcccaaagtgctgggattacaggggtgaggcaccttgctggcccctgttttgattagggtgcagtgctggtgaagccggtgcacgaggccagtgatgcatcctaatgaggggtggagttggcgggacttcctgggccagtttggggactttcacaaaagacccccatgactcagggttttgagttcttaactgatcgaatgaaggattcaaaattaaccactccaaggggggattgaaggaagaaccactcttaatggacaaaaagaaagaaaggggagggagtaacagggatatgagctctagccgcccaagctagcaatggcaacccttctgggtccccttccagcatgtggaagctttcctttcgcttcattcaataaacagctgctgctc

SEQ ID NO: 33416 - DNA, 1968 bp, Homo sapiens
  source 1..1968: mol_type = unassigned DNA
ctcatttctgtgtgcaggcgagcttcttggcctaagggcaggaagagatggcagcgggggagacgcagctctacgccaaggtctccaacaagctcaagagccgcagcagcccctcgctcctggagcccctcctggccatgggcttcccggtgcacaccgcgctgaaagcgttggcagccacggggaggaagacggcggaggaggccttggcctggctgcatgatcattgcaatgacccttccctagacgaccccatcccccaggagtatgcccttttcctctgtccaacggggcccctgctggaaaaacttcaagagttctggagagagagcaagcgccagtgtgcaaagaacagagctcatgaggtcttcccacacgtgacactctgtgacttcttcacgtgtgaagaccagaaggtggaatgcctgtacgaggcgctgaagagagctggagacaggctcctgggctccttccccacggccgtgcctctggctctccactcctccatcagctacctcggcttcttcgtcagtggcagccccgcagacgtcatccgggaattcgccatgaccttcgccacggaagcatctctcttagcagactgctccgtgaagccttgcaccaaacagctgcatctgaccttggcccacaagttctacccccaccaccagaggacgctggagcagctggccagagccatccccctgggccacagctgccagtggaccgcagcactctactcccgagacatgcgctttgtgcactaccagaccctgagagccctattccagtacaaaccccagaacgtggatgagctgacgctaagtcctggtgactacatctttgtggaccccacgcagcaggacgaagccagcgagggctgggtgattgggatctcacagcggacgggctgccggggcttcctgccggaaaactacacggatcgagccagtgagtctgacacgtgggtgaagcacaggatgtacaccttcagtctagccacagacctgaactccagaaaggatggtgaagccagcagcagatgcagcggggaatttcttccacaaacggcaaggagtcttagcagcttacaggccttgcaggctaccgttgcaaggaagagcgtgctggtggttcgccacggggagagagtggatcagatcttcgggaaggcatggctgcagcaatgctccactcctgatgggaaatactacaggccagacctgaatttcccctgcagtctgccaagacggagtcgtgggatcaaagactttgaaaacgatcccccattatcatcgtgtggcattttccagtccagaattgcaggggacgcgctactggacagtggtatcagaatcagctctgtgtttgcctccccagccctccgctgtgtgcagacggccaaactcatcctggaagaactcaaactggagaaaaaaatcaagatacgagtggaacctggaatctttgaatggacaaaatgggaagctggcaaaaccaccccaaccctcatgagcctggaagagctgaaagaggcaaatttcaacattgacactgattacaggcccgcgtttcccctgtccgccctcatgccggccgagagctaccaggagtacatggacaggtgcacggcgagcatggtgcaaatcgtcaacacctgtccacaggacacgggtgtcatcctaattgtgagtcacggctccactctggactcctgcacgcggccactgctcgggctgccgccccgggaatgtggggattttgcccaactcgtgagaaagatcccttccctgggcatgtgcttctgtgaagaaaataaagaggaaggaaaatgggagttggtgaacccaccggtgaagaccctgacccacggggcgaacgcagcatttaactggaggaactggatctcaggcaactgagagccacggtgatgttgtcataacctcagagtggagaggcagaaaccat

SEQ ID NO: 33417 - DNA, 2504 bp, Homo sapiens
  source 1..2504: mol_type = unassigned DNA
ggcgagcttcttggcctaagggcaggaagagatggcagcgggggagacgcagctctacgccaaggtctccaacaagctcaagagccgcagcagcccctcgctcctggagcccctcctggccatgggcttcccggtgcacaccgcgctgaaagcgttggcagccacggggaggaagacggcggaggaggccttggcctggctgcatgatcattgcaatgacccttccctagacgaccccatcccccaggagtatgcccttttcctctgtccaacggggcccctgctggaaaaacttcaagagttctggagagagagcaagcgccagtgtgcaaagaacagagctcatgaggtcttcccacacgtgacactctgtgacttcttcacgtgtgaagaccagaaggtggaatgcctgtacgaggcgctgaagagagctggagacaggctcctgggctccttccccacggccgtgcctctggctctccactcctccatcagctacctcggcttcttcgtcagtggcagccccgcagacgtcatccgggaattcgccatgaccttcgccacggaagcatctctcttagcaggcacttccgtttcccgcttctggattttcagccaggtgcctggacatggccctaacctgaggctgagcaatttaactagagcctccttcgtgagccactacatccttcaaaaatactgctccgtgaagccttgcaccaaacagctgcatctgaccttggcccacaagttctacccccaccaccagaggacgctggagcagctggccagagccatccccctgggccacagctgccagtggaccgcagcactctactcccgagacatgcgctttgtgcactaccagaccctgagagccctattccagtacaaaccccagaacgtggatgagctgacgctaagtcctggtgactacatctttgtggaccccacgcagcaggacgaagccagcgagggctgggtgattgggatctcacagcggacgggctgccggggcttcctgccggaaaactacacggatcgagccagtgagtctgacacgtgggtgaagcacaggatgtacaccttcagtctagccacagacctgaactccagaaaggatggtgaagccagcagcagatgcagcggggaatttcttccacaaacggcaaggagtcttagcagcttacaggccttgcaggctaccgttgcaaggaagagcgtgctggtggttcgccacggggagagagtggatcagatcttcgggaaggcatggctgcagcaatgctccactcctgatgggaaatactacaggccagacctgaatttcccctgcagtctgccaagacggagtcgtgggatcaaagactttgaaaacgatcccccattatcatcgtgtggcattttccagtccagaattgcaggggacgcgctactggacagtggtatcagaatcagctctgtgtttgcctccccagccctccgctgtgtgcagacggccaaactcatcctggaagaactcaaactggagaaaaaaatcaagatacgagtggaacctggaatctttgaatggacaaaatgggaagctggcaaaaccaccccaaccctcatgagcctggaagagctgaaagaggcaaatttcaacattgacactgattacaggcccgcgtttcccctgtccgccctcatgccggccgagagctaccaggagtacatggacaggtgcacggcgagcatggtgcaaatcgtcaacacctgtccacaggacacgggtgtcatcctaattgtgagtcacggctccactctggactcctgcacgcggccactgctcgggctgccgccccgggaatgtggggattttgcccaactcgtgagaaagatcccttccctgggcatgtgcttctgtgaagaaaataaagaggaaggaaaatgggagttggtgaacccaccggtgaagaccctgacccacggggcgaacgcagcatttaactggaggaactggatctcaggcaactgagagccacggtgatgttgtcataacctcagagtggagaggcagaaaccatgtgcagaggctgggagatgctgctgtttccagaggcgtcttagtctcacccaatgtgatttgtagaagcacgagacgcacttttatatcccggaatatttccctccggctttcgcctttgtaactcccatctgtggacccatcgtccaccagcccagctgcggggagcacagggcaggtggctgggtgaggatgccgccctgcagcatgtacaccgagtgtctgcagctggggacacaactgcccgggactctaacttccaggaattaaagactcaccacacacgaaggatctaaccacttcattttccatggtctaatcattaaattcccaatcgttttttctttttctgggtccatcactctttagccatatccacatgggctaaaacaggtgtaatagtcaataaaatggtcccagaaaaccatcgaccaggtca

SEQ ID NO: 33418 - DNA, 871 bp, Homo sapiens
  source 1..871: mol_type = unassigned DNA
atttctgtgtgcaggcgagcttcttggcctaagggcaggaagagatggcagcgggggagacgcagctctacgccaaggtctccaacaagctcaagagccgcagcagcccctcgctcctggagcccctcctggccatgggcttcccggtgcacaccgcgctgaaagcgttggcagccacggggaggaagacggcggaggaggccttggcctggctgcatgatcattgcaatgacccttccctagacgaccccatcccccaggagtatgcccttttcctctgtccaacggggcccctgctggaaaaacttcaagagttctggagagagagcaagcgccagtgtgcaaagaacagagctcatgaggtcttcccacacgtgacactctgtgacttcttcacgggaccagccgtctgattcagaaaaaaaatggcccagtgggtagctccacagcaaaacacaatggcccagcaggcagctctacaggggcaccgggaagacaagaagaatgtgggagctgctcaggagaaaagaaggagaagggagagacagacagccactgctctactcagctccgccagaggggcttaaggaagggcacacccacttctgctaccgcggcctggccccaactctgctgttggcaaactgatttgttccacccatttcaaggaattccatcagggcccaaggaaccctccattccaacaccaggcccctcggtgctggatggaaaggaggaatgcaaacctctgaagggaaaagatttctggaagatgtcccaggagaagcagtaccttccaaagcctccaaccaccaccccggattgcccgagacttgcagggatccccagagcacaagactaaacctggaaa

SEQ ID NO: 33419 - DNA, 1733 bp, Homo sapiens
  source 1..1733: mol_type = unassigned DNA
cgagcttcttggcctaagggcaggaagagatggcagcgggggagacgcagctctacgccaaggtctccaacaagctcaagagccgcagcagcccctcgctcctggagcccctcctggccatgggcttcccggtgcacaccgcgctgaaagcgttggcagccacggggaggaagacggcggaggaggccttggcctggctgcatgatcattgcaatgacccttccctagacgaccccatcccccaggagtatgcccttttcctctgtccaacggggcccctgctggaaaaacttcaagagttctggagagagagcaagcgccagtgtgcaaagaacagagctcatgaggtcttcccacacgtgacactctgtgacttcttcacgtgtgaagaccagaaggtggaatgcctgtacgaggcgctgaagagagctggagacaggctcctgggctccttccccacggccgtgcctctggctctccactcctccatcagctacctcggcttcttcgtcagtggcagccccgcagacgtcatccgggaattcgccatgaccttcgccacggaagcatctctcttagcagactgctccgtgaagccttgcaccaaacagctgcatctgaccttggcccacaagttctacccccaccaccagaggacgctggagcagctggccagagccatccccctgggccacagctgccagtggaccgcagcactctactcccgagacatgcgctttgtgcactaccagaccctgagagccctattccagtacaaaccccagaacgtggatgagctgacgctaagtcctggtgactacatctttgtggaccccacgcagcaggacgaagccagcgagggctgggtgattgggatctcacagcggacgggctgccggggcttcctgccggaaaactacacggatcgagccagtgagtctgacacgtgggtgaagcacaggatgtacaccttcagtctagccacagacctgaactccagaaaggatggtgaagccagcagcagatgcagcggggaatttcttccacaaacggcaaggagtcttagcagcttacaggccttgcaggctaccgttgcaaggaagagcgtgctggtggttcgccacggggagagagtggatcagatcttcgggaaggcatggctgcagcaatgctccactcctgatgggaaatactacaggccagacctgaatttcccctgcagtctgccaagacggagtcgtgggatcaaagactttgaaaacgatcccccattatcatcgtgtggcattttccagtccagaattgcaggggacgcgctactggacagtggtatcagaatcagctctgtgtttgcctccccagccctccgctgtgtgcagacggccaaactcatcctggaagaactcaaactggagaaaaaaatcaagatacgagtggaacctggaatctttgaatggacaaaatgggaagctggcaaaaccaccccaaccctcatgagcctggaagagctgaaagaggcaaatttcaacattgacactgattacagatcccttccctgggcatgtgcttctgtgaagaaaataaagaggaaggaaaatgggagttggtgaacccaccggtgaagaccctgacccacggggcgaacgcagcatttaactggaggaactggatctcaggcaactgagagccacggtgatgttgtcataacctcagagtggagaggcagaaaccat

SEQ ID NO: 33420 - DNA, 6912 bp, Homo sapiens
  source 1..6912: mol_type = unassigned DNA
cagcccacaaggctccttttcctttttgatccattcaaaaattactcattgcaaattcccggactgctaggcgaggagagggaagggggcggaggagacagggctactgcaggcgcagagctgggggcagccgggggcccgagtggctgaggctggtcccgcagcggccgcttgccggcgttctggctcctgtggcctcaccaggaagcgtcagagtcccgacactggggaagctcggagcgccgcctccgctgccgccgcctcctgcctggctctgggtccccgagccccctcccctggcccagcccgactccctcctccttcccgaaccatccggctcgggctccttccctggcgatggctggccgctgagccatggctcagtacggccaccccagtccgctcggcatggctgcgagagaggagctgtacagcaaagtcaccccccggaggaaccgccaacagcgccccggcaccatcaagcatggatcggcgctggacgtgctcctctccatggggttccccagagcccgcgcacaaaaagccttggcatccacgggaggaagaagtgttcaggcagcatgtgactggttattctcccatgtcggtgaccccttcctggatgaccccctgccccgggagtacgtcctctacctccgtcccaccggccccttagcacagaagctttccgacttttggcagcagtcgaagcagatctgcgggaagaacaaggcacacaacatcttcccccacatcacactctgccagttctttatgtgcgaggacagcaaggtggatgccctgggggaagccctgcagaccacggtcagtcgctggaaatgtaagttctcggccccgctgcccctggagctctatacgtcgtccaacttcatcggcctctttgtaaaggaagacagtgcggaggtcctcaagaagtttgctgctgactttgctgcagaggctgcatccaaaaccgaagtgcatgtggaacctcataagaagcagctacatgtgaccctggcttaccacttccaagccagccacctacccaccctagagaaactggcccagaacattgacgtcaagctagggtgtgactgggtggctaccatattttctcgggatatccgatttgctaaccatgagacattacaggtcatctacccctataccccacaaaatgacgatgagctggagctggtccccggggacttcatcttcatgtctccaatggagcagaccagcaccagcgagggttggatctatggcacgtccttaaccaccggctgctctggactcctgcctgagaattacattaccaaggctgatgaatgcagcacctggatatttcatggttcttattcaatcttaaatacatcgtcatccaactctctcacgtttggggatggagtattggagaggcggccttatgaggaccaggggctcggggagacgactcctcttactatcatctgccagcccatgcagccgctgagggtcaacagccagcccggcccccagaagcgatgcctttttgtgtgtcggcatggtgagaggatggatgttgtgtttgggaagtactggctgtcccagtgcttcgatgccaaaggccgctacatacgcaccaacctgaacatgcctcatagtttacctcagcggagtggtggtttccgagattacgagaaagatgctcccatcactgtgtttggatgcatgcaagcaagactagtgggtgaagccttattagagagcaataccattatcgatcatgtctattgctccccgtcccttcgctgcgttcagactgcacacaatatcttgaaaggtttacaacaagaaaatcacttgaagatccgtgtagagcccggcttatttgagtggacaaaatgggttgctgggagcacattacctgcatggatacctccatcagagttagctgcagccaacctgagtgttgatacaacctacagacctcacattccaatcagcaaattagttgtttcagaatcctatgatacttatatcagtagaagtttccaagtaacaaaagaaataataagtgaatgtaaaagtaaaggaaataacatcctgattgtggcccacgcatcttcccttgaagcgtgtacctgccaacttcagggcctgtcacctcagaactccaaggacttcgtacaaatggtccgaaagatcccatatctgggattttgttcctgtgaagaattaggagaaactggaatatggcagctgacagatccaccaatccttcctcttacccatggaccaactgggggcttcaactggagagagaccttgcttcaagaataaaccacaccagtgaacaagaaggaaaggccttttggagtgtgtctttctgtgtgtttaaaaacagtgggaaaatccacaccacactctaagtggacagctcagaataatttagcatatttcctttcacacttaaagttcttaagatgagactgtgtaaatgagagaaagacttgattcagaggaaaaaaatgtgttctctctggactcttgcctagctcacaaggctttggagaattgtcttcctaaatcggggcacctgctacagaagagaatgtttcgttccctctgggtatgcacagctaaggggcctcatttctcccagagggagctgctggcccgctctaaggggtgcaagaggaaggagtgtgcccagaccagctgggggagcattgaaaggacagcttggggatggaatttttttttttttatctccattttccagttaggtagagccaagctgaggaatccttttaagattattagaaaacatgccctgaagagagttgttcttaggttacacatgaaatcctaccgtcactagcccccatacaccagtgttgctggctgaagatacccgcttaaggatgctaacatttaccctggtactgccacattttctctagagcagctggcccttcttgctacagccctatcccccctccttgcttctgtgaaatggggagacaaagcacttttgctctccaaagcacttttggatactcaggaggaaagataagatacatgtttgaagtattcaatcataggagcaaagaacttgcaaaatatgaagtgacttggaattaaccatgttgtagcctaacgtgctactgcatttctaaatcatcaatatttgcttgtctttgcccctagactctagactatgttaactagttaaggatgttacattttgaaaggatgtatgttagatatattatttgcagcaagaagttcattctgtgcaatatggacatgtttgcaaaccataccaagggtcaggttgttgtacacttacagtacgtgtcaaccataatggaacatccacaaatgcatcaattataccagggatgtatagtaagtcagggaactaatataaatgatgacagtcatggctgcactgctacttgtgctgtcgttttgtttgtttttctatgataatttaaaatacataggtagggctactgaggaaatttggagagccacattctgtggtttctcattatacttacttcctgcatttagagggagtttatttaaaagaaataaatgacaatcaaaccaaatcatcagttatcaatgtctgtttaattgtgtgactatctgactgttgatggccacagatgatggtctcctatggtatagttcactctgtagaagatgtatgcaaagtgaaatgccagccctttaaagagacattagttagtgtaaaatggatctttacatgttgcagtaacattgactatgtttcaaaactcagatgcataaaacgtaaggtatataaaaatacatctatgcttgcgtttgaaactacaacttgataacccctagaaagaagaggacatgaaaggatgctggctatatatgttaatgagcaaaaggattatagttgttttgttttgtttttagagacagggtctcactataatgcttagactggtcttgaactcctgggctcaagcgatcctcctgcccctgtctcccaaagtgctaggattacaggtgtgagccaccacacctggcccatagttgtattttttttaggtcacttagaaaaatatgtcatgtattttacattttgagaaacaaatcaatcatggtttcttctagcgttgcgcaaacactgacccagcttctgggtatggaaataaccctgtgatgatgtgttaatataaaatgttgggagggaatattcccaataaaggtcttaagagaaaagtcacattacaagtaatgtaatggctctaccattcattcttctggtatttgtaatgaagtgaatccactgtttaatcagatccataatctttaacagattcaccacaaattttcatgggcgttgagtgctcagaataatgcttgaacacctcaccttgaaactgtagcagtgtgttctgggcagtatctgtaatgtatgaaatagagtctggaataggttatccactccatcttctaggttatcttagttgtatgacgaactgataaatctgtctgactgggctacaatccattgttcttagtccaatatggacactgccttaggcaatggtctatataagcaaaaggagatagagatctgaaataattttccgaataattcaggtggaaaacaagaaagattgtatttctctgctttcatttcaatttcattatttcaaattgcttgtcaaaatggcccaaaagatctgaattcacattaagttccccttgcacacttacctatttaaaaaactaaacttgcactgcaactgagaaattatttgtaaatcatgtggcatctatgtataataaaagaaagagacaactatattactcaatttcatatacatccaaaaagtataggctaatatatataacctgaagttgcagctggttctttttgatctgaagctgatgcttattaaaacaaatgatgtatggggagaggagaaggaagggcaaggaaggaattgacagataagaagcaaatggtttcttgtacagaggaattttgttttaatgtagaaagttatttgaaataaactaggtgaaatgaaattaactaaaggttttaatctgggattgaaagcctgaaagcatttcctgcttctacaagtgtgccacatcaatccggtaatgccccagtgttattcacagacagaactttgtttcctgtgattttaaaataccgcgtctgttcctccatggaccagagtaattggcacattttaatgcataagctgggggtttcattttcccaggctctcttcaccatcactgcattggtagctaggagcttattgcttcaccccagtatggagttcagattacagtgttttccattacatttagattcatagaatctgaatggctgattaaatggccatctgatggctgaaagaggggcgtatttttcactctgtagtgaaaggcttggaggagtttctactttttattttaattatactttaaccaaagaattattttaaagtaaccttatatttaaaagatgattttgcaaaaaataaaaaataaaaaatatgccttctggagtgatgtctgtttggtaaatcattgttgataatttccttgttagtggtatttggaatgcatatagattgtcttgtcattgtgcttaacattaccataagtgtgtcttttccactcaactagctgtattcgtattaaaatgaagtctcttatttcaattacctagtgttgttgggaactaattgaacagctacagtaaaagaagttcctatctcattgcctttgtggaaaggcttccctatgtggtaaaagaaaggcattcctccgtaacctaggcactctgcaagtccagtgtttaatttcaaagcagtgatgaattgctcttttgaaattactctaagtaatccatgtgttagaatacagatgaacctccgtttgatttcacagccttcagcacaggcaactgttactgagtctgcacgaacttagataatgaggtgcagggttatttgcatttaaattgcaatccagcacacgtgtgagaaagaagaggcactagtctaaaaggctgcattgcggggagagatgagacaggcagaggagggtggggtaaagagcgatttaacatctatttaggttaatgttcactttacaaaggtgatgggggatattttgttaggtgatagcagaagcttttcatttttaaacatagaattaaaattggatttgcttctctttaatacttcaacatattgaatttccctaggaaagtgactagctataatgaaaattcaagcgaaaagggaaaaagattgtaaatgcagatgaaataacttcatttttaagtacaaataatagtaggattggtgtatgtaggtttaaaattatagtgatgactagtcgaacttaatatacaatcagttcttgcaaatactttacacttagctgccattacacaacaaattggaattttccagctgttcaactatcatggactctgtacaggatagatgtgtataatggaaaatatgtactgcttctttctttgattgccactcaagatggaaacaccatgccaaggcattttggttatacacagatcattctaaacctgttattttggagaggtgtattggtttctttctcatttataaggctattgtatttttttttgtatgtgattcaggtgtatttatttgaagactatttgtagttataggaaaaccacacctacctgtattgccaaattctttgtaaactctccgtggcacttgtgctttcctggctgagagctctcccctgttgatacagctatggcaccattgtaattacagatgcacctttcaggagcatctccattaaatggttcatagatgatttaataaaaagaaacttctcagttga

SEQ ID NO: 33421 - DNA, 2735 bp, Homo sapiens
  source 1..2735: mol_type = unassigned DNA
aaatgagtggggcggtgaggggaaggaggagggaagtaggacttcaacatggcggctgcggcactggcggtggctacggtgacggcctggcccggagcgggcagagttggaggtggtggcgttcgctctccctaggggctgtcgggagctcagcggggaccgagcctgggaggccggccggtgccagcacctttcggcttctgagacggcggcagcagcggcattcaggttctaaatggcttctaagaagttgggtgcagattttcatgggactttcagttaccttgatgatgtcccatttaagacaggagacaaattcaaaacaccagctaaagttggtctacctattggcttctccttgcctgattgtttgcaggttgtcagagaagtacagtatgacttctctttggaaaagaaaaccattgagtgggctgaagagattaagaaaatcgaagaagccgagcgggaagcagagtgcaaaattgcggaagcagaagctaaagtgaattctaagagtggcccagagggcgatagcaaaatgagcttctccaagactcacagtacagccacaatgccacctcctattaaccccatcctcgccagcttgcagcacaacagcatcctcacaccaactcgggtcagcagtagtgccacgaaacagaaagttctcagcccacctcacataaaggcggatttcaatcttgctgactttgagtgtgaagaagacccatttgataatctggagttaaaaactattgatgagaaggaagagctgagaaatattctggtaggaaccactggacccattatggctcagttattggacaataacttgcccaggggaggctctgggtctgtgttacaggatgaggaggtcctggcatccttggaacgggcaaccctagatttcaagcctcttcataaacccaatggctttataaccttaccacagttgggcaactgtgaaaagatgtcactgtcttccaaagtgtccctcccccctatacctgcagtaagcaatatcaaatccctgtctttccccaaacttgactctgatgacagcaatcagaagacagccaagctggcgagcactttccatagcacatcctgcctccgcaatggcacgttccagaattccctaaagccttccacccaaagcagtgccagtgagctcaatgggcatcacactcttgggctttcagctttgaacttggacagtggcacagagatgccagccctgacatcctcccagatgccttccctctctgttttgtctgtgtgcacagaggaatcatcacctccaaatactggtcccacggtcacccctcctaatttctcagtgtcacaagtgcccaacatgcccagctgtccccaggcctattctgaactgcagatgctgtcccccagcgagcggcagtgtgtggagacggtggtcaacatgggctactcgtacgagtgtgtcctcagagccatgaagaagaaaggagagaatattgagcagattctcgactatctctttgcacatggacagctttgtgagaagggcttcgaccctcttttagtggaagaggctctggaaatgcaccagtgttcagaagaaaagatgatggagtttcttcagttaatgagcaaatttaaggagatgggctttgagctgaaagacattaaggaagttttgctattacacaacaatgaccaggacaatgctttggaagacctcatggctcgggcaggagccagctgagaccaggccctgcctaggccctgccgcagaaccaccatccctgggaggccctgcagagcccacctgtggggaaagagaaggggcagcttccggattttcttttgggggttagaaggtcaggtgtggagactgctcgccagtctctgtgagcctaggccctgagctggggaggtggggaagattcgggcatgtgagtgcccccagaactgtcctggctccttccgtattaaacgcatttgcattttgagaagtgtccttcccacttcagccctccggagagactaccctagtctttctggggtgtttatgtcctcagctgaagcctggcctagttgctgagaggggctggggagatggggcgggagggccagactcagtgctgctgtggagctaggtgcttcccccttcccctgagactggtggactgaactccagtcaagttgagttcaagtgaaagattcttccagggttttattttttcccctcctaacaaagtctcatagtgttaacactggttctgcaatatctctgaggtgcaaagaatgcacttttccctatggggcccagagtttgccttttctgccaggcagtcaccatgcttccctaccccagcctgtttcttttggcttggtttggaccacagtcctctgctacccagggttttagagcccctgctctaggaaacagtttaagaaatcattggccccttcccagcacattgaatgggtaagcagacaggccatgatttagttggccagcactaactccacctctgttctccttgaacagcttcccctccagcccactgctttaggatgacacaatgaataacacctagtcatagaaatcagtctctctggtttgttttgtattatgttgtacatcattaaagatctaaatacaaaggatatacagtcttgaatctaaaataatttgctaactaactattttgattcttcagagagaactactaataaaaatctaaaaggta

SEQ ID NO: 33422 - DNA, 2535 bp, Homo sapiens
  source 1..2535: mol_type = unassigned DNA
ctcagcctcccaagtagctgggactacaggttctaaatggcttctaagaagttgggtgcagattttcatgggactttcagttaccttgatgatgtcccatttaagacaggagacaaattcaaaacaccagctaaagttggtctacctattggcttctccttgcctgattgtttgcaggttgtcagagaagtacagtatgacttctctttggaaaagaaaaccattgagtgggctgaagagattaagaaaatcgaagaagccgagcgggaagcagagtgcaaaattgcggaagcagaagctaaagtgaattctaagagtggcccagagggcgatagcaaaatgagcttctccaagactcacagtacagccacaatgccacctcctattaaccccatcctcgccagcttgcagcacaacagcatcctcacaccaactcgggtcagcagtagtgccacgaaacagaaagttctcagcccacctcacataaaggcggatttcaatcttgctgactttgagtgtgaagaagacccatttgataatctggagttaaaaactattgatgagaaggaagagctgagaaatattctggtaggaaccactggacccattatggctcagttattggacaataacttgcccaggggaggctctgggtctgtgttacaggatgaggaggtcctggcatccttggaacgggcaaccctagatttcaagcctcttcataaacccaatggctttataaccttaccacagttgggcaactgtgaaaagatgtcactgtcttccaaagtgtccctcccccctatacctgcagtaagcaatatcaaatccctgtctttccccaaacttgactctgatgacagcaatcagaagacagccaagctggcgagcactttccatagcacatcctgcctccgcaatggcacgttccagaattccctaaagccttccacccaaagcagtgccagtgagctcaatgggcatcacactcttgggctttcagctttgaacttggacagtggcacagagatgccagccctgacatcctcccagatgccttccctctctgttttgtctgtgtgcacagaggaatcatcacctccaaatactggtcccacggtcacccctcctaatttctcagtgtcacaagtgcccaacatgcccagctgtccccaggcctattctgaactgcagatgctgtcccccagcgagcggcagtgtgtggagacggtggtcaacatgggctactcgtacgagtgtgtcctcagagccatgaagaagaaaggagagaatattgagcagattctcgactatctctttgcacatggacagctttgtgagaagggcttcgaccctcttttagtggaagaggctctggaaatgcaccagtgttcagaagaaaagatgatggagtttcttcagttaatgagcaaatttaaggagatgggctttgagctgaaagacattaaggaagttttgctattacacaacaatgaccaggacaatgctttggaagacctcatggctcgggcaggagccagctgagaccaggccctgcctaggccctgccgcagaaccaccatccctgggaggccctgcagagcccacctgtggggaaagagaaggggcagcttccggattttcttttgggggttagaaggtcaggtgtggagactgctcgccagtctctgtgagcctaggccctgagctggggaggtggggaagattcgggcatgtgagtgcccccagaactgtcctggctccttccgtattaaacgcatttgcattttgagaagtgtccttcccacttcagccctccggagagactaccctagtctttctggggtgtttatgtcctcagctgaagcctggcctagttgctgagaggggctggggagatggggcgggagggccagactcagtgctgctgtggagctaggtgcttcccccttcccctgagactggtggactgaactccagtcaagttgagttcaagtgaaagattcttccagggttttattttttcccctcctaacaaagtctcatagtgttaacactggttctgcaatatctctgaggtgcaaagaatgcacttttccctatggggcccagagtttgccttttctgccaggcagtcaccatgcttccctaccccagcctgtttcttttggcttggtttggaccacagtcctctgctacccagggttttagagcccctgctctaggaaacagtttaagaaatcattggccccttcccagcacattgaatgggtaagcagacaggccatgatttagttggccagcactaactccacctctgttctccttgaacagcttcccctccagcccactgctttaggatgacacaatgaataacacctagtcatagaaatcagtctctctggtttgttttgtattatgttgtacatcattaaagatctaaatacaaaggatatacagtcttgaatctaaaataatttgctaactaactattttgattcttcagagagaactactaataaaaatctaaaaggt

SEQ ID NO: 33423 - DNA, 2526 bp, Homo sapiens
  source 1..2526: mol_type = unassigned DNA
gaggagggaagtaggacttcaacatggcggctgcggcactggcggtggctacggtgacggcctggcccggagcgggcagagttggaggtggtggcgttcgctctccctaggggctgtcgggagctcagcggggaccgagcctgggaggccggccggtgccagcacctttcggcttctgagacggcggcagcagcggcattcaggttctaaatggcttctaagaagttgggtgcagattttcatgggactttcagttaccttgatgatgtcccatttaagacaggagacaaattcaaaacaccagctaaagttggtctacctattggcttctccttgcctgattgtttgcaggttgtcagagaagtacagtatgacttctctttggaaaagaaaaccattgagtgggctgaagagattaagaaaatcgaagaagccgagcgggaagcagagtgcaaaattgcggaagcagaagctaaagtgaattctaagagtggcccagagggcgatagcaaaatgagcttctccaagactcacagtacagccacaatgccacctcctattaaccccatcctcgccagcttgcagcacaacagcatcctcacaccaactcgggtcagcagtagtgccacgaaacagaaagttctcagcccacctcacataaaggcggatttcaatcttgctgactttgagtgtgaagaagacccatttgataatctggagttaaaaactattgatgagaaggaagagctgagaaatattctggtaggaaccactggacccattatggctcagttattggacaataacttgcccaggggaggctctgggtctgtgttacaggatgaggaggtcctggcatccttggaacgggcaaccctagatttcaagcctcttcataaacccaatggctttataaccttaccacagttgggcaactgtgaaaagatgtcactgtcttccaaagtgtccctcccccctatacctgcagtaagcaatatcaaatccctgtctttccccaaacttgactctgatgacagcaatcagaagacagccaagctggcgagcactttccatagcacatcctgcctccgcaatggcacgttccagaattccctaaagccttccacccaaagcagtgccagtgagctcaatgggcatcacactcttgggctttcagctttgaacttggacagtggcacagagatgccagccctgacatcctcccagatgccttccctctctgttttgtctgtgtgcacagaggaatcatcacctccaaatactggtcccacgattctcgactatctctttgcacatggacagctttgtgagaagggcttcgaccctcttttagtggaagaggctctggaaatgcaccagtgttcagaagaaaagatgatggagtttcttcagttaatgagcaaatttaaggagatgggctttgagctgaaagacattaaggaagttttgctattacacaacaatgaccaggacaatgctttggaagacctcatggctcgggcaggagccagctgagaccaggccctgcctaggccctgccgcagaaccaccatccctgggaggccctgcagagcccacctgtggggaaagagaaggggcagcttccggattttcttttgggggttagaaggtcaggtgtggagactgctcgccagtctctgtgagcctaggccctgagctggggaggtggggaagattcgggcatgtgagtgcccccagaactgtcctggctccttccgtattaaacgcatttgcattttgagaagtgtccttcccacttcagccctccggagagactaccctagtctttctggggtgtttatgtcctcagctgaagcctggcctagttgctgagaggggctggggagatggggcgggagggccagactcagtgctgctgtggagctaggtgcttcccccttcccctgagactggtggactgaactccagtcaagttgagttcaagtgaaagattcttccagggttttattttttcccctcctaacaaagtctcatagtgttaacactggttctgcaatatctctgaggtgcaaagaatgcacttttccctatggggcccagagtttgccttttctgccaggcagtcaccatgcttccctaccccagcctgtttcttttggcttggtttggaccacagtcctctgctacccagggttttagagcccctgctctaggaaacagtttaagaaatcattggccccttcccagcacattgaatgggtaagcagacaggccatgatttagttggccagcactaactccacctctgttctccttgaacagcttcccctccagcccactgctttaggatgacacaatgaataacacctagtcatagaaatcagtctctctggtttgttttgtattatgttgtacatcattaaagatctaaatacaaaggatatacagtcttgaatctaaaataatttgctaactaactattttgattcttcagagagaactactaataaaaatctaaaaggt

SEQ ID NO: 33424 - DNA, 2898 bp, Homo sapiens
  source 1..2898: mol_type = unassigned DNA
agacgcccaaatgagtggggcggtgaggggaaggaggagggaagtaggacttcaacatggcggctgcggcactggcggtggctacggtgacggcctggcccggagcgggcagagttggaggtggtggcgttcgctctccctaggggctgtcgggagctcagcggggaccgagcctgggaggccggccggtgccagcacctttcggcttctgagacggcggcagcagcggcattcagtttttggtatcagtgttatgctgatctcatacgagaacttggaattcagcaacattcattcagcaggagttactgagcactactgtggccgggcactatgcttggtgtaatggtgaatgagacagaagtggtatttgtcctcgtagtgcataaaggttctaaatggcttctaagaagttgggtgcagattttcatgggactttcagttaccttgatgatgtcccatttaagacaggagacaaattcaaaacaccagctaaagttggtctacctattggcttctccttgcctgattgtttgcaggttgtcagagaagtacagtatgacttctctttggaaaagaaaaccattgagtgggctgaagagattaagaaaatcgaagaagccgagcgggaagcagagtgcaaaattgcggaagcagaagctaaagtgaattctaagagtggcccagagggcgatagcaaaatgagcttctccaagactcacagtacagccacaatgccacctcctattaaccccatcctcgccagcttgcagcacaacagcatcctcacaccaactcgggtcagcagtagtgccacgaaacagaaagttctcagcccacctcacataaaggcggatttcaatcttgctgactttgagtgtgaagaagacccatttgataatctggagttaaaaactattgatgagaaggaagagctgagaaatattctggtaggaaccactggacccattatggctcagttattggacaataacttgcccaggggaggctctgggtctgtgttacaggatgaggaggtcctggcatccttggaacgggcaaccctagatttcaagcctcttcataaacccaatggctttataaccttaccacagttgggcaactgtgaaaagatgtcactgtcttccaaagtgtccctcccccctatacctgcagtaagcaatatcaaatccctgtctttccccaaacttgactctgatgacagcaatcagaagacagccaagctggcgagcactttccatagcacatcctgcctccgcaatggcacgttccagaattccctaaagccttccacccaaagcagtgccagtgagctcaatgggcatcacactcttgggctttcagctttgaacttggacagtggcacagagatgccagccctgacatcctcccagatgccttccctctctgttttgtctgtgtgcacagaggaatcatcacctccaaatactggtcccacggtcacccctcctaatttctcagtgtcacaagtgcccaacatgcccagctgtccccaggcctattctgaactgcagatgctgtcccccagcgagcggcagtgtgtggagacggtggtcaacatgggctactcgtacgagtgtgtcctcagagccatgaagaagaaaggagagaatattgagcagattctcgactatctctttgcacatggacagctttgtgagaagggcttcgaccctcttttagtggaagaggctctggaaatgcaccagtgttcagaagaaaagatgatggagtttcttcagttaatgagcaaatttaaggagatgggctttgagctgaaagacattaaggaagttttgctattacacaacaatgaccaggacaatgctttggaagacctcatggctcgggcaggagccagctgagaccaggccctgcctaggccctgccgcagaaccaccatccctgggaggccctgcagagcccacctgtggggaaagagaaggggcagcttccggattttcttttgggggttagaaggtcaggtgtggagactgctcgccagtctctgtgagcctaggccctgagctggggaggtggggaagattcgggcatgtgagtgcccccagaactgtcctggctccttccgtattaaacgcatttgcattttgagaagtgtccttcccacttcagccctccggagagactaccctagtctttctggggtgtttatgtcctcagctgaagcctggcctagttgctgagaggggctggggagatggggcgggagggccagactcagtgctgctgtggagctaggtgcttcccccttcccctgagactggtggactgaactccagtcaagttgagttcaagtgaaagattcttccagggttttattttttcccctcctaacaaagtctcatagtgttaacactggttctgcaatatctctgaggtgcaaagaatgcacttttccctatggggcccagagtttgccttttctgccaggcagtcaccatgcttccctaccccagcctgtttcttttggcttggtttggaccacagtcctctgctacccagggttttagagcccctgctctaggaaacagtttaagaaatcattggccccttcccagcacattgaatgggtaagcagacaggccatgatttagttggccagcactaactccacctctgttctccttgaacagcttcccctccagcccactgctttaggatgacacaatgaataacacctagtcatagaaatcagtctctctggtttgttttgtattatgttgtacatcattaaagatctaaatacaaaggatatacagtcttgaatctaaaataatttgctaactaactattttgattcttcagagagaactactaataaaaatctaaaaggta

SEQ ID NO: 33425 - DNA, 2866 bp, Homo sapiens
  source 1..2866: mol_type = unassigned DNA
agacgcccaaatgagtggggcggtgaggggaaggaggagggaagtaggacttcaacatggcggctgcggcactggcggtggctacggtgacggcctggcccggagcgggcagagttggaggtggtggcgttcgctctccctaggggctgtcgggagctcagcggggaccgagcctgggaggccggccggtgccagcacctttcggcttctgagacggcggcagcagcggcattcagacggaatttcactcttattgcccaggctggagtgcaatggcgtgatctcggctcactgcaacctctgcctcctgggttcaagcgattctcctgcctcagcctcccgagtagctgggattacaggttctaaatggcttctaagaagttgggtgcagattttcatgggactttcagttaccttgatgatgtcccatttaagacaggagacaaattcaaaacaccagctaaagttggtctacctattggcttctccttgcctgattgtttgcaggttgtcagagaagtacagtatgacttctctttggaaaagaaaaccattgagtgggctgaagagattaagaaaatcgaagaagccgagcgggaagcagagtgcaaaattgcggaagcagaagctaaagtgaattctaagagtggcccagagggcgatagcaaaatgagcttctccaagactcacagtacagccacaatgccacctcctattaaccccatcctcgccagcttgcagcacaacagcatcctcacaccaactcgggtcagcagtagtgccacgaaacagaaagttctcagcccacctcacataaaggcggatttcaatcttgctgactttgagtgtgaagaagacccatttgataatctggagttaaaaactattgatgagaaggaagagctgagaaatattctggtaggaaccactggacccattatggctcagttattggacaataacttgcccaggggaggctctgggtctgtgttacaggatgaggaggtcctggcatccttggaacgggcaaccctagatttcaagcctcttcataaacccaatggctttataaccttaccacagttgggcaactgtgaaaagatgtcactgtcttccaaagtgtccctcccccctatacctgcagtaagcaatatcaaatccctgtctttccccaaacttgactctgatgacagcaatcagaagacagccaagctggcgagcactttccatagcacatcctgcctccgcaatggcacgttccagaattccctaaagccttccacccaaagcagtgccagtgagctcaatgggcatcacactcttgggctttcagctttgaacttggacagtggcacagagatgccagccctgacatcctcccagatgccttccctctctgttttgtctgtgtgcacagaggaatcatcacctccaaatactggtcccacggtcacccctcctaatttctcagtgtcacaagtgcccaacatgcccagctgtccccaggcctattctgaactgcagatgctgtcccccagcgagcggcagtgtgtggagacggtggtcaacatgggctactcgtacgagtgtgtcctcagagccatgaagaagaaaggagagaatattgagcagattctcgactatctctttgcacatggacagctttgtgagaagggcttcgaccctcttttagtggaagaggctctggaaatgcaccagtgttcagaagaaaagatgatggagtttcttcagttaatgagcaaatttaaggagatgggctttgagctgaaagacattaaggaagttttgctattacacaacaatgaccaggacaatgctttggaagacctcatggctcgggcaggagccagctgagaccaggccctgcctaggccctgccgcagaaccaccatccctgggaggccctgcagagcccacctgtggggaaagagaaggggcagcttccggattttcttttgggggttagaaggtcaggtgtggagactgctcgccagtctctgtgagcctaggccctgagctggggaggtggggaagattcgggcatgtgagtgcccccagaactgtcctggctccttccgtattaaacgcatttgcattttgagaagtgtccttcccacttcagccctccggagagactaccctagtctttctggggtgtttatgtcctcagctgaagcctggcctagttgctgagaggggctggggagatggggcgggagggccagactcagtgctgctgtggagctaggtgcttcccccttcccctgagactggtggactgaactccagtcaagttgagttcaagtgaaagattcttccagggttttattttttcccctcctaacaaagtctcatagtgttaacactggttctgcaatatctctgaggtgcaaagaatgcacttttccctatggggcccagagtttgccttttctgccaggcagtcaccatgcttccctaccccagcctgtttcttttggcttggtttggaccacagtcctctgctacccagggttttagagcccctgctctaggaaacagtttaagaaatcattggccccttcccagcacattgaatgggtaagcagacaggccatgatttagttggccagcactaactccacctctgttctccttgaacagcttcccctccagcccactgctttaggatgacacaatgaataacacctagtcatagaaatcagtctctctggtttgttttgtattatgttgtacatcattaaagatctaaatacaaaggatatacagtcttgaatctaaaataatttgctaactaactattttgattcttcagagagaactactaataaaaatctaaaaggta

SEQ ID NO: 33426 - DNA, 2618 bp, Homo sapiens
  source 1..2618: mol_type = unassigned DNA
agacgcccaaatgagtggggcggtgaggggaaggaggagggaagtaggacttcaacatggcggctgcggcactggcggtggctacggtgacggcctggcccggagcgggcagagttggaggtggtggcgttcgctctccctaggggctgtcgggagctcagcggggaccgagcctgggaggccggccggtgccagcacctttcggcttctgagacggcggcagcagcggcattcaggttctaaatggcttctaagaagttgggtgcagattttcatgtatgacttctctttggaaaagaaaaccattgagtgggctgaagagattaagaaaatcgaagaagccgagcgggaagcagagtgcaaaattgcggaagcagaagctaaagtgaattctaagagtggcccagagggcgatagcaaaatgagcttctccaagactcacagtacagccacaatgccacctcctattaaccccatcctcgccagcttgcagcacaacagcatcctcacaccaactcgggtcagcagtagtgccacgaaacagaaagttctcagcccacctcacataaaggcggatttcaatcttgctgactttgagtgtgaagaagacccatttgataatctggagttaaaaactattgatgagaaggaagagctgagaaatattctggtaggaaccactggacccattatggctcagttattggacaataacttgcccaggggaggctctgggtctgtgttacaggatgaggaggtcctggcatccttggaacgggcaaccctagatttcaagcctcttcataaacccaatggctttataaccttaccacagttgggcaactgtgaaaagatgtcactgtcttccaaagtgtccctcccccctatacctgcagtaagcaatatcaaatccctgtctttccccaaacttgactctgatgacagcaatcagaagacagccaagctggcgagcactttccatagcacatcctgcctccgcaatggcacgttccagaattccctaaagccttccacccaaagcagtgccagtgagctcaatgggcatcacactcttgggctttcagctttgaacttggacagtggcacagagatgccagccctgacatcctcccagatgccttccctctctgttttgtctgtgtgcacagaggaatcatcacctccaaatactggtcccacggtcacccctcctaatttctcagtgtcacaagtgcccaacatgcccagctgtccccaggcctattctgaactgcagatgctgtcccccagcgagcggcagtgtgtggagacggtggtcaacatgggctactcgtacgagtgtgtcctcagagccatgaagaagaaaggagagaatattgagcagattctcgactatctctttgcacatggacagctttgtgagaagggcttcgaccctcttttagtggaagaggctctggaaatgcaccagtgttcagaagaaaagatgatggagtttcttcagttaatgagcaaatttaaggagatgggctttgagctgaaagacattaaggaagttttgctattacacaacaatgaccaggacaatgctttggaagacctcatggctcgggcaggagccagctgagaccaggccctgcctaggccctgccgcagaaccaccatccctgggaggccctgcagagcccacctgtggggaaagagaaggggcagcttccggattttcttttgggggttagaaggtcaggtgtggagactgctcgccagtctctgtgagcctaggccctgagctggggaggtggggaagattcgggcatgtgagtgcccccagaactgtcctggctccttccgtattaaacgcatttgcattttgagaagtgtccttcccacttcagccctccggagagactaccctagtctttctggggtgtttatgtcctcagctgaagcctggcctagttgctgagaggggctggggagatggggcgggagggccagactcagtgctgctgtggagctaggtgcttcccccttcccctgagactggtggactgaactccagtcaagttgagttcaagtgaaagattcttccagggttttattttttcccctcctaacaaagtctcatagtgttaacactggttctgcaatatctctgaggtgcaaagaatgcacttttccctatggggcccagagtttgccttttctgccaggcagtcaccatgcttccctaccccagcctgtttcttttggcttggtttggaccacagtcctctgctacccagggttttagagcccctgctctaggaaacagtttaagaaatcattggccccttcccagcacattgaatgggtaagcagacaggccatgatttagttggccagcactaactccacctctgttctccttgaacagcttcccctccagcccactgctttaggatgacacaatgaataacacctagtcatagaaatcagtctctctggtttgttttgtattatgttgtacatcattaaagatctaaatacaaaggatatacagtcttgaatctaaaataatttgctaactaactattttgattcttcagagagaactactaataaaaatctaaaaggta

SEQ ID NO: 33427 - DNA, 2702 bp, Homo sapiens
  source 1..2702: mol_type = unassigned DNA
agacgcccaaatgagtggggcggtgaggggaaggaggagggaagtaggacttcaacatggcggctgcggcactggcggtggctacggtgacggcctggcccggagcgggcagagttggaggtggtggcgttcgctctccctaggggctgtcgggagctcagcggggaccgagcctgggaggccggccggtgccagcacctttcggcttctgagacggcggcagcagcggcattcagggactttcagttaccttgatgatgtcccatttaagacaggagacaaattcaaaacaccagctaaagttggtctacctattggcttctccttgcctgattgtttgcaggttgtcagagaagtacagtatgacttctctttggaaaagaaaaccattgagtgggctgaagagattaagaaaatcgaagaagccgagcgggaagcagagtgcaaaattgcggaagcagaagctaaagtgaattctaagagtggcccagagggcgatagcaaaatgagcttctccaagactcacagtacagccacaatgccacctcctattaaccccatcctcgccagcttgcagcacaacagcatcctcacaccaactcgggtcagcagtagtgccacgaaacagaaagttctcagcccacctcacataaaggcggatttcaatcttgctgactttgagtgtgaagaagacccatttgataatctggagttaaaaactattgatgagaaggaagagctgagaaatattctggtaggaaccactggacccattatggctcagttattggacaataacttgcccaggggaggctctgggtctgtgttacaggatgaggaggtcctggcatccttggaacgggcaaccctagatttcaagcctcttcataaacccaatggctttataaccttaccacagttgggcaactgtgaaaagatgtcactgtcttccaaagtgtccctcccccctatacctgcagtaagcaatatcaaatccctgtctttccccaaacttgactctgatgacagcaatcagaagacagccaagctggcgagcactttccatagcacatcctgcctccgcaatggcacgttccagaattccctaaagccttccacccaaagcagtgccagtgagctcaatgggcatcacactcttgggctttcagctttgaacttggacagtggcacagagatgccagccctgacatcctcccagatgccttccctctctgttttgtctgtgtgcacagaggaatcatcacctccaaatactggtcccacggtcacccctcctaatttctcagtgtcacaagtgcccaacatgcccagctgtccccaggcctattctgaactgcagatgctgtcccccagcgagcggcagtgtgtggagacggtggtcaacatgggctactcgtacgagtgtgtcctcagagccatgaagaagaaaggagagaatattgagcagattctcgactatctctttgcacatggacagctttgtgagaagggcttcgaccctcttttagtggaagaggctctggaaatgcaccagtgttcagaagaaaagatgatggagtttcttcagttaatgagcaaatttaaggagatgggctttgagctgaaagacattaaggaagttttgctattacacaacaatgaccaggacaatgctttggaagacctcatggctcgggcaggagccagctgagaccaggccctgcctaggccctgccgcagaaccaccatccctgggaggccctgcagagcccacctgtggggaaagagaaggggcagcttccggattttcttttgggggttagaaggtcaggtgtggagactgctcgccagtctctgtgagcctaggccctgagctggggaggtggggaagattcgggcatgtgagtgcccccagaactgtcctggctccttccgtattaaacgcatttgcattttgagaagtgtccttcccacttcagccctccggagagactaccctagtctttctggggtgtttatgtcctcagctgaagcctggcctagttgctgagaggggctggggagatggggcgggagggccagactcagtgctgctgtggagctaggtgcttcccccttcccctgagactggtggactgaactccagtcaagttgagttcaagtgaaagattcttccagggttttattttttcccctcctaacaaagtctcatagtgttaacactggttctgcaatatctctgaggtgcaaagaatgcacttttccctatggggcccagagtttgccttttctgccaggcagtcaccatgcttccctaccccagcctgtttcttttggcttggtttggaccacagtcctctgctacccagggttttagagcccctgctctaggaaacagtttaagaaatcattggccccttcccagcacattgaatgggtaagcagacaggccatgatttagttggccagcactaactccacctctgttctccttgaacagcttcccctccagcccactgctttaggatgacacaatgaataacacctagtcatagaaatcagtctctctggtttgttttgtattatgttgtacatcattaaagatctaaatacaaaggatatacagtcttgaatctaaaataatttgctaactaactattttgattcttcagagagaactactaataaaaatctaaaaggta

SEQ ID NO: 33428 - DNA, 1225 bp, Homo sapiens
  source 1..1225: mol_type = unassigned DNA
gtttccagagctttcgaggaaggtttcttcaactcaaattcatccgcctgataattttcttatattttcctaaagaaggaagagaagcgcatagaggagaagggaaataattttttaggagcctttcttacggctatgaggaatttggggctcagttgaaaagcctaaactgcctctcgggaggttgggcgcggcgaactactttcagcggcgcacggagacggcgtctacgtgaggggtgataagtgacgcaacactcgttgcataaatttgcgctccgccagcccggagcatttaggggcggttggctttgttgggtgagcttgtttgtgtccctgtgggtggacgtggttggtgattggcaggatcctggtatccgctaacaggtcaaaatgcagatcttcgtgaaaacccttaccggcaagaccatcacccttgaggtggagcccagtgacaccatcgaaaatgtgaaggccaagatccaggataaggaaggcattccccccgaccagcagaggctcatctttgcaggcaagcagctggaagatggccgtactctttctgactacaacatccagaaggagtcgaccctgcacctggtcctgcgtctgagaggtggtatgcagatcttcgtgaagaccctgaccggcaagaccatcaccctggaagtggagcccagtgacaccatcgaaaatgtgaaggccaagatccaggataaagaaggcatccctcccgaccagcagaggctcatctttgcaggcaagcagctggaagatggccgcactctttctgactacaacatccagaaggagtcgaccctgcacctggtcctgcgtctgagaggtggtatgcagatcttcgtgaagaccctgaccggcaagaccatcactctggaggtggagcccagtgacaccatcgaaaatgtgaaggccaagatccaagataaagaaggcatcccccccgaccagcagaggctcatctttgcaggcaagcagctggaagatggccgcactctttctgactacaacatccagaaagagtcgaccctgcacctggtcctgcgcctgaggggtggctgttaattcttcagtcatggcattcgcagtgcccagtgatggcattactctgcactatagccatttgccccaacttaagtttagaaattacaagtttcagtaatagctgaacctgttcaaaatgttaataaaggtttcgttgcatggta

SEQ ID NO: 33429 - DNA, 1014 bp, Homo sapiens
  source 1..1014: mol_type = unassigned DNA
gggccttgttgacctgaggggggcgagggcggttggcgcgcgcgcgcgttgacggaaactaacggacgcctaaccgatcggcgattctgtcgagtttacttcgcggggaaggcggaaaagaggtagtttgtgtggtttctggaagcctttactttggaatcccagtgtgagaaaggtcaaaatgcagatcttcgtgaaaacccttaccggcaagaccatcacccttgaggtggagcccagtgacaccatcgaaaatgtgaaggccaagatccaggataaggaaggcattccccccgaccagcagaggctcatctttgcaggcaagcagctggaagatggccgtactctttctgactacaacatccagaaggagtcgaccctgcacctggtcctgcgtctgagaggtggtatgcagatcttcgtgaagaccctgaccggcaagaccatcaccctggaagtggagcccagtgacaccatcgaaaatgtgaaggccaagatccaggataaagaaggcatccctcccgaccagcagaggctcatctttgcaggcaagcagctggaagatggccgcactctttctgactacaacatccagaaggagtcgaccctgcacctggtcctgcgtctgagaggtggtatgcagatcttcgtgaagaccctgaccggcaagaccatcactctggaggtggagcccagtgacaccatcgaaaatgtgaaggccaagatccaagataaagaaggcatcccccccgaccagcagaggctcatctttgcaggcaagcagctggaagatggccgcactctttctgactacaacatccagaaagagtcgaccctgcacctggtcctgcgcctgaggggtggctgttaattcttcagtcatggcattcgcagtgcccagtgatggcattactctgcactatagccatttgccccaacttaagtttagaaattacaagtttcagtaatagctgaacctgttcaaaatgttaataaaggtttcgttgcatggta

SEQ ID NO: 33430 - DNA, 1012 bp, Homo sapiens
  source 1..1012: mol_type = unassigned DNA
gtgggggaggggagggcgaggtgacgcggcgctgggcctttccgggacagtgggccttgttgacctgaggggggcgagggcggttggcgcgcgcgcgcgttgacggaaactaacggacgcctaaccgatcggcgattctgtcgagtttacttcgcggggaaggcggaaaagaggtcaaaatgcagatcttcgtgaaaacccttaccggcaagaccatcacccttgaggtggagcccagtgacaccatcgaaaatgtgaaggccaagatccaggataaggaaggcattccccccgaccagcagaggctcatctttgcaggcaagcagctggaagatggccgtactctttctgactacaacatccagaaggagtcgaccctgcacctggtcctgcgtctgagaggtggtatgcagatcttcgtgaagaccctgaccggcaagaccatcaccctggaagtggagcccagtgacaccatcgaaaatgtgaaggccaagatccaggataaagaaggcatccctcccgaccagcagaggctcatctttgcaggcaagcagctggaagatggccgcactctttctgactacaacatccagaaggagtcgaccctgcacctggtcctgcgtctgagaggtggtatgcagatcttcgtgaagaccctgaccggcaagaccatcactctggaggtggagcccagtgacaccatcgaaaatgtgaaggccaagatccaagataaagaaggcatcccccccgaccagcagaggctcatctttgcaggcaagcagctggaagatggccgcactctttctgactacaacatccagaaagagtcgaccctgcacctggtcctgcgcctgaggggtggctgttaattcttcagtcatggcattcgcagtgcccagtgatggcattactctgcactatagccatttgccccaacttaagtttagaaattacaagtttcagtaatagctgaacctgttcaaaatgttaataaaggtttcgttgcatggta

SEQ ID NO: 33431 - DNA, 704 bp, Homo sapiens
  source 1..704: mol_type = unassigned DNA
atttaggggcggttggctttgttgggtgagcttgtttgtgtccctgtgggtggacgtggttggtgattggcaggatcctggtatccgctaacaggtcaaaatgcagatcttcgtgaaaacccttaccggcaagaccatcacccttgaggtggagcccagtgacaccatcgaaaatgtgaaggccaagatccaggataaggaaggcattccccccgaccagcagaggctcatctttgcaggcaagcagctggaagatggccgtactctttctgactacaacatccagaaggagtcgaccctgcacctggtcctgcgtctgagaggtggtatgcagatcttcgtgaagaccctgaccggcaagaccatcactctggaggtggagcccagtgacaccatcgaaaatgtgaaggccaagatccaagataaagaaggcatcccccccgaccagcagaggctcatctttgcaggcaagcagctggaagatggccgcactctttctgactacaacatccagaaagagtcgaccctgcacctggtcctgcgcctgaggggtggctgttaattcttcagtcatggcattcgcagtgcccagtgatggcattactctgcactatagccatttgccccaacttaagtttagaaattacaagtttcagtaatagctgaacctgttcaaaatgttaataaaggtttcgttgcatggt

SEQ ID NO: 33432 - DNA, 2688 bp, Homo sapiens
  source 1..2688: mol_type = unassigned DNA
ggagggaggggagggagaccccgactctgcagaaggcgctcgctgcgtgccccacgtccgccgaacgcggggttcgcgacccgaggggaccgcgggggctgaggggaggggccgcggagccgcggctaaggaacgcgggccgcccacccgctcccggtgcagcggcctccgcgccgggttttggcgcctcccgcgggcgcccccctcctcacggcgagcgctgccacgtcagacgaagggcgcagcgagcgtcctgatccttccgcccggacgctcaggacagcggcccgctgctcataagactcggccttagaaccccagtatcagcagaaggacattttaggacgggacttgggtgactctagggcactggttttctttccagagagcggaacaggcgaggaaaagtagtcccttctcggcgattctgcggagggatctccgtggggcggtgaacgccgatgattatataaggacgcgccgggtgtggcacagctagttccgtcgcagccgggatttgggtcgcagttcttgtttgtggatcgctgtgatcgtcacttgacaatgcagatcttcgtgaagactctgactggtaagaccatcaccctcgaggttgagcccagtgacaccatcgagaatgtcaaggcaaagatccaagataaggaaggcatccctcctgaccagcagaggctgatctttgctggaaaacagctggaagatgggcgcaccctgtctgactacaacatccagaaagagtccaccctgcacctggtgctccgtctcagaggtgggatgcaaatcttcgtgaagacactcactggcaagaccatcacccttgaggtcgagcccagtgacaccatcgagaacgtcaaagcaaagatccaggacaaggaaggcattcctcctgaccagcagaggttgatctttgccggaaagcagctggaagatgggcgcaccctgtctgactacaacatccagaaagagtctaccctgcacctggtgctccgtctcagaggtgggatgcagatcttcgtgaagaccctgactggtaagaccatcaccctcgaggtggagcccagtgacaccatcgagaatgtcaaggcaaagatccaagataaggaaggcattccttctgatcagcagaggttgatctttgccggaaaacagctggaagatggtcgtaccctgtctgactacaacatccagaaagagtccaccttgcacctggtactccgtctcagaggtgggatgcaaatcttcgtgaagacactcactggcaagaccatcacccttgaggtcgagcccagtgacactatcgagaacgtcaaagcaaagatccaagacaaggaaggcattcctcctgaccagcagaggttgatctttgccggaaagcagctggaagatgggcgcaccctgtctgactacaacatccagaaagagtctaccctgcacctggtgctccgtctcagaggtgggatgcagatcttcgtgaagaccctgactggtaagaccatcactctcgaagtggagccgagtgacaccattgagaatgtcaaggcaaagatccaagacaaggaaggcatccctcctgaccagcagaggttgatctttgccggaaaacagctggaagatggtcgtaccctgtctgactacaacatccagaaagagtccaccttgcacctggtgctccgtctcagaggtgggatgcagatcttcgtgaagaccctgactggtaagaccatcactctcgaggtggagccgagtgacaccattgagaatgtcaaggcaaagatccaagacaaggaaggcatccctcctgaccagcagaggttgatctttgctgggaaacagctggaagatggacgcaccctgtctgactacaacatccagaaagagtccaccctgcacctggtgctccgtcttagaggtgggatgcagatcttcgtgaagaccctgactggtaagaccatcactctcgaagtggagccgagtgacaccattgagaatgtcaaggcaaagatccaagacaaggaaggcatccctcctgaccagcagaggttgatctttgctgggaaacagctggaagatggacgcaccctgtctgactacaacatccagaaagagtccaccctgcacctggtgctccgtcttagaggtgggatgcagatcttcgtgaagaccctgactggtaagaccatcactctcgaagtggagccgagtgacaccattgagaatgtcaaggcaaagatccaagacaaggaaggcatccctcctgaccagcagaggttgatctttgctgggaaacagctggaagatggacgcaccctgtctgactacaacatccagaaagagtccaccctgcacctggtgctccgtctcagaggtgggatgcaaatcttcgtgaagaccctgactggtaagaccatcaccctcgaggtggagcccagtgacaccatcgagaatgtcaaggcaaagatccaagataaggaaggcatccctcctgatcagcagaggttgatctttgctgggaaacagctggaagatggacgcaccctgtctgactacaacatccagaaagagtccactctgcacttggtcctgcgcttgagggggggtgtctaagtttccccttttaaggtttcaacaaatttcattgcactttcctttcaataaagttgttgcattccc

SEQ ID NO: 33433 - DNA, 563 bp, Homo sapiens
  source 1..563: mol_type = unassigned DNA
ggcttttctccgtcgcaggacgcagggttcgggcctagggtaggctctcctgaatcgacaggcgccggacctctggtgaggggagggataagtgaggcgtcagtttctctgacaatgcagatcttcgtgaagactctgactggtaagaccatcaccctcgaggttgagcccagtgacaccatcgagaatgtcaaggcaaagatccaagataaggaaggcatccctcctgaccagcagaggctgatctttgctggaaaacagctggaagatgggcgcaccctgtctgactacaacatccagaaagagtccaccctgcacctggtgctccgtctcagaggtgggatgcaaatcttcgtgaagacactcactggcaagaccatcacccttgaggtcgagcccagtgacaccatcgagaacgtcaaagcaaagatccaggacaaggaaggcattcctcctgaccagcagaggttgatctttgccggaaagcagctggaagatgggcgcaccctgtctgactacaacatccagaaagagtctaccctgcacctggtgctccgtctcag

SEQ ID NO: 33434 - DNA, 582 bp, Homo sapiens
  source 1..582: mol_type = unassigned DNA
tattcgggtgagatgggctggggcaccatctggggaccctgacgtgaagtttgtcactgactggagaactcggtttgtcgtctgttgcgggggcggcagttatggcggtgccgttgggcagtgcacccgtacctttgggagcgcgcgccctcgtcgtgtcgtgacgtcacccgttctgttggcttataatgcagggtggggccacctgccgacaatgcagatcttcgtgaagactctgactggtaagaccatcaccctcgaggttgagcccagtgacaccatcgagaatgtcaaggcaaagatccaagataaggaaggcatccctcctgaccagcagaggctgatctttgctggaaaacagctggaagatgggcgcaccctgtctgactacaacatccagaaagagtccaccctgcacctggtgctccgtctcagaggtgggatgcaaatcttcgtgaagacactcactggcaagaccatcacccttgaggtcgagcccagtgacaccatcgagaacgtcaaagcaaagatccaggacaaggaaggcattcctcctgaccagcagaggttgatctttgccgg

SEQ ID NO: 33435 - DNA, 3745 bp, Homo sapiens
  source 1..3745: mol_type = unassigned DNA
gttccccagctttagggccacgcccgccctgagatctgccgagtcattgtccttgtcccgcggccccgggagccccccgcgaccggcctgggaggctcagggaggttgaagggggctgagcaaaggaagccccgtcattacctcaaatgtgacccaaaaataaagacccgtccatctcgcagggtgggccagggcgggtcaggagggaggggagggagaccccgactctgcagaaggcgctcgctgcgtgccccacgtccgccgaacgcggggttcgcgacccgaggggaccgcgggggctgaggggaggggccgcggagccgcggctaaggaacgcgggccgcccacccgctcccggtgcagcggcctccgcgccgggttttggcgcctcccgcgggcgcccccctcctcacggcgagcgctgccacgtcagacgaagggcgcagcgagcgtcctgatccttccgcccggacgctcaggacagcggcccgctgctcataagactcggccttagaaccccagtatcagcagaaggacattttaggacgggacttgggtgactctagggcactggttttctttccagagagcggaacaggcgaggaaaagtagtcccttctcggcgattctgcggagggatctccgtggggcggtgaacgccgatgattatataaggacgcgccgggtgtggcacagctagttccgtcgcagccgggatttgggtcgcagttcttgtttgtggatcgctgtgatcgtcacttggtgagtagcgggctgctgggctggccggggctttcgtggccgccgggccgctcggtgggacggaggcgtgtggagagaccgccaagggctgtagtctgggtccgcgagcaaggttgccctgaactgggggttggggggagcgcagcaaaatggcggctgttcccgagtcttgaatggaagacgcttgtgaggcgggctgtgaggtcgttgaaacaaggtggggggcatggtgggcggcaagaacccaaggtcttgaggccttcgctaatgcgggaaagctcttattcgggtgagatgggctggggcaccatctggggaccctgacgtgaagtttgtcactgactggagaactcggtttgtcgtctgttgcgggggcggcagttatggcggtgccgttgggcagtgcacccgtacctttgggagcgcgcgccctcgtcgtgtcgtgacgtcacccgttctgttggcttataatgcagggtggggccacctgccggtaggtgtgcggtaggcttttctccgtcgcaggacgcagggttcgggcctagggtaggctctcctgaatcgacaggcgccggacctctggtgaggggagggataagtgaggcgtcagtttctctggtcggttttatgtacctatcttcttaagtagctgaagctccggttttgaactatgcgctcggggttggcgagtgtgttttgtgaagttttttaggcaccttttgaaatgtaatcatttgggtcaatatgtaattttcagtgttagactagtaaattgtccgctaaattctggccgtttttggcttttttgttagacaatgcagatcttcgtgaagactctgactggtaagaccatcaccctcgaggttgagcccagtgacaccatcgagaatgtcaaggcaaagatccaagataaggaaggcatccctcctgaccagcagaggctgatctttgctggaaaacagctggaagatgggcgcaccctgtctgactacaacatccagaaagagtccaccctgcacctggtgctccgtctcagaggtgggatgcaaatcttcgtgaagacactcactggcaagaccatcacccttgaggtcgagcccagtgacaccatcgagaacgtcaaagcaaagatccaggacaaggaaggcattcctcctgaccagcagaggttgatctttgccggaaagcagctggaagatgggcgcaccctgtctgactacaacatccagaaagagtctaccctgcacctggtgctccgtctcagaggtgggatgcagatcttcgtgaagaccctgactggtaagaccatcaccctcgaggtggagcccagtgacaccatcgagaatgtcaaggcaaagatccaagataaggaaggcattccttctgatcagcagaggttgatctttgccggaaaacagctggaagatggtcgtaccctgtctgactacaacatccagaaagagtccaccttgcacctggtactccgtctcagaggtgggatgcaaatcttcgtgaagacactcactggcaagaccatcacccttgaggtcgagcccagtgacactatcgagaacgtcaaagcaaagatccaagacaaggaaggcattcctcctgaccagcagaggttgatctttgccggaaagcagctggaagatgggcgcaccctgtctgactacaacatccagaaagagtctaccctgcacctggtgctccgtctcagaggtgggatgcagatcttcgtgaagaccctgactggtaagaccatcactctcgaagtggagccgagtgacaccattgagaatgtcaaggcaaagatccaagacaaggaaggcatccctcctgaccagcagaggttgatctttgccggaaaacagctggaagatggtcgtaccctgtctgactacaacatccagaaagagtccaccttgcacctggtgctccgtctcagaggtgggatgcagatcttcgtgaagaccctgactggtaagaccatcactctcgaggtggagccgagtgacaccattgagaatgtcaaggcaaagatccaagacaaggaaggcatccctcctgaccagcagaggttgatctttgctgggaaacagctggaagatggacgcaccctgtctgactacaacatccagaaagagtccaccctgcacctggtgctccgtcttagaggtgggatgcagatcttcgtgaagaccctgactggtaagaccatcactctcgaagtggagccgagtgacaccattgagaatgtcaaggcaaagatccaagacaaggaaggcatccctcctgaccagcagaggttgatctttgctgggaaacagctggaagatggacgcaccctgtctgactacaacatccagaaagagtccaccctgcacctggtgctccgtcttagaggtgggatgcagatcttcgtgaagaccctgactggtaagaccatcactctcgaagtggagccgagtgacaccattgagaatgtcaaggcaaagatccaagacaaggaaggcatccctcctgaccagcagaggttgatctttgctgggaaacagctggaagatggacgcaccctgtctgactacaacatccagaaagagtccaccctgcacctggtgctccgtctcagaggtgggatgcaaatcttcgtgaagaccctgactggtaagaccatcaccctcgaggtggagcccagtgacaccatcgagaatgtcaaggcaaagatccaagataaggaaggcatccctcctgatcagcagaggttgatctttgctgggaaacagctggaagatggacgcaccctgtctgactacaacatccagaaagagtccactctgcacttggtcctgcgcttgagggggggtgtctaagtttccccttttaaggtttcaacaaatttcattgcactttcctttcaataaagttgttgcattcccaattggtgttttttttttttttttttttaagtttattttgcatt

SEQ ID NO: 33436 - DNA, 622 bp, Homo sapiens
  source 1..622: mol_type = unassigned DNA
acgtcacccgttctgttggcttataatgcagggtggggccacctgccggtaggtgtgcggtaggcttttctccgtcgcaggacgcagggttcgggcctagggtaggctctcctgaatcgacaggcgccggacctctgacaatgcagatcttcgtgaagactctgactggtaagaccatcaccctcgaggttgagcccagtgacaccatcgagaatgtcaaggcaaagatccaagataaggaaggcatccctcctgaccagcagaggctgatctttgctggaaaacagctggaagatgggcgcaccctgtctgactacaacatccagaaagagtccaccctgcacctggtgctccgtctcagaggtgggatgcaaatcttcgtgaagacactcactggcaagaccatcacccttgaggtcgagcccagtgacaccatcgagaacgtcaaagcaaagatccaggacaaggaaggcattcctcctgaccagcagaggttgatctttgccggaaagcagctggaagatgggcgcaccctgtctgactacaacatccagaaagagtctaccctgcacctggtgctccgtctcagaggtgggatgcagatcttcgtgaagaccctgac

SEQ ID NO: 33437 - DNA, 627 bp, Homo sapiens
  source 1..627: mol_type = unassigned DNA
acttggtgagtagcgggctgctgggctggccggggctttcgtggccgccgggccgctcggtgggacggaggcgtgtggagagaccgccaagggctgtagtctgggtccgcgagcaaggttgccctgaactgggggttggggggagcgcagcaaaatggcggctgttcccgagtcttgaatggaagacgcttgtgaggcgggctgtgaggtcgttgaaacaagacaatgcagatcttcgtgaagactctgactggtaagaccatcaccctcgaggttgagcccagtgacaccatcgagaatgtcaaggcaaagatccaagataaggaaggcatccctcctgaccagcagaggctgatctttgctggaaaacagctggaagatgggcgcaccctgtctgactacaacatccagaaagagtccaccctgcacctggtgctccgtctcagaggtgggatgcaaatcttcgtgaagacactcactggcaagaccatcacccttgaggtcgagcccagtgacaccatcgagaacgtcaaagcaaagatccaggacaaggaaggcattcctcctgaccagcagaggttgatctttgccggaaagcagctggaagatgggcgcaccctgtctgac

SEQ ID NO: 33438 - DNA, 582 bp, Homo sapiens
  source 1..582: mol_type = unassigned DNA
ttctccgtcgcaggacgcagggttcgggcctagggtaggctctcctgaatcgacaggcgccggacctctgacaatgcagatcttcgtgaagactctgactggtaagaccatcaccctcgaggttgagcccagtgacaccatcgagaatgtcaaggcaaagatccaagataaggaaggcatccctcctgaccagcagaggctgatctttgctggaaaacagctggaagatgggcgcaccctgtctgactacaacatccagaaagagtccaccctgcacctggtgctccgtctcagaggtgggatgcaaatcttcgtgaagacactcactggcaagaccatcacccttgaggtggagcccagtgacaccatcgagaatgtcaaggcaaagatccaagataaggaaggcattccttctgatcagcagaggttgatctttgccggaaaacagctggaagatggtcgtaccctgtctgactacaacatccagaaagagtccaccttgcacctggtactccgtctcagaggtgggatgcaaatcttcgtgaagacactcactggcaagaccatcacccttgaggtcga

SEQ ID NO: 33439 - DNA, 548 bp, Homo sapiens
  source 1..548: mol_type = unassigned DNA
ataatgcagggtggggccacctgccggtaggtgtgcggtaggcttttctccgtcgcaggacgcagggttcgggcctaggacaatgcagatcttcgtgaagactctgactggtaagaccatcaccctcgaggttgagcccagtgacaccatcgagaatgtcaaggcaaagatccaagataaggaaggcatccctcctgaccagcagaggctgatctttgctggaaaacagctggaagatgggcgcaccctgtctgactacaacatccagaaagagtccaccctgcacctggtgctccgtctcagaggtgggatgcaaatcttcgtgaagacactcactggcaagaccatcacccttgaggtcgagcccagtgacaccatcgagaacgtcaaagcaaagatccaggacaaggaaggcattcctcctgaccagcagaggttgatctttgccggaaagcagctggaagatgggcgcaccctgtctgactacaacatccagaaagagtctaccctgcacctggtgctccgtctcagaggtgggatgcagatct

SEQ ID NO: 33440 - DNA, 517 bp, Homo sapiens
  source 1..517: mol_type = unassigned DNA
gttgctgggcctctgtcccttctccattggtgccagctctgaagcaatcttttctggggcgcctgcaaaggacggatctgtgggtggaacgaactgaaaacggatccagtgactcatcccgattcttgcacattctagcacatcgcattctagagagcggaacaggcgaggaaaagtagtcccttctcggcgattctgcggagggatctccgtggggcggtgaacgccgatgattatataaggacgcgccgggtgtggcacagctagttccgtcgcagccgggatttgggtcgcagttcttgtttgtggatcgctgtgatcgtcacttgacaatgcagatcttcgtgaagactctgactggtaagaccatcaccctcgaggttgagcccagtgacaccatcgagaatgtcaaggcaaagatccaagataaggaaggcatccctcctgaccagcagaggctgatctttgctggaaaacagctggaagatgggcgcaccctgtctgactacaacatcca

SEQ ID NO: 33441 - DNA, 1963 bp, Homo sapiens
  source 1..1963: mol_type = unassigned DNA
agttccgtcgcagccgggatttgggtcgcagttcttgtttgtggatcgctgtgatcgtcacttgacaatgcagatcttcgtgaagactctgactggtaagaccatcaccctcgaggttgagcccagtgacaccatcgagaatgtcaaggcaaagatccaagataaggaaggcatccctcctgaccagcagaggctgatctttgctggaaaacagctggaagatgggcgcaccctgtctgactacaacatccagaaagagtccaccctgcacctggtgctccgtctcagaggtgggatgcaaatcttcgtgaagacactcactggcaagaccatcacccttgaggtcgagcccagtgacaccatcgagaacgtcaaagcaaagatccaagataaggaaggcattccttctgatcagcagaggttgatctttgccggaaaacagctggaagatggtcgtaccctgtctgactacaacatccagaaagagtccaccttgcacctggtactccgtctcagaggtgggatgcaaatcttcgtgaagacactcactggcaagaccatcacccttgaggtcgagcccagtgacactatcgagaacgtcaaagcaaagatccaagacaaggaaggcattcctcctgaccagcagaggttgatctttgccggaaagcagctggaagatgggcgcaccctgtctgactacaacatccagaaagagtctaccctgcacctggtgctccgtctcagaggtgggatgcagatcttcgtgaagaccctgactggtaagaccatcactctcgaagtggagccgagtgacaccattgagaatgtcaaggcaaagatccaagacaaggaaggcatccctcctgaccagcagaggttgatctttgccggaaaacagctggaagatggtcgtaccctgtctgactacaacatccagaaagagtccaccttgcacctggtgctccgtctcagaggtgggatgcagatcttcgtgaagaccctgactggtaagaccatcactctcgaggtggagccgagtgacaccattgagaatgtcaaggcaaagatccaagacaaggaaggcatccctcctgaccagcagaggttgatctttgctgggaaacagctggaagatggacgcaccctgtctgactacaacatccagaaagagtccaccctgcacctggtgctccgtcttagaggtgggatgcagatcttcgtgaagaccctgactggtaagaccatcactctcgaagtggagccgagtgacaccattgagaatgtcaaggcaaagatccaagacaaggaaggcatccctcctgaccagcagaggttgatctttgctgggaaacagctggaagatggacgcaccctgtctgactacaacatccagaaagagtccaccctgcacctggtgctccgtcttagaggtgggatgcagatcttcgtgaagaccctgactggtaagaccatcactctcgaagtggagccgagtgacaccattgagaatgtcaaggcaaagatccaagacaaggaaggcatccctcctgaccagcagaggttgatctttgctgggaaacagctggaagatggacgcaccctgtctgactacaacatccagaaagagtccaccctgcacctggtgctccgtctcagaggtgggatgcaaatcttcgtgaagaccctgactggtaagaccatcaccctcgaggtggagcccagtgacaccatcgagaatgtcaaggcaaagatccaagataaggaaggcatccctcctgatcagcagaggttgatctttgctgggaaacagctggaagatggacgcaccctgtctgactacaacatccagaaagagtccactctgcacttggtcctgcgcttgagggggggtgtctaagtttccccttttaaggtttcaacaaatttcattgcactttcctttcaataaagttgttgcattccc

SEQ ID NO: 33442 - DNA, 559 bp, Homo sapiens
  source 1..559: mol_type = unassigned DNA
agcaaaatggcggctgttcccgagtcttgaatggaagacgcttgtgaggcgggctgtgaggtcgttgaaacaaggtggggggcatggtgggcggcaagaacccaaggtcttgaggccttcgctaatgcgggaaagctcttattcggacaatgcagatcttcgtgaagactctgactggtaagaccatcaccctcgaggttgagcccagtgacaccatcgagaatgtcaaggcaaagatccaagataaggaaggcatccctcctgaccagcagaggctgatctttgctggaaaacagctggaagatgggcgcaccctgtctgactacaacatccagaaagagtccaccctgcacctggtgctccgtctcagaggtgggatgcaaatcttcgtgaagacactcactggcaagaccatcacccttgaggtcgagcccagtgacaccatcgagaacgtcaaagcaaagatccaggacaaggaaggcattcctcctgaccagcagaggttgatctttgccggaaagcagctggaagatgggcgcaccctgtctgactacaacat

SEQ ID NO: 33443 - DNA, 1172 bp, Homo sapiens
  source 1..1172: mol_type = unassigned DNA
tttccccctcgcttggttctgcccctgctccccctgcacaggcctcacagtgcgtctggccggcgctttatagctgcagcctgggcggctccgctagctgtttttcgtcttccctaggctatttctgccgggcgctccgcgaagatgcagctcaagccgatggagatcaaccccgagatgctgaacaaagtgctgtcccggctgggggtcgccggccagtggcgcttcgtggacgtgctggggctggaagaggagtctctgggctcggtgccagcgcctgcctgcgcgctgctgctgctgtttcccctcacggcccagcatgagaacttcaggaaaaagcagattgaagagctgaagggacaagaagttagtcctaaagtgtacttcatgaagcagaccattgggaattcctgtggcacaatcggacttattcacgcagtggccaataatcaagacaaactgggatttgaggatggatcagttctgaaacagtttctttctgaaacagagaaaatgtcccctgaagacagagcaaaatgctttgaaaagaatgaggccatacaggcagcccatgatgccgtggcacaggaaggccaatgtcgggtagatgacaaggtgaatttccattttattctgtttaacaacgtggatggccacctctatgaacttgatggacgaatgccttttccggtgaaccatggcgccagttcagaggacaccctgctgaaggacgctgccaaggtctgcagagaattcaccgagcgtgagcaaggagaagtccgcttctctgccgtggctctctgcaaggcagcctaatgctctgtgggagggactttgctgatttcccctcttcccttcaacatgaaaatatatacccccccatgcagtctaaaatgcttcagtacttgtgaaacacagctgttcttctgttctgcagacacgccttcccctcagccacacccaggcacttaagcacaagcagagtgcacagctgtccactgggccattgtggtgtgagcttcagatggtgaagcattctccccagtgtatgtcttgtatccgatatctaacgctttaaatggctactttggtttctgtctgtaagttaagaccttggatgtggtttaattgtttgtcctcaaaaggaataaaacttttctgctgataagata

SEQ ID NO: 33444 - DNA, 917 bp, Homo sapiens
  source 1..917: mol_type = unassigned DNA
ggcccggccgtaccactccgcgctgcgcacggggggctatttctgccgggcgctccgcgaagatgcagctcaagccgatggagatcaaccccgagatgctgaacaaagtgctgtcccggctgggggtcgccggccagtggcgcttcgtggacgtgctggggctggaagaggagtctctgggctcggtgccagcgcctgcctgcgcgctgctgctgctgtttcccctcacggcccagcatgagaacttcaggaaaaagcagattgaagagctgaagggacaagaagttagtcctaaagtgtacttcatgaagcagaccattgggaattcctgtggcacaatcggacttattcacgcagtggccaataatcaagacaaactgggatttgaggatggatcagttctgaaacagtttctttctgaaacagagaaaatgtcccctgaagacagagcaaaatgctttgaaaagaatgaggccatacaggcagcccatgatgccgtggcacaggaaggccaatgtcgggtagatgacaaggtgaatttccattttattctgtttaacaacgtggatggccacctctatgaacttgatggacgaatgccttttccggtgaaccatggcgccagttcagaggacaccctgctgaaggacgctgccaaggtctgcagagaattcaccgagcgtgagcaaggagaagtccgcttctctgccgtggctctctgcaaggcagcctaatgctctgtgggagggactttgctgatttcccctcttcccttcaacatgaaaatatatacccccccatgcagtctaaaatgcttcagtacttgtgaaacacagctgttcttctgttctgcagacacgccttcccctcagccacacccaggcacttaagcacaagcagagtgcacagctgtccac

SEQ ID NO: 33445 - DNA, 445 bp, Homo sapiens
  source 1..445: mol_type = unassigned DNA
gttttattctaggtagtcacttaaaaacgaacctcggtactggtctgacttaacatggaggaggaattgtctaagagactcgagctttagagtaattgggatggtgaaaggatgggtttccagaaacttcgcccaaaattaaagactccatcaaaaggactgctccatacactcaaggaacacccaccaacaaatcccgtctccacaaccaccagattatctcaccggcgagtgagactgcaaggctatttctgccgggcgctccgcgaagatgcagctcaagccgatggagatcaaccccgagatgctgaacaaagtgctgtcccggctgggggtcgccggccagtggcgcttcgtggacgtgctggggctggaagaggagtctctgggctcggtgccagcgcctgcctgcgcgctgctgctgctgtttcccctcacggcccag

SEQ ID NO: 33446 - DNA, 1033 bp, Homo sapiens
  source 1..1033: mol_type = unassigned DNA
gtcagagctggagggccgggcaccgcggccatggagggtcaacgctggctgccgctggaggccaatcccgaggtcaccaaccagtttcttaaacaattaggtctacatcctaactggcaattcgttgatgtatatggaatggatcctgaactccttagcatggtaccaagaccagtctgtgcagtcttacttctctttcctattacagaaaagtatgaagtattcagaacagaagaggaagaaaaaataaaatctcagggacaagatgttacatcatcagtatatttcatgaagcaaacaatcagcaatgcctgtggaacaattggactgattcatgctattgcaaacaataaagacaagatgcactttgaatctggatcaaccttgaaaaaattcctggaggaatctgtgtcaatgagccctgaagaacgagccagatacctggagaactatgatgccatccgagttactcatgagaccagtgcccatgaaggtcagactgagtcctcctcgccatcctcatcacagcctcattctagccactgcagaacgaaggcctcatcattgtgtcaccatgcatccctgccctgggtcaaacgtaaccatgtaggccctgcaaaggctaccagtccatctctccgtcttcgtcgctggcgacccttcttacgtctaccatctttgggtctccattctgttgcaccaagtatagatgagaaagtagatcttcattttattgcattagttcatgtagatgggcatctctatgaattagatgggcggaagccatttccaattaaccatggtgaaactagtgatgaaactttattagaggatgccatagaagtttgcaagaagtttatggagcgcgaccctgatgaactaagatttaatgcgattgctctttctgcagcatagcttgtcaataatggaaacaccaaaaactgtattatttgcaactaaattttctctgccatacactaactcaaaaattttgatattttcattaacttgatgattaaactttatgtgagtt

SEQ ID NO: 33447 - DNA, 844 bp, Homo sapiens
  source 1..844: mol_type = unassigned DNA
gtcagagctggagggccgggcaccgcggccatggagggtcaacgctggctgccgctggaggccaatcccgaggtcaccaaccagtttcttaaacaattaggtctacatcctaactggcaattcgttgatgtatatggaatggatcctgaactccttagcatggtaccaagaccagtctgtgcagtcttacttctctttcctattacagaaaagtatgaagtattcagaacagaagaggaagaaaaaataaaatctcagggacaagatgttacatcatcagtatatttcatgaagcaaacaatcagcaatgcctgtggaacaattggactgattcatgctattgcaaacaataaagacaagatgcactttgaatctggatcaaccttgaaaaaattcctggaggaatctgtgtcaatgagccctgaagaacgagccagatacctggagaactatgatgccatccgagttactcatgagaccagtgcccatgaaggtcagactgaggcaccaagtatagatgagaaagtagatcttcattttattgcattagttcatgtagatgggcatctctatgaattagatgggcggaagccatttccaattaaccatggtgaaactagtgatgaaactttattagaggatgccatagaagtttgcaagaagtttatggagcgcgaccctgatgaactaagatttaatgcgattgctctttctgcagcatagcttgtcaataatggaaacaccaaaaactgtattatttgcaactaaattttctctgccatacactaactcaaaaattttgatattttcattaacttgatgattaaactttatgtgagttaaa

SEQ ID NO: 33448 - DNA, 824 bp, Homo sapiens
  source 1..824: mol_type = unassigned DNA
acagaagaggaagaaaaaataaaatctcagggacaagatgttacatcatcagtatatttcatgaagcaaacaatcagcaatgcctgtggaacaattggactgattcatgctattgcaaacaataaagacaagatgcactttgaatctggatcaaccttgaaaaaattcctggaggaatctgtgtcaatgagccctgaagaacgagccagatacctggagaactatgatgccatccgagttactcatgagaccagtgcccatgaaggtcagactgagtcctcctcgccatcctcatcacagcctcattctagccactgcagaacgaaggcctcatcattgtgtcaccatgcatccctgccctgggtcaaacgtaaccatgtaggccctgcaaaggctaccagtccatctctccgtcttcgtcgctggcgacccttcttacgtctaccatctttgggtctccattctgttgcaccaagtatagatgagaaagtagatcttcattttattgcattagttcatgtagatgggcatctctatgaattagatgggcggaagccatttccaattaaccatggtgaaactagtgatgaaactttattagaggatgccatagaagtttgcaagaagtttatggagcgcgaccctgatgaactaagatttaatgcgattgctctttctgcagcatagcttgtcaataatggaaacaccaaaaactgtattatttgcaactaaattttctctgccatacactaactcaaaaattttgatattttcattaacttgatgattaaactttatgtgagttaaactttgccttaacctgt

SEQ ID NO: 33449 - DNA, 1534 bp, Homo sapiens
  source 1..1534: mol_type = unassigned DNA
cgagctcggcggcgggtttgctgagatctgtggccggcggcagctggtgcggggggcagctgagagcgagaggtggatcggggcggtgtgtggccagggccatgacgggcaatgccggggagtggtgcctcatggaaagcgaccccggggtcttcaccgagctcattaaaggattcggttgccgaggagcccaagtagaagaaatatggagtttagagcctgagaattttgaaaaattaaagccagttcatgggttaatttttcttttcaagtggcagccaggagaagaaccagcaggctctgtggttcaggactcccgacttgacacgatattttttgctaagcaggtaattaataatgcttgtgctactcaagccatagtgagtgtgttactgaactgtacccaccaggatgtccatttaggcgagacattatcagagtttaaagaattttcacaaagttttgatgcagctatgaaaggcttggcactgagcaattcagatgtgattcgacaagtacacaacagtttcgccagacagcaaatgtttgaatttgatacgaagacatcagcaaaagaagaagatgcttttcactttgtcagttatgttcctgttaatgggagactgtatgaattagatggattaagagaaggaccgattgatttaggtgcatgcaatcaagatgattggatcagtgcagtaaggcctgtcatagaaaaaaggatacaaaagtacagtgaaggtgaaattcgatttaatttaatggccattgtgtctgacagaaaaatgatatatgagcagaagatagcagagttacaaagacaacttgcagaggaacccatggatacagatcaaggtaatagtatgttaagtgctattcagtcagaagttgccaaaaatcagatgcttattgaagaagaagtacagaaattaaaaagatacaagattgagaatatcagaaggaagcataattatctgcctttcattatggaattgttaaagactttagcagaacaccagcagttaataccactagtagaaaagtttgagaaacactttgagaagacactactaggcaaataaaattttggaccattaacttaaagacgagaatacatgggaaaataggataaaagaacaaggtgtgagaaggaatagaaggaaacaaacaggaaagatatggctgcaccatgcagtgctactatatgctgagattctacaggatgagatttttgaatagctgaggcagttgcctataatctgtgatgacataaaagtatttgacctaaaatctttttatttgcaaaataataaataaaaagtgattctccctcggcatggctataatgaacttggttagaacctataaatgtttttgttatgtgagactttttaaccgatgaattcgttgaatacacaccacatttaaaaactgcctaggaggtaatccaaaaatatatagttataaaacttcttgtattatgtaccaaatctctttcttaaaatataaaataaaattatctagtttaagatta

SEQ ID NO: 33450 - DNA, 1507 bp, Homo sapiens
  source 1..1507: mol_type = unassigned DNA
acggcgcccggaggctgtcgggaagtaggcggggtgacgtgtggttgacgagctcggcggcgggtttgctgagatctgtggccggcggcagctggtgcggggggcagctgagagcgagaggtggatcggggcggtgtgtggccagggccatgacgggcaatgccggggagtggtgcctcatggaaagcgaccccggggtcttcaccgagctcattaaaggattcggttgccgaggagcccaagtagaagaaatatggagtttagagcctgagaattttgaaaaattaaagccagttcatgggttaatttttcttttcaagtggcagccaggagaagaaccagcaggctctgtggttcaggactcccgacttgacacgatattttttgctaagcaggtaattaataatgcttgtgctactcaagccatagtgagtgtgttactgaactgtacccaccaggatgtccatttaggcgagacattatcagagtttaaagaattttcacaaagttttgatgcagctatgaaaggcttggcactgagcaattcagatgtgattcgacaagtacacaacagtttcgccagacagcaaatgtttgaatttgatacgaagacatcagcaaaagaagaagatgcttttcactttgtcagttatgttcctgttaatgggagactgtatgaattagatggattaagagaaggaccgattgatttaggtgcatgcaatcaagatgattggatcagtgcagtaaggcctgtcatagaaaaaaggatacaaaagtacagtgaaggtgaaattcgatttaatttaatggccattgtgtctgacagaaaaatgatatatgagcagaagatagcagagttacaaagacaacttgcagaggaacccatggatacagatcaaggtaatagtatgttaagtgctattcagtcagaagttgccaaaaatcagatgcttattgaagaagaagtacagaaattaaaaagatacaagattgagaatatcagaaggaagcataattatctgcctttcattatggaattgttaaagactttagcagaacaccagcagttaataccactagtagaaaagggaaaataggataaaagaacaaggtgtgagaaggaatagaaggaaacaaacaggaaagatatggctgcaccatgcagtgctactatatgctgagattctacaggatgagatttttgaatagctgaggcagttgcctataatctgtgatgacataaaagtatttgacctaaaatctttttatttgcaaaataataaataaaaagtgattctccctcggcatggctataatgaacttggttagaacctataaatgtttttgttatgtgagactttttaaccgatgaattcgttgaatacacaccacatttaaaaactgcctaggaggtaatccaaaaatatatagttataaaacttcttgtattatgtaccaaatctctttcttaaaatataaaataaaattatctagtttaagatta

SEQ ID NO: 33451 - DNA, 1355 bp, Homo sapiens
  source 1..1355: mol_type = unassigned DNA
gcgagaggtggatcggggcggtgtgtggccagggccatgacgggcaatgccggggagtggtgcctcatggaaagcgaccccggggtcttcaccgagctcattaaaggattcggttgccgaggagcccaagtagaagaaatatggagtttagagcctgagaattttgaaaaattaaagccagttcatgggttaatttttcttttcaagtggcagccaggagaagaaccagcaggctctgtggttcaggactcccgacttgacacgatattttttgctaagcaggtaattaataatgcttgtgctactcaagccatagtgagtgtgttactgaactgtacccaccaggatgtccatttaggcgagacattatcagagtttaaagaattttcacaaagttttgatgcagctatgaaaggcttggcactgagcaattcagatgtgattcgacaagtacacaacagtttcgccagacagcaaatgtttgaatttgatacgaagacatcagcaaaagaagaagatgcttttcactttgtcagttatgttcctgttaatgggagactgtatgaattagatggattaagagaaggaccgattgatttaggtgcatgcaatcaagatgattggatcagtgcagtaaggcctgtcatagaaaaaaggatacaaaaagacgggttttcaccatgttgcccaggctggtctcagactcctgagctcaagccatccgcctgcctcgacctcccaaagtggtacagtgaaggtgaaattcgatttaatttaatggccattgtgtctgacagaaaaatgatatatgagcagaagatagcagagttacaaagacaacttgcagaggaggaacccatggatacagatcaaggtaatagtatgttaagtgctattcagtcagaagttgccaaaaatcagatgcttattgaagaagaagtacagaaattaaaaagatacaagattgagaatatcagaaggaagcataattatctgcctttcattatggaattgttaaagactttagcagaacaccagcagttaataccactagtagaaaaggcaaaagaaaaacagaacgcaaagaaagctcaggaaaccaaatgaagatgttttcagatatgtacacatttctgcttctgcacatattttcatggaaaccattatgtataaagaacttagagcaacatcctaattggctcagtgcacgtttggcaatagtgccagcctgtcttgtctttaatgcatggattcataaacttcttccctacctgcatcatgtgcatgtagtgcatattaaatgaaagtgatattaagaatgctttcccaaattccattatttgacattgagtctg

SEQ ID NO: 33452 - DNA, 1346 bp, Homo sapiens
  source 1..1346: mol_type = unassigned DNA
cgggtttgctgagatctgtggccggcggcagctggtgcggggggcagctgagagcgagaggtggatcggggcggtgtgtggccagggccatgacgggcaatgccggggagtggtgcctcatggaaagcgaccccggggtcttcaccgagctcattaaaggattcggttgccgaggagcccaagtagaagaaatatggagtttagagcctgagaattttgaaaaattaaagccagttcatgggttaatttttcttttcaagtggcagccaggagaagaaccagcaggctctgtggttcaggactcccgacttgacacgatattttttgctaagcaggtaattaataatgcttgtgctactcaagccatagtgagtgtgttactgaactgtacccaccaggatgtccatttaggcgagacattatcagagtttaaagaattttcacaaagttttgatgcagctatgaaaggcttggcactgagcaattcagatgtgattcgacaagtacacaacagtttcgccagacagcaaatgtttgaatttgatacgaagacatcagcaaaagaagaagatgcttttcactttgtcagttatgttcctgttaatgggagactgtatgaattagatggattaagagaaggaccgattgatttaggtgcatgcaatcaagatgattggatcagtgcagtaaggcctgtcatagaaaaaaggatacaaaaagacgggttttcaccatgttgcccaggctggtctcagactcctgagctcaagccatccgcctgcctcgacctcccaaagtggtacagtgaaggtgaaattcgatttaatttaatggccattgtgtctgacagaaaaatgatatatgagcagaagatagcagagttacaaagacaacttgcagaggaacccatggatacagatcaaggtaatagtatgttaagtgctattcagtcagaagttgccaaaaatcagatgcttattgaagaagaagtacagaaattaaaaagatacaagattgagaatatcagaaggaagcataattatctgcctttcattatggaattgttaaagactttagcagaacaccagcagttaataccactagtagaaaaggcaaaagaaaaacagaacgcaaagaaagctcaggaaaccaaatgaagatgttttcagatatgtacacatttctgcttctgcacatattttcatggaaaccattatgtataaagaacttagagcaacatcctaattggctcagtgcacgtttggcaatagtgccagcctgtcttgtctttaatgcatggattcataaacttcttccctacctgcatcatgtgcatgtagtgcata

SEQ ID NO: 33453 - DNA, 1911 bp, Homo sapiens
  source 1..1911: mol_type = unassigned DNA
aaggaggagaaagaggaggagtaaagcaggccctctcgacgtcggcctgtggggagcgatgccgacaagcaggagcggtcccggcttcggaaagggcccaccctgaggaatggtccggccgggcctagcgaggatgtccctaccgcgatgctggttccgttacccagggtggacaggcgcggaagcgggacggggaagagcgatagtttcgcggcgtttgcccagcctcaacccctgggatgcgggtgagagacatggaggactggtcagaatttgcgcgtccctggggccgcacaaaaggctcccagccggcctcccgcaatgtcctcacctgtacctggcagccgaccccctggatccgcagcgccgccaggagaagtcctgcgcagcgctgggaaacgacaaaagaaggcagcctgacgggcagcgacagccacagcaacagcaacagccccactgccgccggggattccaggttgccgaggagcccaagtagaagaaatatggagtttagagcctgagaattttgaaaaattaaagccagttcatgggttaatttttcttttcaagtggcagccaggagaagaaccagcaggctctgtggttcaggactcccgacttgacacgatattttttgctaagcaggtaattaataatgcttgtgctactcaagccatagtgagtgtgttactgaactgtacccaccaggatgtccatttaggcgagacattatcagagtttaaagaattttcacaaagttttgatgcagctatgaaaggcttggcactgagcaattcagatgtgattcgacaagtacacaacagtttcgccagacagcaaatgtttgaatttgatacgaagacatcagcaaaagaagaagatgcttttcactttgtcagttatgttcctgttaatgggagactgtatgaattagatggattaagagaaggaccgattgatttaggtgcatgcaatcaagatgattggatcagtgcagtaaggcctgtcatagaaaaaaggatacaaaagtacagtgaaggtgaaattcgatttaatttaatggccattgtgtctgacagaaaaatgatatatgagcagaagatagcagagttacaaagacaacttgcagaggaacccatggatacagatcaaggtaatagtatgttaagtgctattcagtcagaagttgccaaaaatcagatgcttattgaagaagaagtacagaaattaaaaagatacaagattgagaatatcagaaggaagcataattatctgcctttcattatggaattgttaaagactttagcagaacaccagcagttaataccactagtagaaaagatattctgatataggggaaggattctttaataagttccccaagtgattctaatgcaactggtctgtgtaccacagtttgagaaacactttgagaagacactactaggcaaataaaattttggaccattaacttaaagacgagaatacatggtaggtatattttccttattaattttaaagtttacaaagcaaagattgatttcaaccaagctgtttcatgttatacattctaaataatatgagatgtgagctaataagttttttgtgtatattaccttattgattgaaacatgtgacccaacttttagcattaaatgtaaaaattattgcagaagactgctaaatcttctcttttccattataggtttttctgttcatgcatctcagggtgtattctaagatgggaaactgtttttaaagttttagattaatacagggtcctgtggttctcaaaattgcttggttaacaagaatacctagatatgatgttattaatcatatcaaatgtttttctgttaaaaatattaaaataactataaaatgtgctaaatatgtgatacatcagatttt

SEQ ID NO: 33454 - DNA, 1815 bp, Homo sapiens
  source 1..1815: mol_type = unassigned DNA
cgctacgggtgctgcaaggcctgggaagagtttcgatgtctctagggtggctagagcgtcctcccgcgctcagtcgcgctgcaggtgacggcgcccggaggctgtcgggaagtaggcggggtgacgtgtggttgacgagctcggcggcgggtttgctgagatctgtggccggcggcagctggtgcggggggcagctgagagcgagaggtggatcggggcggtgtgtggccagggccatgacgggcaatgccggggagtggtgcctcatggaaagcgaccccggggtcttcaccgagctcattaaaggattcggttgccgaggagcccaagtagaagaaatatggagtttagagcctgagaattttgaaaaattaaagccagttcatgggttaatttttcttttcaagtggcagccaggagaagaaccagcaggctctgtggttcaggactcccgacttgacacgatattttttgctaagcaggtaattaataatgcttgtgctactcaagccatagtgagtgtgttactgaactgtacccaccaggatgtccatttaggcgagacattatcagagtttaaagaattttcacaaagttttgatgcagctatgaaaggcttggcactgagcaattcagatgtgattcgacaagtacacaacagtttcgccagacagcaaatgtttgaatttgatacgaagacatcagcaaaagaagaagatgcttttcactttgtcagttatgttcctgttaatgggagactgtatgaattagatggattaagagaaggaccgattgatttaggtgcatgcaatcaagatgattggatcagtgcagtaaggcctgtcatagaaaaaaggatacaaaagtacagtgaaggtgaaattcgatttaatttaatggccattgtgtctgacagaaaaatgatatatgagcagaagatagcagagttacaaagacaacttgcagaggaacccatggatacagatcaaggtaatagtatgttaagtgctattcagtcagaagttgccaaaaatcagatgcttattgaagaagaagtacagaaattaaaaagatacaagattgagaatatcagaaggaagcataattatctgcctttcattatggaattgttaaagactttagcagaacaccagcagttaataccactagtagaaaaggcaaaagaaaaacagaacgcaaagaaagctcaggaaaccaaatgaagatgttttcagatatgtacacatttctgcttctgcacatattttcatggaaaccattatgtataaagaacttagagcaacatcctaattggctcagtgcacgtttggcaatagtgccagcctgtcttgtctttaatgcatggattcataaacttcttccctacctgcatcatgtgcatgtagtgcatattaaatgaaagtgatattaagaatgctttcccaaattccattatttgacattgagtctgacaactgttagttttctggttgtctaactaccatatgaagctagaaaatgcacaaacgatattccttatctgtaatttaaatacttaaaatttgcaattgtcagatcttgattaaactggttgtcttatttcttctcatcattaacggaaaaaaaatcagtatttctatctttgatatctaagtgttttgaggattttaaaactgaattttatctgctataccagttatttgagaaagtatgattttaatgtaaatcatttaaaaaggacaaaagtataatttccagtgattttcactgctgtcagtagaaaagtaataaacatctcaattttattttagtaaa

SEQ ID NO: 33455 - DNA, 1818 bp, Homo sapiens
  source 1..1818: mol_type = unassigned DNA
cgctacgggtgctgcaaggcctgggaagagtttcgatgtctctagggtggctagagcgtcctcccgcgctcagtcgcgctgcaggtgacggcgcccggaggctgtcgggaagtaggcggggtgacgtgtggttgacgagctcggcggcgggtttgctgagatctgtggccggcggcagctggtgcggggggcagctgagagcgagaggtggatcggggcggtgtgtggccagggccatgacgggcaatgccggggagtggtgcctcatggaaagcgaccccggggtcttcaccgagctcattaaaggattcggttgccgaggagcccaagtagaagaaatatggagtttagagcctgagaattttgaaaaattaaagccagttcatgggttaatttttcttttcaagtggcagccaggagaagaaccagcaggctctgtggttcaggactcccgacttgacacgatattttttgctaagcaggtaattaataatgcttgtgctactcaagccatagtgagtgtgttactgaactgtacccaccaggatgtccatttaggcgagacattatcagagtttaaagaattttcacaaagttttgatgcagctatgaaaggcttggcactgagcaattcagatgtgattcgacaagtacacaacagtttcgccagacagcaaatgtttgaatttgatacgaagacatcagcaaaagaagaagatgcttttcactttgtcagttatgttcctgttaatgggagactgtatgaattagatggattaagagaaggaccgattgatttaggtgcatgcaatcaagatgattggatcagtgcagtaaggcctgtcatagaaaaaaggatacaaaagtacagtgaaggtgaaattcgatttaatttaatggccattgtgtctgacagaaaaatgatatatgagcagaagatagcagagttacaaagacaacttgcagaggaggaacccatggatacagatcaaggtaatagtatgttaagtgctattcagtcagaagttgccaaaaatcagatgcttattgaagaagaagtacagaaattaaaaagatacaagattgagaatatcagaaggaagcataattatctgcctttcattatggaattgttaaagactttagcagaacaccagcagttaataccactagtagaaaaggcaaaagaaaaacagaacgcaaagaaagctcaggaaaccaaatgaagatgttttcagatatgtacacatttctgcttctgcacatattttcatggaaaccattatgtataaagaacttagagcaacatcctaattggctcagtgcacgtttggcaatagtgccagcctgtcttgtctttaatgcatggattcataaacttcttccctacctgcatcatgtgcatgtagtgcatattaaatgaaagtgatattaagaatgctttcccaaattccattatttgacattgagtctgacaactgttagttttctggttgtctaactaccatatgaagctagaaaatgcacaaacgatattccttatctgtaatttaaatacttaaaatttgcaattgtcagatcttgattaaactggttgtcttatttcttctcatcattaacggaaaaaaaatcagtatttctatctttgatatctaagtgttttgaggattttaaaactgaattttatctgctataccagttatttgagaaagtatgattttaatgtaaatcatttaaaaaggacaaaagtataatttccagtgattttcactgctgtcagtagaaaagtaataaacatctcaattttattttagtaaa

SEQ ID NO: 33456 - DNA, 1063 bp, Homo sapiens
  source 1..1063: mol_type = unassigned DNA
gagatctgtggccggcggcagctggtgcggggggcagctgagagcgagaggtggatcggggcggtgtgtggccagggccatgacgggcaatgccggggagtggtgcctcatggaaagcgaccccggggtcttcaccgagctcattaaaggattcggttgccgaggagcccaagtagaagaaatatggagtttagagcctgagaattttgaaaaattaaagccagttcatgggttaatttttcttttcaagtggcagccaggagaagaaccagcaggctctgtggttcaggactcccgacttgacacgatattttttgctaagcaggtaattaataatgcttgtgctactcaagccatagtgagtgtgttactgaactgtacccaccaggatgtccatttaggcgagacattatcagagtttaaagaattttcacaaagttttgatgcagctatgaaaggcttggcactgagcaattcagatgtgattcgacaagtacacaacagtttcgccagacagcaaatgtttgaatttgatacgaagacatcagcaaaagaagaagatgcttttcactttgtcagttatgttcctgttaatgggagactgtatgaattagatggattaagagaaggaccgattgatttaggtgcatgcaatcaagatgattggatcagtgcagtaaggcctgtcatagaaaaaaggatacaaaagtacagtgaaggtgaaattcgatttaatttaatggccattgtgtctgacagaaaaatgatatatgagcagaagatagcagagttacaaagacaacttgcagaggaggaacccatggatacagatcaaggtaatagtatgttaagtgctattcagtcagaagttgccaaaaatcagatgcttattgaagaagaagtacagaaattaaaaagatacaagattgagaatatcagaaggaagcataattatctgcctttcattatggaattgttaaagactttagcagaacaccagcagttaataccactagtagaaaagtttgagaaacactttgagaagacactactaggcaaataa

SEQ ID NO: 33457 - DNA, 411 bp, Homo sapiens
  source 1..411: mol_type = unassigned DNA
taatttaatggccattgtgtctgacagaaaaatgatatatgagcagaagatagcagagttacaaagacaacttgcagaggaacccatggatacagatcaaggtaatagtatgttaagtgctattcagtcagaagttgccaaaaatcagatgcttattgaagaagaagtacagaaattaaaaagatacaagattgagaatatcagaaggaagcataattatctgcctttcattatggaattgttaaagactttagcagaacaccagcagttaataccactagtagaaaagatattctgatataggggaaggattctttaataagttccccaagtgattctaatgcaactggtctgtgtaccacagtttgagaaacactttgagaagacactactaggcaaataaaattttgg

SEQ ID NO: 33458 - DNA, 577 bp, Homo sapiens
  source 1..577: mol_type = unassigned DNA
aggccctctcgacgtcggcctgtggggagcgatgccgacaagcaggagcggtcccggcttcggaaagggcccaccctgaggaatggtccggccgggcctagcgaggatgtccctaccgcgatgctggttccgttacccagggtggacaggcgcggaagcgggacggggaagagcgatagtttcgcggcgtttgcccagcctcaacccctgggatgcgggtgagagacatggaggactggtcagaatttgcgcgtccctggggccgcacaaaaggctcccagccggcctcccgcaatgtcctcacctgtacctggcagccgaccccctggatccgcagcgccgccaggagaagtcctgcgcagcgctgggaaacgacaaaagaaggcagcctgacgggcagcgacagccacagcaacagcaacagccccactgccgccggggattccaggccccagcccttccgaatccgctacgggtgctgcaaggcctgggaagagtttcgatgtctctagggtggctagagcgtcctcccgcgctcagtcgcgctgcaggttgccgaggagcccaagtagaagaa

SEQ ID NO: 33459 - DNA, 1329 bp, Homo sapiens
  source 1..1329: mol_type = unassigned DNA
cattatcagagtttaaagaattttcacaaagttttgatgcagctatgaaaggcttggcactgagcaattcagatgtgattcgacaagtacacaacagtttcgccagacagcaaatgtttgaatttgatacgaagacatcagcaaaagaagaagatgcttttcactttgtcagttatgttcctgttaatgggagactgtatgaattagatggattaagagaaggaccgattgatttaggtgcatgcaatcaagatgattggatcagtgcagtaaggcctgtcatagaaaaaaggatacaaaagtacagtgaaggtgaaattcgatttaatttaatggccattgtgtctgacagaaaaatgatatatgagcagaagatagcagagttacaaagacaacttgcagaggaggaacccatggatacagatcaaggtaatagtatgttaagtgctattcagtcagaagttgccaaaaatcagatgcttattgaagaagaagtacagaaattaaaaagatacaagattgagaatatcagaaggaagcataattatctgcctttcattatggaattgttaaagactttagcagaacaccagcagttaataccactagtagaaaagtttgagaaacactttgagaagacactactaggcaaataaaattttggaccattaacttaaagacgagaatacatggcaaaagaaaaacagaacgcaaagaaagctcaggaaaccaaatgaagatgttttcagatatgtacacatttctgcttctgcacatattttcatggaaaccattatgtataaagaacttagagcaacatcctaattggctcagtgcacgtttggcaatagtgccagcctgtcttgtctttaatgcatggattcataaacttcttccctacctgcatcatgtgcatgtagtgcatattaaatgaaagtgatattaagaatgctttcccaaattccattatttgacattgagtctgacaactgttagttttctggttgtctaactaccatatgaagctagaaaatgcacaaacgatattccttatctgtaatttaaatacttaaaatttgcaattgtcagatcttgattaaactggttgtcttatttcttctcatcattaacggaaaaaaaatcagtatttctatctttgatatctaagtgttttgaggattttaaaactgaattttatctgctataccagttatttgagaaagtatgattttaatgtaaatcatttaaaaaggacaaaagtataatttccagtgattttcactgctgtcagtagaaaagtaataaacatctcaattttattttagtaaa

SEQ ID NO: 33460 - DNA, 834 bp, Homo sapiens
  source 1..834: mol_type = unassigned DNA
tctcaggccccagcccttccgaatccgctacgggtgctgcaaggcctgggaagagtttcgatgtctctagggtggctagagcgtcctcccgcgctcagtcgcgctgcaggttgccgaggagcccaagtagaagaaatatggagtttagagcctgagaattttgaaaaattaaagccagttcatgggttaatttttcttttcaagtggcagccaggagaagaaccagcaggctctgtggttcaggactcccgacttgacacgatattttttgctaagcaggtaattaataatgcttgtgctactcaagccatagtgagtgtgttactgaactgtacccaccaggatgtccatttaggcgagacattatcagagtttaaagaattttcacaaagttttgatgcagctatgaaaggcttggcactgagcaattcagatgtgattcgacaagtacacaacagtttcgccagacagcaaatgtttgaatttgatacgaagacatcagcaaaagaagaagatgcttttcactttgtcagttatgttcctgttaatgggagactgtatgaattagatggattaagagaaggaccgattgatttaggtgcatgcaatcaagatgattggatcagtgcagtaaggcctgtcatagaaaaaaggatacaaaagtacagtgaaggtgaaattcgatttaatttaatggccattgtgtctgacagaaaaatgatatatgagcagaagatagcagagttacaaagacaacttgcagaggaacccatggatacagatcaaggtaatagtatgttaagtgctattcagtcagaagttgccaaaaatcag

SEQ ID NO: 33461 - DNA, 785 bp, Homo sapiens
  source 1..785: mol_type = unassigned DNA
acagcaaatgtttgaatttgatacgaagacatcagcaaaagaagaagatgcttttcactttgtcagttatgttcctgttaatgggagactgtatgaattagatggattaagagaaggaccgattgatttaggtgcatgcaatcaagatgattggatcagtgcagtaaggcctgtcatagaaaaaaggatacaaaagtacagtgaaggtgaaattcgatttaatttaatggccattgtgtctgacagaaaaatgatatatgagcagaagatagcagagttacaaagacaacttgcagaggaggaacccatggatacagatcaaggtaatagtatgttaagtgctattcagtcagaagttgccaaaaatcagatgcttattgaagaagaagtacagaaattaaaaagatacaagattgagaatatcagaaggaagcataattatctgcctttcattatggaattgttaaagactttagcagaacaccagcagttaataccactagtagaaaagtttgagaaacactttgagaagacactactaggcaaataaaattttggaccattaacttaaagacgagaatacatgggaaaataggataaaagaacaaggtgtgagaaggaatagaaggaaacaaacaggaaagatatggctgcaccatgcagtgctactatatgctgagattctacaggatgagatttttgaatagctgaggcagttgcctataatctgtgatgacataaaagtatttgacctaaaatctttttatttgcaaaataataaataa

SEQ ID NO: 33462 - DNA, 784 bp, Homo sapiens
  source 1..784: mol_type = unassigned DNA
tgaaggtgaaattcgatttaatttaatggccattgtgtctgacagaaaaatgatatatgagcagaagatagcagagttacaaagacaacttgcagaggaacccatggatacagatcaaggtaatagtatgttaagtgctattcagtcagaagttgccaaaaatcagatgcttattgaagaagaagtacagaaattaaaaagatacaagattgagaatatcagaaggaagcataattatctgcctttcattatggaattgttaaagactttagcagaacaccagcagttaataccactagtagaaaagtttgagaaacactttgagaagacactactaggcaaataaaattttggaccattaacttaaagacgagaatacatggcaaaagaaaaacagaacgcaaagaaagctcaggaaaccaaatgaagatgttttcagatatgtacacatttctgcttctgcacatattttcatggaaaccattatgtataaagaacttagagcaacatcctaattggctcagtgcacgtttggcaatagtgccagcctgtcttgtctttaatgcatggattcataaacttcttccctacctgcatcatgtgcatgtagtgcatattaaatgaaagtgatattaagaatgctttcccaaattccattatttgacattgagtctgacaactgttagttttctggttgtctaactaccatatgaagctagaaaatgcacaaacgatattccttatctgtaatttaaatacttaaaatttgcaattgtcagatctt

SEQ ID NO: 33463 - DNA, 1067 bp, Homo sapiens
  source 1..1067: mol_type = unassigned DNA
gatctgtggccggcggcagctggtgcggggggcagctgagagcgagaggtggatcggggcggtgtgtggccagggccatgacgggcaatgccggggagtggtgcctcatggaaagcgaccccggggtcttcaccgagctcattaaaggattcggttgccgaggagcccaagtagaagaaatatggagtttagagcctgagaattttgaaaaattaaagtaattaataatgcttgtgctactcaagccatagtgagtgtgttactgaactgtacccaccaggatgtccatttaggcgagacattatcagagtttaaagaattttcacaaagttttgatgcagctatgaaaggcttggcactgagcaattcagatgtgattcgacaagtacacaacagtttcgccagacagcaaatgtttgaatttgatacgaagacatcagcaaaagaagaagatgcttttcactttgtcagttatgttcctgttaatgggagactgtatgaattagatggattaagagaaggaccgattgatttaggtgcatgcaatcaagatgattggatcagtgcagtaaggcctgtcatagaaaaaaggatacaaaagtacagtgaaggtgaaattcgatttaatttaatggccattgtgtctgacagaaaaatgatatatgagcagaagatagcagagttacaaagacaacttgcagaggaggaacccatggatacagatcaaggtaatagtatgttaagtgctattcagtcagaagttgccaaaaatcagatgcttattgaagaagaagtacagaaattaaaaagatacaagattgagaatatcagaaggaagcataattatctgcctttcattatggaattgttaaagactttagcagaacaccagcagttaataccactagtagaaaagatattctgatataggggaaggattctttaataagttccccaagtgattctaatgcaactggtctgtgtaccacagtttgagaaacactttgagaagacactactaggcaaataaaattttggaccattaacttaaagacgagaatacatgg

SEQ ID NO: 33464 - DNA, 1087 bp, Homo sapiens
  source 1..1087: mol_type = unassigned DNA
gattgcttgaggagagaagtatgtgatcagaaagcattctttgtctattaactcctgcccagcaaaagtgaaagaaaattcatgggagcatgcaagaacaaagagcacagcaaagctggacaaacacagcaatccaggcaggggatttccaactcaactctggtatataagctgcatgcaaagtcctttttctgtctctggtttctggccccttgtctgcagagatggctcccaatgcttcctgcctctgtgtgcatgtccgttccgaggaatgggatttaatgacctttgatgccaacccatatgacagcgtgaaaaaaatcaaagaacatgtccggtctaagaccaaggttcctgtgcaggaccaggttcttttgctgggctccaagatcttaaagccacggagaagcctctcatcttatggcattgacaaagagaagaccatccaccttaccctgaaagtggtgaagcccagtgatgaggagctgcccttgtttcttgtggagtcaggtgatgaggcaaagaggcacctcctccaggtgcgaaggtccagctcagtggcacaagtgaaagcaatgatcgagactaagacgggtataatccctgagacccagattgtgacttgcaatggaaagagactggaagatgggaagatgatggcagattacggcatcagaaagggcaacttactcttcctggcatgttattgtattggagggtgaccaccctgggcatggggtgttggcaggggtcaaaaagcttatttcttttaatctcttactcaacgaacacatcttctgatgatttcccaaaattaatgagaatgagatgagtagagtaagatttgggtgggatgggtaggatgaagtatattgcccaactctatgtttctttgattctaacacaattaattaagtgacatgatttttactaatgtattactgagactagtaaataaatttttaaggcaaaatagagcattcaaagccagcttggaatttaattctgtcttgataccttgttatttatgcaaaaactcctatctcctttcctttatgacaagagagtaagttttaggttgggatcc

SEQ ID NO: 33465 - DNA, 990 bp, Homo sapiens
  source 1..990: mol_type = unassigned DNA
gattgcttgaggagagaagtatgtgatcagaaagcattctttgtctattaactcctgcccagcaaaagtgaaagaaaattcatgggagcatgcaagaacaaagagcacagcaaagctggacaaacacagcaatccaggcaggggatttccaactcaactctggtatataagctgcatgcaaagtcctttttctgtctctggtttctggccccttgtctgcagagatggctcccaatgcttcctgcctctgtgtgcatgtccgttccgaggaatgggatttaatgacctttgatgccaacccatatgacagcgtgaaaaaaatcaaagaacatgtccggtctaagaccaaggttcctgtgcaggaccaggttcttttgctgggctccaagatcttaaagccacggagaagcctctcatcttatggcattgacaaagagaagaccatccaccttaccctgaaagtggtgaagcccagtgatgaggagctgcccttgtttcttgtggagtcaggtgatgaggcaaagaggcacctcctccaggtgcgaaggtccagctcagtggcacaagtgaaagcaatgatcgagactaagacgggtataatccctgagacccagattgtgacttgcaatggaaagagactggaagatgggaagatgatggcagattacggcatcagaaagggcaacttactcttcctggcatcttattgtattggagggtgaccaccctggggatggggtgttggcaggggtcaaaaagcttatttcttttaatctcttactcaacgaacacatcttctgatgatttcccaaaattaatgagaatgagatgagtagagtaagatttgggtgggatgggtaggatgaagtatattgcccaactctatgtttctttgattctaacacaattaattaagtgacatgatttttactaatgtattactgagactagtaaataaatttttaaggcaaaatagagcattcaaagcca

SEQ ID NO: 33466 - DNA, 990 bp, Homo sapiens
  source 1..990: mol_type = unassigned DNA
gattgcttgaggagagaagtatgtgatcagaaagcattctttgtctattaactcctgcccagcaaaagtgaaagaaaattcatgggagcatgcaagaacaaagagcacagcaaagctggacaaacacagcaatccaggcaggggatttccaactcaactctggtatataagctgcatgcaaagtcctttttctgtctctggtttctggccccttgtctgcagagatggctcccaatgcttcctgcctctgtgtgcatgtccgttccgaggaatgggatttaatgacctttgatgccaacccatatgacagcgtgaaaaaaatcaaagaacatgtccggtctaagaccaaggttcctgtgcaggaccaggttcttttgctgggctccaagatcttaaagccacggagaagcctctcatcttatggcactgacaaagagaagaccatccaccttaccctgaaagtggtgaagcccagtgatgaggagctgcccttgtttcttgtggagtcaggtgatgaggcaaagaggcacctcctccaggtgcgaaggtccagctcagtggcacaagtgaaagcaatgatcgagactaagacgggtataatccctgagacccagattgtgacttgcaatggaaagagactggaagatgggaagatgatggcagattacggcatcagaaagggcaacttactcttcctggcatcttattgtattggagggtgaccaccctggggatggggtgttggcaggggtcaaaaagcttatttcttttaatctcttactcaacgaacacatcttctgatgatttcccaaaattaatgagaatgagatgagtagagtaagatttgggtgggatgggtaggatgaagtatattgcccaactctatgtttctttgattctaacacaattaattaagtgacatgatttttactaatgtattactgagactagtaaataaatttttaaggcaaaatagagcattcaaagcca

SEQ ID NO: 33467 - DNA, 990 bp, Homo sapiens; identical to SEQ ID NO: 33466
  source 1..990: mol_type = unassigned DNA

SEQ ID NO: 33468 - DNA, 990 bp, Homo sapiens
  source 1..990: mol_type = unassigned DNA
gattgcttgaggagagaagtatgtgatcagaaagcattctttgtctattaactcctgcccagcaaaagtgaaagaaaattcatgggagcatgcaagaacaaagagcacagcaaagctggacaaacacagcaatccaggcaggggatttccaactcaactctggtatataagctgcatgcaaagtcctttttctgtctctggtttctggccccttgtctgcagagatggctcccaatgcttcctgcctctgtgtgcatgtccgttccgaggaatgggatttaatgacctttgatgccaacccatatgacagcgtgaaaaaaatcaaagaacatgtccggtctaagaccaaggttcctgtgcaggaccaggttcttttgctgggctccaagatcttaaagccacggagaagcctctcatcttatggcattgacaaagagaagaccatccaccttaccctgaaagtggtgaagcccagtgatgaggagctgcccttgtttcttgtggagtcaggtgatgaggcaaagaggcacctcctccaggtgcgaaggtccagctcagtggcacaagtgaaagcaatgatcgagactaagacgggtataatccctgagacccagattgtgacttgcaatggaaagagactggaagatgggaagatgatggcagattacggcatcagaaagggcaacttactcttcctggcatgttattgtattggagggtgaccaccctgggcatggggtgttggcaggggtcaaaaagcttatttcttttaatctcttactcaacgaacacatcttctgatgatttcccaaaattaatgagaatgagatgagtagagtaagatttgggtgggatgggtaggatgaagtatattgcccaactctatgtttctttgattctaacacaattaattaagtgacatgatttttactaatgtattactgagactagtaaataaatttttaaggcaaaatagagcattcaaagcca

SEQ ID NO: 33469 - DNA, 990 bp, Homo sapiens; identical to SEQ ID NO: 33466
  source 1..990: mol_type = unassigned DNA

SEQ ID NO: 33470 - DNA, 990 bp, Homo sapiens
  source 1..990: mol_type = unassigned DNA
gattgcttgaggagagaagtatgtgatcagaaagcattctttgtctattaactcctgcccagcaaaagtgaaagaaaattcatgggagcatgcaagaacaaagagcacagcaaagctggacaaacacagcaatccaggcaggggatttccaactcaactctggtatataagctgcatgcaaagtcctttttctgtctctggtttctggccccttgtctgcagagatggctcccaatgcttcctgcctctgtgtgcatgtccgttccgaggaatgggatttaatgacctttgatgccaacccatatgacagcgtgaaaaaaatcaaagaacatgtccggtctaagaccaaggttcctgtgcaggaccaggttcttttgctgggctccaagatcttaaagccacggagaagcctctcatcttacggcattgacaaagagaagaccatccaccttaccctgaaagtggtgaagcccagtgatgaggagctgcccttgtttcttgtggagtcaggtgatgaggcaaagaggcacctcctccaggtgcgaaggtccagctcagtggcacaagtgaaagcaatgatcgagactaagacgggtataatccctgagacccagattgtgacttgcaatggaaagagactggaagatgggaagatgatggcagattacggcatcagaaagggcaacttactcttcctggcatcttattgtattggagggtgaccaccctgggcatggggtgttggcaggggtcaaaaagcttatttcttttaatctcttactcaacgaacacatcttctgatgatttcccaaaattaatgagaatgagatgagtagagtaagatttgggtgggatgggtaggatgaagtatattgcccaactctatgtttctttgattctaacacaattaattaagtgacatgatttttactaatgtattactgagactagtaaataaatttttaaggcaaaatagagcattcaaagcca

SEQ ID NO: 33471 - DNA, 3301 bp, Homo sapiens
  source 1..3301: mol_type = unassigned DNA
ggcgccgcgggccgggggccgatgggtcctggcggacgcgaggcgccggcgcggggctcgcctggactcgggtgtgcggggctgtgagggggcgaggcgggcgctgcggcccgcccgggatgggccagccctggcctggcggggctgagccgaaggcgagggcggcgcgcgggccaggcctgccgggcgggcggcccgggggttgaggtagaagtgggcgcggaggaaggggccgagccaaggcggtgggtggagcggcgaggggggcggaggctgggccgcggcgggcgagcggagcggcgcgcctgtccggagctcggcggtggcgccggaggaggctgcagcggcggcggcggcgggcccggacgagcgtccggaggtggcggacgaggcgccgggggcccccatgggcgggtgtgtgggcgcccagcacgactcctcgggcagcctcaacgagaactcggagggcaccggagttgctctaggtcgtaaccagcctttgaaaaaggagaaaccaaaatggaaaagcgattatcctatgacagatggacaactacgcagcaagagggatgaattttgggatacagcaccagcttttgaaggccggaaagagatttgggatgccttgaaggctgctgcacatgcttttgagagcaatgatcatgaactggcacaagcaatcattgatggtgcaaacataacattaccacatggtgcacttacagagtgctacgatgaactggggaacagatatcagcttccagtgtattgcttggcaccgccaatcaacatgatagaggaaaagagcgacatagagactctggatattcctgagccaccacccaattctggatatgaatgtcagcttcgtttgcgcctttccacaggcaaagacctcaagcttgtggttcgcagcacagacacagtattccacatgaagagacggttgcatgcagcagagggagtggaaccaggtagtcagcggtggtttttttctggcagacctctcactgacaaaatgaagttcgaagagctgaagatcccaaaggactatgttgtacaggttatagtgagccaacctgtgcagaacccaacaccagtggagaactgaactgagccctgttggccagctcccacatccctctgctcctttttatggttcttgttgtcatttcctactctgcggcgtgaaatctatttcactgctctaaattccctatgaatggatttagttctgaggaattaccagtgaaaaattccatctgtgatggagaccaacaaaaataataaaacacaaagagccaggctttgagactcatgtaattacaatttctaatttgaaaggcagttaagaaatagataaccatttattttagaacactcaacaactatgtaatggctatatttcagtgacttggactgtaaatgaaacattgcatccatgaaggacagcaccaagcacctttttgaatacagaatttttttagaaaaatatatcaaattatataatttccagaaaccataaataatggatataaaacttaacctttttgttttgttttgttttgttttgttttgttttgttttgttttggttaatggaaactgaaaagagcagtatttgaggttgcttctattctggttttttattcttagctcaattaatatttagccataaatgagtagagactggcaaattgtgctttagtgttgctttcctcatccccacatcttgagctccttatttacattcacactaaattttggtgccttccagcacattagtggcaggcacccttctggaacactaggcaataatttcatcaatacagtcaggtctcttgagtttcaacagatactcagttgaaaagtcgctgtcatcttgctgcataagtattttgaaaggtctgtataacgaagccatttttatatccaggcttagaaggtcactactatatagtaccttcattgatctatctattctgcttggaacttttcatagctaagtataacccccaaatgcatggttcctgggtcaggagacaccaaaatcaattatagctgttcccactcaagttaataaagtaaatgatttcctccactttgcatggaggggtgtaaggaaagcctattttatctgtgcctgggagaactgtgcctattttcagtcttttagaggaaatttcaactcaaaatttttaagtgtgaaagatttactggtgtcacataaacattagcagtgagaccaaataatgaaacattgctttataccttagtgctttccagttcactgttacctctagtcatggtagatgacaattttcctccctcatcttttgtagcaaagaagcaaattaagagccttttgcaagttagattaggggactgaaaaatccagggagataacctgattcttctatactatgactggagtaaagctgccaagagttaggttgaatttggagccttttaaaagttggttccataagtgagaaggggggctaacatgtgaccactgtgcccctgagaatccatgagatggaaaagtacagacaagaaggcacttaacgctgttctcagttggaaaatgtcagccctccacacctgtttggatgtgaagtgcattattaattttaatgacaaaatgaaactgctaattagtttaaatgtaatgtttaaatggtattgaatttcctattgcctgattaaatatatctgtaattgtaacatcatgtttctgagagctttaactacttccttatttttatgcaatcattttaaagattgtggctatatctaatttaaatttgctgatgattgaatctaaattcaagtgaagaccacagcattaatcccaaaggagattttttttatgtttagaggtggagatattagggtaaatcagtatattgctcctgtcatcaaagtttttgttcatttgtgtgccacatcgaatagcagcacttctcaaagtttgtcaactggaaaaaagtgtttaaaactgtttttttcttaagcagatttggtgatgtcatcaatatctatgatatcgattggtaaaaggtctttctttgttgaggatttgagctctctttttaagagtttattttattttaaaggaacatatgctttgaataacaattctctgggcatgtttaactaacctaggtgggaaaaccatggtgctgtttaattgtaaatagattgatataagattggaccagtacttgatgtgtataattttagtatgtagggtttatgtgctttttttaaaaaaaaaaaaaaggttcaatttttctctt

SEQ ID NO: 33472 - DNA, 1783 bp, Homo sapiens
  source 1..1783: mol_type = unassigned DNA
acttccggtgagcctctggggcgtaccggcttggcgcggcggcagcggcagcggcggctgggagagcggtcggcggggtttcttcgttgcattgcctgagaggagcggagtctgccaggtggtgtccatcatgttctctttcaacatgttcgaccaccctattcccagggtcttccaaaaccgcttctccacacagtaccgctgcttctctgtgtccatgctagcagggcctaatgacaggtcagatgtggagaaaggagggaagataattatgccaccctcggccctggaccaactcagccgacttaacattacctatcccatgctgttcaaactgaccaataagaattcggaccgcatgacgcattgtggcgtgctggagtttgtggctgatgagggcatctgctacctcccacactggatgatgcagaacttactcttggaagaaggcggcctggtccaggtggagagcgtcaaccttcaagtggccacctactccaaattccaacctcagagccctgacttcctggacatcaccaaccccaaagccgtattagaaaacgcacttaggaactttgcctgtctgaccaccggggatgtgattgccatcaactataatgaaaagatctacgaactgcgtgtgatggagaccaaacccgacaaggcagtgtccatcattgagtgtgacatgaacgtggactttgatgctcccctgggctacaaagaacccgaaagacaagtccagcatgaggagtcgacagaaggtgaagccgaccacagtggctatgctggagagctgggcttccgcgctttctctggatctggcaatagactggatggaaagaagaaaggggtagagcccagcccctccccaatcaagcctggagatattaaaagaggaattcccaattatgaatttaaacttggtaagataactttcatcagaaattcacgtccccttgtcaaaaaggttgaagaggatgaagctggaggcagattcgtcgctttctctggagaaggacagtcattgcgtaaaaagggaagaaagccctaagtgaggactgttggctgattggaaaataataaaagaatcatttgcaacatcttggcttttagttactggcactgacagggacgagcctcatcagagaatactctgttacttaagatttatttagagttacctaagaattattaagtttgacttggaagtggagcagcaggactttgtagttgtatgcttgatttggggaaagacaaagagctgtccctgagggcctgtagatagctgcctcctcacctcttcacgctttcagcttgaggggagctcccactgcctcagcaggagcaattctgcatccctaattctgtcaaaacctatgaaggtgactaaattgtctaacatgaagtgttctttctttttcttcatttatcctttcttttcctacatcaattgcataggtgtcagtctttggcctaaaaaaaggctttaaatagacatgtgttctataagtagtggctgtcccactactgtggctgcaatttaagtatttgacaaagaatgtttctatttttattttacatatttttttcaaaaacaccactcagaagaacctgatctgaatgagtttgcacttttattctcatttcatatggacataactggctccttagtgaacctgttcatagtgaaacaactccatggagaagcaaacatgtgaatgttagaatgaacaaatgctaaagagatgttcctctccttcttccctactccccaactccc

SEQ ID NO: 33473 - DNA, 1750 bp, Homo sapiens
  source 1..1750: mol_type = unassigned DNA
acttccggtgagcctctggggcgtaccggcttggcgcggcggcagcggcagcggcggctgggagagcggtcggcggggtttcttcgttgcattgcctgagaggagcggagtctgccaggtggtgtccatcatgttctctttcaacatgttcgaccaccctattcccagggtcttccaaaaccgcttctccacacagtaccgctgcttctctgtgtccatgctagcagggcctaatgacaggtcagatgtggagaaaggagggaagagccgacttaacattacctatcccatgctgttcaaactgaccaataagaattcggaccgcatgacgcattgtggcgtgctggagtttgtggctgatgagggcatctgctacctcccacactggatgatgcagaacttactcttggaagaaggcggcctggtccaggtggagagcgtcaaccttcaagtggccacctactccaaattccaacctcagagccctgacttcctggacatcaccaaccccaaagccgtattagaaaacgcacttaggaactttgcctgtctgaccaccggggatgtgattgccatcaactataatgaaaagatctacgaactgcgtgtgatggagaccaaacccgacaaggcagtgtccatcattgagtgtgacatgaacgtggactttgatgctcccctgggctacaaagaacccgaaagacaagtccagcatgaggagtcgacagaaggtgaagccgaccacagtggctatgctggagagctgggcttccgcgctttctctggatctggcaatagactggatggaaagaagaaaggggtagagcccagcccctccccaatcaagcctggagatattaaaagaggaattcccaattatgaatttaaacttggtaagataactttcatcagaaattcacgtccccttgtcaaaaaggttgaagaggatgaagctggaggcagattcgtcgctttctctggagaaggacagtcattgcgtaaaaagggaagaaagccctaagtgaggactgttggctgattggaaaataataaaagaatcatttgcaacatcttggcttttagttactggcactgacagggacgagcctcatcagagaatactctgttacttaagatttatttagagttacctaagaattattaagtttgacttggaagtggagcagcaggactttgtagttgtatgcttgatttggggaaagacaaagagctgtccctgagggcctgtagatagctgcctcctcacctcttcacgctttcagcttgaggggagctcccactgcctcagcaggagcaattctgcatccctaattctgtcaaaacctatgaaggtgactaaattgtctaacatgaagtgttctttctttttcttcatttatcctttcttttcctacatcaattgcataggtgtcagtctttggcctaaaaaaaggctttaaatagacatgtgttctataagtagtggctgtcccactactgtggctgcaatttaagtatttgacaaagaatgtttctatttttattttacatatttttttcaaaaacaccactcagaagaacctgatctgaatgagtttgcacttttattctcatttcatatggacataactggctccttagtgaacctgttcatagtgaaacaactccatggagaagcaaacatgtgaatgttagaatgaacaaatgctaaagagatgttcctctccttcttccctactccccaactccc

SEQ ID NO: 33474 - DNA, 1164 bp, Homo sapiens
  source 1..1164: mol_type = unassigned DNA
agcggcagcggcggctgggagagcggtcggcggggtttcttcgttgcattgcctgagaggagcggagtctgccaggtggtgtccatcatgttctctttcaacatgttcgaccaccctattcccagggtcttccaaaaccgcttctccacacagtaccgctgcttctctgtgtccatgctagcagggcctaatgacaggtcagatgtggagaaaggagggaagataattatgccaccctcggccctggaccaactcagccgacttaacattacctatcccatgctgttcaaactgaccaataagaattcggaccgcatgacgcattgtggcgtgctggagtttgtggctgatgagggcatctgctacctcccacactgggtggtctacaggctctctttggaaagggatggccttaaatcacttgaggtagctgaagtgtcaggcagtgactacttccccagtcccttctgtggacttgaagtttggatgatgcagaacttactcttggaagaaggcggcctggtccaggtggagagcgtcaaccttcaagtggccacctactccaaattccaacctcagagccctgacttcctggacatcaccaaccccaaagccgtattagaaaacgcacttaggaactttgcctgtctgaccaccggggatgtgattgccatcaactataatgaaaagatctacgaactgcgtgtgatggagaccaaacccgacaaggcagtgtccatcattgagtgtgacatgaacgtggactttgatgctcccctgggctacaaagaacccgaaagacaagtccagcatgaggagtcgacagaaggtgaagccgaccacagtggctatgctggagagctgggcttccgcgctttctctggatctggcaatagactggatggaaagaagaaaggggtagagcccagcccctccccaatcaagcctggagatattaaaagaggaattcccaattatgaatttaaacttggtaagataactttcatcagaaattcacgtccccttgtcaaaaaggttgaagaggatgaagctggaggcagattcgtcgctttctctggagaaggacagtcattgcgtaaaaagggaagaaagccctaagtgaggactgttggctgattggaaaataataaaagaatcatttgc

SEQ ID NO: 33475 - DNA, 1007 bp, Homo sapiens
  source 1..1007: mol_type = unassigned DNA
agcggcagcggcggctgggagagcggtcggcggggtttcttcgttgcattgcctgagaggagcggagtctgccaggtggtgtccatcatgttctctttcaacatgttcgaccaccctattcccagggtcttccaaaaccgcttctccacacagtaccgctgcttctctgtgtccatgctagcagggcctaatgacaggtcagatgtggagaaaggagggaagataattatgccaccctcggccctggaccaactcagccgacttaacattacctatcccatgctgttcaaactgaccaataagaattcggaccgcatgacgcattgtggcgtgctggagtttgtggctgatgagggcatctgctacctcccacactggatgatgcagaacttactcttggaagaaggcggcctggtccaggtggagagcgtcaaccttcaagtggccacctactccaaattccaacctcagagccctgacttcctggacatcaccaaccccaaagccgtattagaaaacgcacttaggaactttgcctgtctgaccaccggggatgtgattgccatcaactataatgaaaagatctacgaactgcgtgtgatggagaccaaacccgacaaggcagtgtccatcattgagtgtgacatgaacgtggactttgatgctcccctgggctacaaagaacccgaaagacaagtccagcatgaggagtcgacagaaggtgaagccgaccacagtggctatgctggagagctgggcttccgcgctttctctggatctggcaatagactggatggaaagaagaaaggggtagagcccagcccctccccaatcaagcctggagatattaaaagaggaattcccaattatgaatttaaacttggatgaagctggaggcagattcgtcgctttctctggagaaggacagtcattgcgtaaaaagggaagaaagccctaagtgaggactgttggctgattggaaaataataaaagaatcatttgcaaca

SEQ ID NO: 33476 - DNA, 1752 bp, Homo sapiens
  source 1..1752: mol_type = unassigned DNA
cggacgcgcgcgcccctccccctccccccgcgctcccaacgtgtggcggctcgcgacccccggcaacccggagaaggtctacagagcggcctgcgccagcgaacaaaaggatgccacggagaaagaaaaaagttaaagaagtctccgaatctcggaacctggagaagaaggatgtggaaactaccagttctgtcagtgtgaagaggaagcgtagacttgaggatgcattcattgtgatatccgatagtgatggagaggaaccaaaggaggaaaatgggttgcagaaaacgaagacaaaacagtcgaatagagcaaagtgtttggccaaaagaaaaatcgcacagatgacagaagaagaacagtttgctctggctctcaaaatgagtgagcaggaagctagggaggtgaacagccaggaggaggaagaagaggagctcttgaggaaagccattgctgaaagcctgaatagttgccggccttctgatgcttccgctaccagatctcgacctctggccactggaccgtcttcccagtcccatcaagagaaaaccacagactctgggctcactgaagtcttcccaagggattgttgaagaaacttctgaagagggaaactctgtacctgcttcacaaagtgttgctgctttgaccagtaagagaagcttagtccttatgccagagagttctgcagaagaaatcactgtttgtcctgagacccagctaagttcctctgaaacttttgaccttgaaagagaagtctctccaggtagcagagatatcttggatggagtcagaataataatggcagataaggaggttggtaacaaggaagatgctgagaaggaagtagctatttctaccttctcatccagtaaccaggtatcctgcccgctatgtgaccaatgctttccacccacaaagattgaacgacatgccatgtactgcaatggtctgatggaggaagatacagaagtattgactcggagacaaaaagaggccaagaccaagagtgacagtgggacagctgcccagacttctctagacattgacaagaatgagaagtgttacctctgtaaatccctggtcccatttagagagtatcagtgtcatgtggactcctgtctccagcttgcaaaggctgaccaaggagatggacctgaagggagtggaagagcatgttcaactgtggaggggaagtggcagcagaggctgaagaacccaaaggaaaaaggccacagtgaaggccgactccttagtttcttggaacagtctgagcacaagacttcagatgcagacatcaagtcttcagaaacaggagccttcagggtgccttcaccagggatggaagaggcaggctgcagcagagagatgcagagttctttcacacgtcgtgacttaaatgaatctcccgtcaagtcttttgtttccatttcagaagccacagattgcttagtggactttaaaaagcaagttactgtccagccaggtagtcggacacggaccaaagctggcagaggaagaaggagaaaattctgaatttctagggtccaaaagttgacaaaaccattagtaggaggggtgggccatgttcattaagccatagtggtccctagttcattgttgagcaagttttagccctgcagttttcaccaccagcacctacccagcattctggtttttatgttttttatgatctatgcagacaactgtgtattctgttttataacagtttgtttgaatttacttacagtt

SEQ ID NO: 33477 - DNA, 2604 bp, Homo sapiens
  source 1..2604: mol_type = unassigned DNA
gaagtcgggggtgggtccctccggacgccgaagtgggctcgggatgcggggctgggaccctcccgattccggggcggattccggacgccgggaccggccattactggtgccgggttgggcttctccagatgccggggctgggtccttcccaaggttgagacaaaaggatgccacggagaaagaaaaaagttaaagaagtctccgaatctcggaacctggagaagaaggatgtggaaactaccagttctgtcagtgtgaagaggaagcgtagacttgaggatgcattcattgtgatatccgatagtgatggagaggaaccaaaggaggaaaatgggttgcagaaaacgaagacaaaacagtcgaatagagcaaagtgtttggccaaaagaaaaatcgcacagatgacagaagaagaacagtttgctctggctctcaaaatgagtgagcaggaagctagggaggtgaacagccaggaggaggaagaagaggagctcttgaggaaagccattgctgaaagcctgaatagttgccggccttctgatgcttccgctaccagatctcgacctctggccactggaccgtcttcccagtcccatcaagagaaaaccacagactctgggctcactgaaggcatatggcagctggtacctccatcactgtttaaaggctcacatatcagtcagggaaacgaggctgaggaaagagaggagccttgggaccacactgaaaaaactgaagaggagccggtctctggcagctcaggaagctgggaccagtcaagccagccagtgtttgagaatgtgaacgttaaatcttttgacagatgtactggccactcggctgagcacacacagtgtgggaagccacaggaaagtactgggaggggttctgcttttctcaaagctgtccagggtagcggggacacatctaggcactgtctacctaccctagcagatgccaaaggtctccaggacactgggggcactgtgaactatttctggggtattccattctgccctgatggagtagaccctaaccagtataccaaggtcattctctgccagttggaggtttatcaaaagagcctgaaaatggctcagaggcagctccttaataaaaaaggttttggggaaccagtgttacctagacctccttctctgatccagaatgaatgtggccaaggagagcaggctagtgagaaaaatgaatgcatctcagaagatatgggagatgaagacaaagaggagaggcaggagtctagggcatctgactggcactcaaaaaccaaggatttccaggaaagctcaattaaaagcttgaaagagaaacttttgttggaggaagaaccaacaaccagtcatggtcagtcttcccaagggattgttgaagaaacttctgaagagggaaactctgtacctgcttcacaaagtgttgctgctttgaccagtaagagaagcttagtccttatgccagagagttctgcagaagaaatcactgtttgtcctgagacccagctaagttcctctgaaacttttgaccttgaaagagaagtctctccaggtagcagagatatcttggatggagtcagaataataatggcagataaggaggttggtaacaaggaagatgctgagaaggaagtagctatttctaccttctcatccagtaaccaggtatcctgcccgctatgtgaccaatgctttccacccacaaagattgaacgacatgccatgtactgcaatggtctgatggaggaagatacagaagtattgactcggagacaaaaagaggccaagaccaagagtgacagtgggacagctgcccagacttctctagacattgacaagaatgagaagtgttacctctgtaaatccctggtcccatttagagagtatcagtgtcatgtggactcctgtctccagcttgcaaaggctgaccaaggagatggacctgaagggagtggaagagcatgttcaactgtggaggggaagtggcagcagaggctgaagaacccaaaggaaaaaggccacagtgaaggccgactccttagtttcttggaacagtctgagcacaagacttcagatgcagacatcaagtcttcagaaacaggagccttcagggtgccttcaccagggatggaagaggcaggctgcagcagagagatgcagagttctttcacacgtcgtgacttaaatgaatctcccgtcaagtcttttgtttccatttcagaagccacagattgcttagtggactttaaaaagcaagttactgtccagccaggtagtcggacacggaccaaagctggcagaggaagaaggagaaaattctgaatttctagggtccaaaagttgacaaaaccattagtaggaggggtgggccatgttcattaagccatagtggtccctagttcattgttgagcaagttttagccctgcagttttcaccaccagcacctacccagcattctggtttttatgttttttatgatctatgcagacaactgtgtattctgttttataacagtttgtttgaatttacttacagttaaaaaatttaaatatatttatgtttgtacgaaatcttatttcaatagatggaaatttt

SEQ ID NO: 33478 - DNA, 2489 bp, Homo sapiens
  source 1..2489: mol_type = unassigned DNA
cggacgcgcgcgcccctccccctccccccgcgctcccaacgtgtggcggctcgcgacccccggcaacccggagaaggtctacagagcggcctgcgccagcgaacaaaaggatgccacggagaaagaaaaaagttaaagaagtctccgaatctcggaacctggagaagaaggatgtggaaactaccagttctgtcagtgtgaagaggaagcgtagacttgaggatgcattcattgtgatatccgatagtgatggagaggaaccaaaggaggaaaatgggttgcagaaaacgaagacaaaacagtcgaatagagcaaagtgtttggccaaaagaaaaatcgcacagatgacagaagaagaacagtttgctctggctctcaaaatgagtgagcaggaagctagggaggtgaacagccaggaggaggaagaagaggagctcttgaggaaagccattgctgaaagcctgaatagttgccggccttctgatgcttccgctaccagatctcgacctctggccactggaccgtcttcccagtcccatcaagagaaaaccacagactctgggctcactgaaggcatatggcagctggtacctccatcactgtttaaaggctcacatatcagtcagggaaacgaggctgaggaaagagaggagccttgggaccacactgaaaaaactgaagaggagccggtctctggcagctcaggaagctgggaccagtcaagccagccagtgtttgagaatgtgaacgttaaatcttttgacagatgtactggccactcggctgagcacacacagtgtgggaagccacaggaaagtactgggaggggttctgcttttctcaaagctgtccagggtagcggggacacatctaggcactgtctacctaccctagcagatgccaaaggtctccaggacactgggggcactgtgaactatttctggggtattccattctgccctgatggagtagaccctaaccagtataccaaggtcattctctgccagttggaggtttatcaaaagagcctgaaaatggctcagaggcagctccttaataaaaaaggttttggggaaccagtgttacctagacctccttctctgatccagaatgaatgtggccaaggagagcaggctagtgagaaaaatgaatgcatctcagaagatatgggagatgaagacaaagaggagaggcaggagtctagggcatctgactggcactcaaaaaccaaggatttccaggaaagctcaattaaaagcttgaaagagaaacttttgttggaggaagaaccaacaaccagtcatggtcagtcttcccaagggattgttgaagaaacttctgaagagggaaactctgtacctgcttcacaaagtgttgctgctttgaccagtaagagaagcttagtccttatgccagagagttctgcagaagaaatcactgtttgtcctgagacccagctaagttcctctgaaacttttgaccttgaaagagaagtctctccaggtagcagagatatcttggatggagtcagaataataatggcagataaggaggttggtaacaaggaagatgctgagaaggaagtagctatttctaccttctcatccagtaaccaggtatcctgcccgctatgtgaccaatgctttccacccacaaagattgaacgacatgccatgtactgcaatggtctgatggaggaagatacagaagtattgactcggagacaaaaagaggccaagaccaagagtgacagtgggacagctgcccagacttctctagacattgacaagaatgagaagtgttacctctgtaaatccctggtcccatttagagagtatcagtgtcatgtggactcctgtctccagcttgcaaaggctgaccaaggagatggacctgaagggagtggaagagcatgttcaactgtggaggggaagtggcagcagaggctgaagaacccaaaggaaaaaggccacagtgaaggccgactccttagtttcttggaacagtctgagcacaagacttcagatgcagacatcaagtcttcagaaacaggagccttcagggtgccttcaccagggatggaagaggcaggctgcagcagagagatgcagagttctttcacacgtcgtgacttaaatgaatctcccgtcaagtcttttgtttccatttcagaagccacagattgcttagtggactttaaaaagcaagttactgtccagccaggtagtcggacacggaccaaagctggcagaggaagaaggagaaaattctgaatttctagggtccaaaagttgacaaaaccattagtaggaggggtgggccatgttcattaagccatagtggtccctagttcattgttgagcaagttttagccctgcagttttcaccaccagcacctacccagcattctggtttttatgttttttatgatctatgcagacaactgtgtattctgttttataacagtttgtttgaatttacttacagtt

SEQ ID NO: 33479 - DNA, 2570 bp, Homo sapiens
  source 1..2570: mol_type = unassigned DNA
gggctcgggatgcggggctgggaccctcccgattccggggcggattccggacgccgggaccggccattactggtgccgggttgggcttctccagatgccggggctgggtccttcccaaggttgagacaaaaggatgccacggagaaagaaaaaagttaaagaagtctccgaatctcggaacctggagaagaaggatgtggaaactaccagttctgtcagtgtgaagaggaagcgtagacttgaggatgcattcattgtgatatccgatagtgatggagaggaaccaaaggaggaaaatgggttgcagaaaacgaagacaaaacagtcgaatagagcaaagtgtttggccaaaagaaaaatcgcacagatgacagaagaagaacagtttgctctggctctcaaaatgagtgagcaggaagctagggaggtgaacagccaggaggaggaagaagaggagctcttgaggaaagccattgctgaaagcctgaatagttgccggccttctgatgcttccgctaccagatctcgacctctggccactggaccgtcttcccagtcccatcaagagaaaaccacagactctgggctcactgaaggcatatggcagctggtacctccatcactgtttaaaggctcacatatcagtcagggaaacgaggctgaggaaagagaggagccttgggaccacactgaaaaaactgaagaggagccggtctctggcagctcaggaagctgggaccagtcaagccagccagtgtttgagaatgtgaacgttaaatcttttgacagatgtactggccactcggctgagcacacacagtgtgggaagccacaggaaagtactgggaggggttctgcttttctcaaagctgtccagggtagcggggacacatctaggcactgtctacctaccctagcagatgccaaaggtctccaggacactgggggcactgtgaactatttctggggtattccattctgccctgatggagtagaccctaaccagtataccaaggtcattctctgccagttggaggtttatcaaaagagcctgaaaatggctcagaggcagctccttaataaaaaaggttttggggaaccagtgttacctagacctccttctctgatccagaatgaatgtggccaaggagagcaggctagtgagaaaaatgaatgcatctcagaagatatgggagatgaagacaaagaggagaggcaggagtctagggcatctgactggcactcaaaaaccaaggatttccaggaaagctcaattaaaagcttgaaagagaaacttttgttggaggaagaaccaacaaccagtcatggtcagtcttcccaagggattgttgaagaaacttctgaagagggaaactctgtacctgcttcacaaagtgttgctgctttgaccagtaagagaagcttagtccttatgccagagagttctgcagaagaaatcactgtttgtcctgagacccagctaagttcctctgaaacttttgaccttgaaagagaagtctctccaggtagcagagatatcttggatggagtcagaataataatggcagataaggaggttggtaacaaggaagatgctgagaaggaagtagctatttctaccttctcatccagtaaccaggtatcctgcccgctatgtgaccaatgctttccacccacaaagattgaacgacatgccatgtactgcaatggtctgatggaggaagatacagtattgactcggagacaaaaagaggccaagaccaagagtgacagtgggacagctgcccagacttctctagacattgacaagaatgagaagtgttacctctgtaaatccctggtcccatttagagagtatcagtgtcatgtggactcctgtctccagcttgcaaaggctgaccaaggagatggacctgaagggagtggaagagcatgttcaactgtggaggggaagtggcagcagaggctgaagaacccaaaggaaaaaggccacagtgaaggccgactccttagtttcttggaacagtctgagcacaagacttcagatgcagacatcaagtcttcagaaacaggagccttcagggtgccttcaccagggatggaagaggcaggctgcagcagagagatgcagagttctttcacacgtcgtgacttaaatgaatctcccgtcaagtcttttgtttccatttcagaagccacagattgcttagtggactttaaaaagcaagttactgtccagccaggtagtcggacacggaccaaagctggcagaggaagaaggagaaaattctgaatttctagggtccaaaagttgacaaaaccattagtaggaggggtgggccatgttcattaagccatagtggtccctagttcattgttgagcaagttttagccctgcagttttcaccaccagcacctacccagcattctggtttttatgttttttatgatctatgcagacaactgtgtattctgttttataacagtttgtttgaatttacttacagttaaaaaatttaaatatatttatgtttgtacgaaatcttatttcaatagatggaaattttaat

SEQ ID NO: 33480 - DNA, 249 bp, Homo sapiens
  source 1..249: mol_type = unassigned DNA
actctccgggaggggcgcttcccgacgccaagtcttactgttgctcaggctggaatgcagtggtgcgctctcggctcactgcaacctctcccttctgggttcaagcgattctcgtgcctcagcctcccaagtagctgggattacagacaaaaggatgccacggagaaagaaaaaagttaaagaagtctccgaatctcggaacctggagaagaaggatgtggaaactaccagttctgtcagtgtgaagag

SEQ ID NO: 33481 - DNA, 425 bp, Homo sapiens
  source 1..425: mol_type = unassigned DNA
aacgtgtggcggctcgcgacccccggcaacccggagaaggtctacagagcggcctgcgccagcgagttgaagaaaaaaaacaacaacctaggatcagtttggggagaattgatatgtttactatgttgaagcttccaacctgtgggcatgacaaaaggatgccacggagaaagaaaaaagttaaagaagtctccgaatctcggaacctggagaagaaggatgtggaaactaccagttctgtcagtgtgaagaggaagcgtagacttgaggatgcattcattgtgatatccgatagtgatggagaggaaccaaaggaggaaaatgggttgcagaaaacgaagacaaaacagtcgaatagagcaaagtgtttggccaaaagaaaaatcgcacagatgacagaagaagaacagtttgctctggctctc

SEQ ID NO: 33482 - DNA, 619 bp, Homo sapiens
  source 1..619: mol_type = unassigned DNA
gcttattttgctttgctacctctggtacctcagagcgtgtgccgtggattcggaaacctgtcgctgattccgcagcagtgacccccccctcccggagaggctcgtgtggttttggctcatggctctcaccttgctcacgacaaaaggatgccacggagaaagaaaaaagttaaagaagtctccgaatctcggaacctggagaagaaggatgtggaaactaccagttctgtcagtgtgaagaggaagcgtagacttgaggatgcattcattgtgatatccgatagtgatggagaggaaccaaaggaggaaaatgggttgcagaaaacgaagacaaaacagtcgaatagagcaaagtgtttggccaaaagaaaaatcgcacagatgacagaagaagaacagtttgctctggctctcaaaatgagtgagcaggaagctagggaggtgaacagccaggaggaggaagaagaggagctcttgaggaaagccattgctgaaagcctgaatagttgccggccttctgatgcttccgctaccagatctcgacctctggccactggaccgtcttcccagtcccatcaagagaaaaccacagactctgggctcactgaaggcatatggc

SEQ ID NO: 33483 - DNA, 2502 bp, Homo sapiens
  source 1..2502: mol_type = unassigned DNA
cggacgcgcgcgcccctccccctccccccgcgctcccaacgtgtggcggctcgcgacccccggcaacccggagaaggtctacagagcggcctgcgccagcgaacaaaaggatgccacggagaaagaaaaaagttaaagaagtctccgaatctcggaacctggagaagaaggatgtggaaactaccagttctgtcagtgtgaagaggaagcgtagacttgaggatgcattcattgtgatatccgatagtgatggagaggaaccaaaggaggaaaatgggttgcagaaaacgaagacaaaacagtcgaatagagcaaagtgtttggccaaaagaaaaatcgcacagatgacagaagaagaacagtttgctctggctctcaaaatgagtgagcaggaagctagggaggtgaacagccaggaggaggaagaagaggagctcttgaggaaagccattgctgaaagcctgaatagttgccggccttctgatgcttccgctaccagatctcgacctctggccactggaccgtcttcccagtcccatcaagagaaaaccacagactctgggctcactgaaggcatatggcagctggtacctccatcactgtttaaaggctcacatatcagtcagggaaacgaggctgaggaaagagaggagccttgggaccacactgaaaaaactgaagaggagccggtctctggcagctcaggaagctgggaccagtcaagccagccagtgtttgagaatgtgaacgttaaatcttttgacagatgtactggccactcggctgagcacacacagtgtgggaagccacaggaaagtactgggaggggttctgcttttctcaaagctgtccagggtagcggggacacatctaggcactgtctacctaccctagcagatgccaaaggtctccaggacactgggggcactgtgaactatttctggggtattccattctgccctgatggagtagaccctaaccagtataccaaggtcattctctgccagttggaggtttatcaaaagagcctgaaaatggctcagaggcagctccttaataaaaaaggttttggggaaccagtgttacctagacctccttctctgatccagaatgaatgtggccaaggagagcaggctagtgagaaaaatgaatgcatctcagaagatatgggagatgaagacaaagaggagaggcaggagtctagggcatctgactggcactcaaaaaccaaggatttccaggaaagctcaattaaaagcttgaaagagaaacttttgttggaggaagaaccaacaaccagtcatggtcagtcttcccaagggattgttgaagaaacttctgaagagggaaactctgtacctgcttcacaaagtgttgctgctttgaccagtaagagaagcttagtccttatgccagagagttctgcagaagaaatcactgtttgtcctgagacccagctaagttcctctgaaacttttgaccttgaaagagaagtctctccaggtagcagagatatcttggatggagtcagaataataatggcagataaggaggttggtaacaaggaagatgctgagaaggaagtagctatttctaccttctcatccagtaaccaggtatcctgcccgctatgtgaccaatgctttccacccacaaagattgaacgacatgccatgtactgcaatggtctgatggaggaagatacagtattgactcggagacaaaaagaggccaagaccaagagtgacagtgggacagctgcccagacttctctagacattgacaagaatgagaagtgttacctctgtaaatccctggtcccatttagagagtatcagtgtcatgtggactcctgtctccagcttgcaaaggctgaccaaggagatggacctgaagggagtggaagagcatgttcaactgtggaggggaagtggcagcagaggctgaagaacccaaaggaaaaaggccacagtgaaggccgactccttagtttcttggaacagtctgagcacaagacttcagatgcagacatcaagtcttcagaaacaggagccttcagggtgccttcaccagggatggaagaggcaggctgcagcagagagatgcagagttctttcacacgtcgtgacttaaatgaatctcccgtcaagtcttttgtttccatttcagaagccacagattgcttagtggactttaaaaagcaagttactgtccagccaggtagtcggacacggaccaaagctggcagaggaagaaggagaaaattctgaatttctagggtccaaaagttgacaaaaccattagtaggaggggtgggccatgttcattaagccatagtggtccctagttcattgttgagcaagttttagccctgcagttttcaccaccagcacctacccagcattctggtttttatgttttttatgatctatgcagacaactgtgtattctgttttataacagtttgtttgaatttacttacagttaaaaaatttaaatata

SEQ ID NO: 33484 - DNA, 7761 bp, Homo sapiens
  source 1..7761: mol_type = unassigned DNA
cctgtctctccgaccggccacaggtttccgcttgcctctggccgggggtcggcaactgcaggcgtcagtttccctcaagatggcggacgaggaggctggaggtactgagaggatggaaatcagcgcggagttaccccagacccctcagcgtctggcatcttggtgggatcagcaagttgatttttatactgctttcttgcatcatttggcacaattggtgccagaaatttactttgctgaaatggacccagacttggaaaagcaggaggaaagtgtacaaatgtcaatattcactccactggaatggtacttatttggagaagatccagatatttgcttagagaaattgaagcacagtggagcatttcagctttgtgggagggttttcaaaagtggagagacaacctattcttgcagggattgtgcaattgatccaacatgtgtactctgtatggactgcttccaggacagtgttcataaaaatcatcgttacaagatgcatacttctactggaggagggttctgtgactgtggagacacagaggcatggaaaactggccctttttgtgtaaatcatgaacctggaagagcaggtactataaaagagaattcacgctgtccgttgaatgaagaggtaattgtccaagccaggaaaatatttccttcagtgataaaatatgtcgtagaaatgactatatgggaagaggaaaaagaactgcctcctgaactccagataagggagaaaaatgaaagatactattgtgtccttttcaatgatgaacaccattcatatgaccacgtcatatacagcctacaaagagctcttgactgtgagctcgcagaggcccagttgcataccactgccattgacaaagagggtcgtcgggctgttaaagcgggagcttatgctgcttgccaggaagcaaaggaagatataaagagtcattcagaaaatgtctctcaacatccacttcatgtagaagtattacactcagagattatggctcatcagaaatttgctttgcgtcttggttcctggatgaacaaaattatgagctattcaagtgactttaggcagatcttttgccaagcatgccttagagaagaacctgactcggagaatccctgtctcataagcaggttaatgctttgggatgcaaagctttataaaggtgcccgtaagatccttcatgaattgatcttcagcagtttttttatggagatggaatacaaaaaactctttgctatggaatttgtgaagtattataaacaactgcagaaagaatatatcagtgatgatcatgacagaagtatctctataactgcactttcagttcagatgtttactgttcctactctggctcgacatcttattgaagagcagaatgttatctctgtcattactgaaactctgctagaagttttacctgagtacttggacaggaacaataaattcaacttccagggttatagccaggacaaattgggaagagtatatgcagtaatatgtgacctaaagtatatcctgatcagcaaacccacaatatggacagaaagattaagaatgcagttccttgaaggttttcgatcttttttgaagattcttacctgtatgcagggaatggaagaaatccgaagacaggttgggcaacacattgaagtggatcctgattgggaggctgccattgctatacagatgcaattgaagaatattttactcatgttccaagagtggtgtgcttgtgatgaagaactcttacttgtggcttataaagaatgtcacaaagctgtgatgaggtgcagtaccagtttcatatctagtagcaagacagtagtacaatcgtgtggacatagtttggaaacaaagtcctacagagtatctgaggatcttgtaagcatacatctgccactctctaggacccttgctggtcttcatgtacgtttaagcaggctgggtgctgtttcaagactgcatgaatttgtgtcttttgaggactttcaagtagaggtactagtggaatatcctttacgttgtctggtgttggttgcccaggttgttgctgagatgtggcgaagaaatggactgtctcttattagccaggtgttttattaccaagatgttaagtgcagagaagaaatgtatgataaagatatcatcatgcttcagattggtgcatctttaatggatcccaataagttcttgttactggtacttcagaggtatgaacttgccgaggcttttaacaagaccatatctacaaaagaccaggatttgattaaacaatataatacactaatagaagaaatgcttcaggtcctcatctatattgtgggtgagcgttatgtacctggagtgggaaatgtgaccaaagaagaggtcacaatgagagaaatcattcacttgctttgcattgaacccatgccacacagtgccattgccaaaaatttacctgagaatgaaaataatgaaactggcttagagaatgtcataaacaaagtggccacatttaagaaaccaggtgtatcaggccatggagtttatgaactaaaagatgaatcactgaaagacttcaatatgtacttttatcattactccaaaacccagcatagcaaggctgaacatatgcagaagaaaaggagaaaacaagaaaacaaagatgaagcattgccgccaccaccacctcctgaattctgccctgctttcagcaaagtgattaaccttctcaactgtgatatcatgatgtacattctcaggaccgtatttgagcgggcaatagacacagattctaacttgtggaccgaagggatgctccaaatggcttttcatattctggcattgggtttactagaagagaagcaacagcttcaaaaagctcctgaagaagaagtaacatttgacttttatcataaggcttcaagattgggaagttcagccatgaatatacaaatgcttttggaaaaactcaaaggaattccccagttagaaggccagaaggacatgataacgtggatacttcagatgtttgacacagtgaagcgattaagagaaaaatcttgtttaattgtagcaaccacatcaggatcggaatctattaagaatgatgagattactcatgataaagaaaaagcagaacgaaaaagaaaagctgaagctgctaggctacatcgccagaagatcatggctcagatgtctgccttacagaaaaacttcattgaaactcataaactcatgtatgacaatacatcagaaatgcctgggaaagaagattccattatggaggaagagagcaccccagcagtcagtgactactctagaattgctttgggtcctaaacggggtccatctgttactgaaaaggaggtgctgacgtgcatcctttgccaagaagaacaggaggtgaaaatagaaaataatgccatggtattatcggcctgtgtccagaaatctactgccttaacccagcacaggggaaaacccatagaactctcaggagaagccctagacccacttttcatggatccagacttggcatatggaacttatacaggaagctgtggtcatgtaatgcacgcagtgtgctggcagaagtattttgaagctgtacagctgagctctcagcagcgcattcatgttgacctttttgacttggaaagtggagaatatctttgccctctttgcaaatctctgtgcaatactgtgatccccattattcctttgcaacctcaaaagataaacagtgagaatgcagatgctcttgctcaacttttgaccctggcacggtggatacagactgttctggccagaatatcaggttataatataagacatgctaaaggagaaaacccaattcctattttctttaatcaaggaatgggagattctactttggagttccattccatcctgagttttggcgttgagtcttcgattaaatattcaaatagcatcaaggaaatggttattctctttgccacaacaatttatagaattggattgaaagtgccacctgatgaaagggatcctcgagtccccatgctgacctggagcacctgcgctttcactatccaggcaattgaaaatctattgggagatgaaggaaaacctctgtttggagcacttcaaaataggcagcataatggtctgaaagcattaatgcagtttgcagttgcacagaggattacctgtcctcaggtcctgatacagaaacatctggttcgtcttctatcagttgttcttcctaacataaaatcagaagatacaccatgccttctgtctatagatctgtttcatgttttggtgggtgctgtgttagcattcccatccttgtattgggatgaccctgttgatctgcagccttcttcagttagttcttcctataaccacctttatctcttccatttgatcaccatggcacacatgcttcagatactacttacagtagacacaggcctaccccttgctcaggttcaagaagacagtgaagaggctcattccgcatcttctttctttgcagaaatttctcaatatacaagtggctccattgggtgtgatattcctggctggtatttgtgggtctcactgaagaatggcatcaccccttatcttcgctgtgctgcattgtttttccactatttacttggggtaactccgcctgaggaactgcataccaattctgcagaaggagagtacagtgcactctgtagctatctatctttacctacaaatttgttcctgctcttccaggaatattgggatactgtaaggcccttgctccagaggtggtgtgcagatcctgccttactaaactgtttgaagcaaaaaaacaccgtggtcaggtaccctagaaaaagaaatagtttgatagagcttcctgatgactatagctgcctcctgaatcaagcttctcatttcaggtgcccacggtctgcagatgatgagcgaaagcatcctgtcctctgccttttctgtggggctatactatgttctcagaacatttgctgccaggaaattgtgaacggggaagaggttggagcttgcatttttcacgcacttcactgtggagccggagtctgcattttcctaaaaatcagagaatgccgagtggtcctggttgaaggtaaagccagaggctgtgcctatccagctccttacttggatgaatatggagaaacagaccctggcctgaagaggggcaacccccttcatttatctcgtgagcggtatcggaagctccatttggtctggcaacaacactgcattatagaagagattgctaggagccaagagactaatcagatgttatttggattcaactggcagttactgtgagctccaactctgcctcaagacaatcacaaatgacgacagtagtaaaggctgattcaaaattatggaaaactttctgagggctgggaaagtattggagggtcttttgctccatgtccaggttcacttacatcaataaaatatttcttaatggagtattgctttcaattagcaaacatatgcttcacaggaaaaaaggacatagatcaatctgttttatgtgctagtatttccaggaatttattccccttcataatttgtctcatttcattttatttcatccacttggtagatgaagtcacgtcaaacagttgtagacattttatatgttggttaactcttctgcaattttgtatttggtgttttccccccaagtttagttcaactgacattggatcactgacaaaattctaataatctgtgatagtcttccttgcagttaaagaagaattgcagaaaccatgcaatatacttgggaaagattccaaaaataaattttttattatttctcttttaaggaaatacccctaatgtgccacctgctgctatcaccacaaattaaactcaatctctatgtggacagaggatgatttctgccaatatggaaaagcttttttctcactgtaggcctcaagaaaagttagggtaatgtatttgttattcattcctgacggtacaaagagcttgcagttctcacctctgactaccagtagctttgttgagttttgaaataatacttgacattttccaaaggcaaatctcattctgcaaggagattgtggcaccatcctgtttgactctcagaaacctcttgtaattctgatgtaaaaactgtagaatgaagatgagaaaattctcgcaatgagtggatcatgacaactgtaaattagaacaatcagatttaaaccaattccgcagtcttctatatctttgtaaaagacaaatccttgatgttgtctgtgtgcaaccttttcataaactctggttttatgactagtacaaaccaccaaaaaagccatgtgatcaatagtctgtgtcctgttataacatgctgtggttgagccatcttgtttataaataatagagctctcctgaatttgtgcatagacttcttggttcctggcttttgttttttgtatcaagagattgtgatataaaacagcagaagataaatggaaaccttccattttaacttacgttgtttctggggtaatgttagaaccttgaaagatgcattcaaagactgtatcttattttgcccttggctattagtgtctcacatatgtgtgtaaatgttttcctaccttctttttgctcagcaaaggcaagcaagtaaaatatatttgctaagtgattagtgatgcacatttggggctagatttttttggtacttttatgtaaagaaaagtggattttgcagtaagggattggcatgagcaggcgtcagaatcacaatcatgattttctacttgaataattacaattcagaaggtatctggataaatagatacatgtctagtgaacaatttgtaacaataacaggtaaggatcaggaaattcagtattcagtttgtcagatttgccagaatgatgaaagtatttgaacatgtgtgtttgtttcttatataattgtattgagtggattgtttgactgggaaatctgggctagaataggaaacagaagatactgacttctaccctaatagatgggccccaatttagcaaagataaactgactttatttttagtcctttttatattaacttaataaattctggagttaggctctcaagaggacagagggactgtctggcaatggccagccagacctttactgccaaagaacccatttcatattgcgttccactgattgagattgattcagatttttgcactgtagatgagcgtatgtctcagtgctgccccaagccccagggatttctcattatgttcaaatgtcctagtgatttaccttaatcattgcaaacaattatgcttatgaagtttacttacaaacaagcaactgagtcactttattttctttagtgtagtatgtgaaggcactggttcaacaggatggctccagaactgtgtttttctaatgtttggtaaggggctagtgagaattttaatgatatggtgaagaaaaatatatctgtataattaatttattatattggtgtatgggctgtgagttcaccttttagtggtcatttgtcatttcataacaactatgcattttggttcactgtgatgatgatctatatttagtgactgcaacatgtttataccactgattcaaattccatccatgatgaagttatacaaataatgcatatattgataacttttattgcaaaaatgtaaatttaaaacttgtataatgttcttgtgctttttaaaataaaatatatgtgtatatttaaaaagaaaaa

SEQ ID NO: 33485 - DNA, 7684 bp, Homo sapiens
  source 1..7684: mol_type = unassigned DNA
ccggccacaggtttccgcttgcctctggccgggggtcggcaactgcaggcgtcagtttccctcaagatggcggacgaggaggctggaggtactgagaggatggaaatcagcgcggagttaccccagacccctcagcgtctggcatcttggtgggatcagcaagttgatttttatactgctttcttgcatcatttggcacaattggtgccagaaatttactttgctgaaatggacccagacttggaaaagcaggaggaaagtgtacaaatgtcaatattcactccactggaatggtacttatttggagaagatccagatatttgcttagagaaattgaagcacagtggagcatttcagctttgtgggagggttttcaaaagtggagagacaacctattcttgcagggattgtgcaattgatccaacatgtgtactctgtatggactgcttccaggacagtgttcataaaaatcatcgttacaagatgcatacttctactggaggagggttctgtgactgtggagacacagaggcatggaaaactggccctttttgtgtaaatcatgaacctggaagagcaggtactataaaagagaattcacgctgtccgttgaatgaagaggtaattgtccaagccaggaaaatatttccttcagtgataaaatatgtcgtagaaatgactatatgggaagaggaaaaagaactgcctcctgaactccagataagggagaaaaatgaaagatactattgtgtccttttcaatgatgaacaccattcatatgaccacgtcatatacagcctacaaagagctcttgactgtgagctcgcagaggcccagttgcataccactgccattgacaaagagggtcgtcgggctgttaaagcgggagcttatgctgcttgccaggaagcaaaggaagatataaagagtcattcagaaaatgtctctcaacatccacttcatgtagaagtattacactcagagattatggctcatcagaaatttgctttgcgtcttggttcctggatgaacaaaattatgagctattcaagtgactttaggcagatcttttgccaagcatgccttagagaagaacctgactcggagaatccctgtctcataagcaggttaatgctttgggatgcaaagctttataaaggtgcccgtaagatccttcatgaattgatcttcagcagtttttttatggagatggaatacaaaaaactctttgctatggaatttgtgaagtattataaacaactgcagaaagaatatatcagtgatgatcatgacagaagtatctctataactgcactttcagttcagatgtttactgttcctactctggctcgacatcttattgaagagcagaatgttatctctgtcattactgaaactctgctagaagttttacctgagtacttggacaggaacaataaattcaacttccagggttatagccaggacaaattgggaagagtatatgcagtaatatgtgacctaaagtatatcctgatcagcaaacccacaatatggacagaaagattaagaatgcagttccttgaaggttttcgatcttttttgaagattcttacctgtatgcagggaatggaagaaatccgaagacaggttgggcaacacattgaagtggatcctgattgggaggctgccattgctatacagatgcaattgaagaatattttactcatgttccaagagtggtgtgcttgtgatgaagaactcttacttgtggcttataaagaatgtcacaaagctgtgatgaggtgcagtaccagtttcatatctagtagcaagacagtagtacaatcgtgtggacatagtttggaaacaaagtcctacagagtatctgaggatcttgtaagcatacatctgccactctctaggacccttgctggtcttcatgtacgtttaagcaggctgggtgctgtttcaagactgcatgaatttgtgtcttttgaggactttcaagtagaggtactagtggaatatcctttacgttgtctggtgttggttgcccaggttgttgctgagatgtggcgaagaaatggactgtctcttattagccaggtgttttattaccaagatgttaagtgcagagaagaaatgtatgataaagatatcatcatgcttcagattggtgcatctttaatggatcccaataagttcttgttactggtacttcagaggtatgaacttgccgaggcttttaacaagaccatatctacaaaagaccaggatttgattaaacaatataatacactaatagaagaaatgcttcaggtcctcatctatattgtgggtgagcgttatgtacctggagtgggaaatgtgaccaaagaagaggtcacaatgagagaaatcattcacttgctttgcattgaacccatgccacacagtgccattgccaaaaatttacctgagaatgaaaccaggtgtatcaggccatggagtttatgaactaaaagatgaatcactgaaagacttcaatatgtacttttatcattactccaaaacccagcatagcaaggctgaacatatgcagaagaaaaggagaaaacaagaaaacaaagatgaagcattgccgccaccaccacctcctgaattctgccctgctttcagcaaagtgattaaccttctcaactgtgatatcatgatgtacattctcaggaccgtatttgagcgggcaatagacacagattctaacttgtggaccgaagggatgctccaaatggcttttcatattctggcattgggtttactagaagagaagcaacagcttcaaaaagctcctgaagaagaagtaacatttgacttttatcataaggcttcaagattgggaagttcagccatgaatatacaaatgcttttggaaaaactcaaaggaattccccagttagaaggccagaaggacatgataacgtggatacttcagatgtttgacacagtgaagcgattaagagaaaaatcttgtttaattgtagcaaccacatcaggatcggaatctattaagaatgatgagattactcatgataaagaaaaagcagaacgaaaaagaaaagctgaagctgctaggctacatcgccagaagatcatggctcagatgtctgccttacagaaaaacttcattgaaactcataaactcatgtatgacaatacatcagaaatgcctgggaaagaagattccattatggaggaagagagcaccccagcagtcagtgactactctagaattgctttgggtcctaaacggggtccatctgttactgaaaaggaggtgctgacgtgcatcctttgccaagaagaacaggaggtgaaaatagaaaataatgccatggtattatcggcctgtgtccagaaatctactgccttaacccagcacaggggaaaacccatagaactctcaggagaagccctagacccacttttcatggatccagacttggcatatggaacttatacaggaagctgtggtcatgtaatgcacgcagtgtgctggcagaagtattttgaagctgtacagctgagctctcagcagcgcattcatgttgacctttttgacttggaaagtggagaatatctttgccctctttgcaaatctctgtgcaatactgtgatccccattattcctttgcaacctcaaaagataaacagtgagaatgcagatgctcttgctcaacttttgaccctggcacggtggatacagactgttctggccagaatatcaggttataatataagacatgctaaaggagaaaacccaattcctattttctttaatcaaggaatgggagattctactttggagttccattccatcctgagttttggcgttgagtcttcgattaaatattcaaatagcatcaaggaaatggttattctctttgccacaacaatttatagaattggattgaaagtgccacctgatgaaagggatcctcgagtccccatgctgacctggagcacctgcgctttcactatccaggcaattgaaaatctattgggagatgaaggaaaacctctgtttggagcacttcaaaataggcagcataatggtctgaaagcattaatgcagtttgcagttgcacagaggattacctgtcctcaggtcctgatacagaaacatctggttcgtcttctatcagttgttcttcctaacataaaatcagaagatacaccatgccttctgtctatagatctgtttcatgttttggtgggtgctgtgttagcattcccatccttgtattgggatgaccctgttgatctgcagccttcttcagttagttcttcctataaccacctttatctcttccatttgatcaccatggcacacatgcttcagatactacttacagtagacacaggcctaccccttgctcaggttcaagaagacagtgaagaggctcattccgcatcttctttctttgcagaaatttctcaatatacaagtggctccattgggtgtgatattcctggctggtatttgtgggtctcactgaagaatggcatcaccccttatcttcgctgtgctgcattgtttttccactatttacttggggtaactccgcctgaggaactgcataccaattctgcagaaggagagtacagtgcactctgtagctatctatctttacctacaaatttgttcctgctcttccaggaatattgggatactgtaaggcccttgctccagaggtggtgtgcagatcctgccttactaaactgtttgaagcaaaaaaacaccgtggtcaggtaccctagaaaaagaaatagtttgatagagcttcctgatgactatagctgcctcctgaatcaagcttctcatttcaggtgcccacggtctgcagatgatgagcgaaagcatcctgtcctctgccttttctgtggggctatactatgttctcagaacatttgctgccaggaaattgtgaacggggaagaggttggagcttgcatttttcacgcacttcactgtggagccggagtctgcattttcctaaaaatcagagaatgccgagtggtcctggttgaaggtaaagccagaggctgtgcctatccagctccttacttggatgaatatggagaaacagaccctggcctgaagaggggcaacccccttcatttatctcgtgagcggtatcggaagctccatttggtctggcaacaacactgcattatagaagagattgctaggagccaagagactaatcagatgttatttggattcaactggcagttactgtgagctccaactctgcctcaagacaatcacaaatgacgacagtagtaaaggctgattcaaaattatggaaaactttctgagggctgggaaagtattggagggtcttttgctccatgtccaggttcacttacatcaataaaatatttcttaatggagtattgctttcaattagcaaacatatgcttcacaggaaaaaaggacatagatcaatctgttttatgtgctagtatttccaggaatttattccccttcataatttgtctcatttcattttatttcatccacttggtagatgaagtcacgtcaaacagttgtagacattttatatgttggttaactcttctgcaattttgtatttggtgttttccccccaagtttagttcaactgacattggatcactgacaaaattctaataatctgtgatagtcttccttgcagttaaagaagaattgcagaaaccatgcaatatacttgggaaagattccaaaaataaattttttattatttctcttttaaggaaatacccctaatgtgccacctgctgctatcaccacaaattaaactcaatctctatgtggacagaggatgatttctgccaatatggaaaagcttttttctcactgtaggcctcaagaaaagttagggtaatgtatttgttattcattcctgacggtacaaagagcttgcagttctcacctctgactaccagtagctttgttgagttttgaaataatacttgacattttccaaaggcaaatctcattctgcaaggagattgtggcaccatcctgtttgactctcagaaacctcttgtaattctgatgtaaaaactgtagaatgaagatgagaaaattctcgcaatgagtggatcatgacaactgtaaattagaacaatcagatttaaaccaattccgcagtcttctatatctttgtaaaagacaaatccttgatgttgtctgtgtgcaaccttttcataaactctggttttatgactagtacaaaccaccaaaaaagccatgtgatcaatagtctgtgtcctgttataacatgctgtggttgagccatcttgtttataaataatagagctctcctgaatttgtgcatagacttcttggttcctggcttttgttttttgtatcaagagattgtgatataaaacagcagaagataaatggaaaccttccattttaacttacgttgtttctggggtaatgttagaaccttgaaagatgcattcaaagactgtatcttattttgcccttggctattagtgtctcacatatgtgtgtaaatgttttcctaccttctttttgctcagcaaaggcaagcaagtaaaatatatttgctaagtgattagtgatgcacatttggggctagatttttttggtacttttatgtaaagaaaagtggattttgcagtaagggattggcatgagcaggcgtcagaatcacaatcatgattttctacttgaataattacaattcagaaggtatctggataaatagatacatgtctagtgaacaatttgtaacaataacaggtaaggatcaggaaattcagtattcagtttgtcagatttgccagaatgatgaaagtatttgaacatgtgtgtttgtttcttatataattgtattgagtggattgtttgactgggaaatctgggctagaataggaaacagaagatactgacttctaccctaatagatgggccccaatttagcaaagataaactgactttatttttagtcctttttatattaacttaataaattctggagttaggctctcaagaggacagagggactgtctggcaatggccagccagacctttactgccaaagaacccatttcatattgcgttccactgattgagattgattcagatttttgcactgtagatgagcgtatgtctcagtgctgccccaagccccagggatttctcattatgttcaaatgtcctagtgatttaccttaatcattgcaaacaattatgcttatgaagtttacttacaaacaagcaactgagtcactttattttctttagtgtagtatgtgaaggcactggttcaacaggatggctccagaactgtgtttttctaatgtttggtaaggggctagtgagaattttaatgatatggtgaagaaaaatatatctgtataattaatttattatattggtgtatgggctgtgagttcaccttttagtggtcatttgtcatttcataacaactatgcattttggttcactgtgatgatgatctatatttagtgactgcaacatgtttataccactgattcaaattccatccatgatgaagttatacaaataatgcatatattgataacttttattgcaaaaatgtaaatttaaaacttgtataatgttcttgtgctttttaaaataaaatatatgtgtatattt

SEQ ID NO: 33486 - DNA, 3105 bp, Homo sapiens
  source 1..3105: mol_type = unassigned DNA
ccggccacaggtttccgcttgcctctggccgggggtcggcaactgcaggcgtcagtttccctcaagatggcggacgaggaggctggaggtactgagaggatggaaatcagcgcggagttaccccagacccctcagcgtctggcatcttggtgggatcagcaagttgatttttatactgctttcttgcatcatttggcacaattggtgccagaaatttactttgctgaaatggacccagacttggaaaagcaggaggaaagtgtacaaatgtcaatattcactccactggaatggtacttatttggagaagatccagatatttgcttagagaaattgaagcacagtggagcatttcagctttgtgggagggttttcaaaagtggagagacaacctattcttgcagggattgtgcaattgatccaacatgtgtactctgtatggactgcttccaggacagtgttcataaaaatcatcgttacaagatgcatacttctactggaggagggttctgtgactgtggagacacagaggcatggaaaactggccctttttgtgtaaatcatgaacctggaagagcaggtactataaaagagaattcacgctgtccgttgaatgaagaggtaattgtccaagccaggaaaatatttccttcagtgataaaatatgtcgtagaaatgactatatgggaagaggaaaaagaactgcctcctgaactccagataagggagaaaaatgaaagatactattgtgtccttttcaatgatgaacaccattcatatgaccacgtcatatacagcctacaaagagctcttgactgtgagctcgcagaggcccagttgcataccactgccattgacaaagagggtcgtcgggctgttaaagcgggagcttatgctgcttgccaggaagcaaaggaagatataaagagtcattcagaaaatgtctctcaacatccacttcatgtagaagtattacactcagagattatggctcatcagaaatttgctttgcgtcttggttcctggatgaacaaaattatgagctattcaagtgactttaggcagatcttttgccaagcatgccttagagaagaacctgactcggagaatccctgtctcataagcaggttaatgctttgggatgcaaagctttataaaggtgcccgtaagatccttcatgaattgatcttcagcagtttttttatggagatggaatacaaaaaactctttgctatggaatttgtgaagtattataaacaactgcagaaagaatatatcagtgatgatcatgacagaagtatctctataactgcactttcagttcagatgtttactgttcctactctggctcgacatcttattgaagagcagaatgttatctctgtcattactgaaactctgctagaagttttacctgagtacttggacaggaacaataaattcaacttccagggttatagccaggacaaattgggaagagtatatgcagtaatatgtgacctaaagtatatcctgatcagcaaacccacaatatggacagaaagattaagaatgcagttccttgaaggttttcgatcttttttgaagattcttacctgtatgcagggaatggaagaaatccgaagacaggttgggcaacacattgaagtggatcctgattgggaggctgccattgctatacagatgcaattgaagaatattttactcatgttccaagagtggtgtgcttgtgatgaagaactcttacttgtggcttataaagaatgtcacaaagctgtgatgaggtgcagtaccagtttcatatctagtagcaagacagtagtacaatcgtgtggacatagtttggaaacaaagtcctacagagtatctgaggatcttgtaagcatacatctgccactctctaggacccttgctggtcttcatgtacgtttaagcaggctgggtgctgtttcaagactgcatgaatttgtgtcttttgaggactttcaagtagaggtactagtggaatatcctttacgttgtctggtgttggttgcccaggttgttgctgagatgtggcgaagaaatggactgtctcttattagccaggtgttttattaccaagatgttaagtgcagagaagaaatgtatgataaagatatcatcatgcttcagattggtgcatctttaatggatcccaataagttcttgttactggtacttcagaggtatgaacttgccgaggcttttaacaagaccatatctacaaaagaccaggatttgattaaacaatataatacactaatagaagaaatgcttcaggtcctcatctatattgtgggtgagcgttatgtacctggagtgggaaatgtgaccaaagaagaggtcacaatgagagaaatcattcacttgctttgcattgaacccatgccacacagtgccattgccaaaaatttacctgagaatgaaaataatgaaactggcttagagaatgtcataaacaaagtggccacatttaagaaaccaggtgtatcaggccatggagtttatgaactaaaagatgaatcactgaaagacttcaatatgtacttttatcattactccaaaacccagcatagcaaggctgaacatatgcagaagaaaaggagaaaacaagaaaacaaagatgaagcattgccgccaccaccacctcctgaattctgccctgctttcagcaaagtgattaaccttctcaactgtgatatcatgatgtacattctcaggaccgtatttgagcgggcaatagacacagattctaacttgtggaccgaagggatgctccaaatggcttttcatattctggcattgggtttactagaagagaagcaacagcttcaaaaagctcctgaagaagaagtaacatttgacttttatcataaggcttcaagattgggaagttcagccatgaatatacaaatgcttttggaaaaactcaaaggaattccccagttagaaggccagaaggacatgataacgtggatacttcagatgtttgacacagtgaagcgattaagagaaaaatcttgtttaattgtagcaaccacatcaggatcggaatctattaagaatgatgagattctacatcat

SEQ ID NO: 33487 - DNA, 4208 bp, Homo sapiens
  source 1..4208: mol_type = unassigned DNA
attccagttattgttctcatagcagtgttatcttcttgacttcctccagcactgacttttcattataatccttaaacatttggtcattgtggattagagaactatgagcgtttgcagagtgattatgtgacagatgaccacgacagagagttttcagtcgcagacctctcggttcagatattcacggttccttcacttgctcgaatgctcatcacagaagaaaacttaatgagcattatcattaagacttttatggatcatttgagacatcgagatgcccagggcagatttcagtttgaacgatacactgctttacaagccttcaaatttaggagagtacagagccttattttagatctcaagtatgtgttaattagcaaaccaactgaatggtcagatgagctgaggcagaagttcctagaagggtttgatgcctttttggaattactaaaatgtatgcaggaaacatccctatatacaaaacagaatctagaagtagaaacgaacagggaatggatccaattacacgtcaagtaggacaacatattgaaatggaaccagagtgggaagcagccttcacactacaaatgaaattaacacatgtcatttcaatgatgcaggactggtgtgcttcagatgaaaaagtgttaatcgaagcttacaagaaatgtctcgctgtactgatgcagtgtcatggtggttatactgatggtgaacagccaatcacactaagcatttgtggacattcagtggaaactatcagatactgtgtttcccaagaaaaagttagcattcacctcccagtttctcgcttacttgcaggtttacatgtattattaagcaaaagtgaagtggcatataaatttccagagctcctacctctaagtgaacttagcccacccatgttgatagaacaccctcttagatgtcttgttctgtgtgcccaagtacatgccggaatgtggagaagaaatgggttctctctagtaaaccagatttattactaccataatgtgaaatgcagacgtgagatgtttgacaaggatgtagtaatgcttcagacaggtgtctccatgatggatccaaatcatttcctgatgatcatgctcagccgctttgaactttatcagattttcagtactccagactatggaaaaagatttagttctgagattacccataaggatgttgttcagcagaacaatactctaatagaagaaatgctatacctcattataatgcttgttggagagagatttagtcctggagttggacaggtaaatgctacagatgaaatcaagcgagagattatccatcagttgagtatcaagcctatggctcatagtgaattggtaaagtctttacctgaagatgagaacaaggagactggcatggagagtgtaatcgaagcagttgcccatttcaagaaacctggattaacaggacgaggcatgtatgaactgaaaccagaatgtgccaaagagttcaacttgtatttctatcacttttcaagggcagaacagtccaaggcagaagaagcgcaacggaaattgaaaagacaaaatagagaagatacagcactcccacctccggtgttgcctccattctgccctctgtttgcaagcctggttaacattttgcagtcagatgtcatgttgtgcatcatgggaacaattctgcaatgggctgtggaacataatggatatgcctggtcagagtccatgctgcaaagggtgttacatttaattggcatggcactacaagaagaaaaacaacatttagagaatgtcacggaagagcatgtagtaacatttaccttcactcagaagatatcaaaacctggtgaagcgccaaaaaattctcctagcatactagctatgctggaaacactacaaaatgctccctacctagaagtccacaaagacatgattcggtggatattgaagacttttaatgctgttaaaaagatgagggagagttcacctaccagtcccgtggcagagacagaaggaaccataatggaagagcataatttcagagttcaagggacaaagacaaagctgagaggaagagaaaagcagagattgccagactgcgcagagaaaagatcatggctcagatgtctgaaatgcagcggcattttattgatgaaaacaaagaactctttcagcagacattagaactggatgcctcaacctctgctgttcttgatcatagccctgtggcttcagatatgacacttacagcactgggccccgcacaaactcaggttcctgaacaaagacaattcgttacatgtatattgtgtcaagaggagcaagaagttaaagtggaaagcagggcaatggtcttggcagcatttgttcagagatcaactgtattatcaaaaaacagaagtaaatttattcaagatccagaaaaatatgatccattattcatgcaccctgatctgtcttgtggaacacacactagtagctgtgggcacattatgcatgcccattgttggcaaaggtattttgattccgttcaagctaaagaacagcgaaggcaacagagattacgcttacatacgagctatgatgtagaaaacggagaattcctttgccccctttgtgaatgcttgagtaatactgttattcctctgctgcttcctccaagaaatatttttaacaacaggttaaatttttcagaccaaccaaatctgactcagtggattagaacaatatctcagcaaataaaagcattacagtttcttaggaaagaagaaagtactcctaataatgcctctacaaagaattcagaaaatgtggatgaattacagctccctgaagggttcaggcctgattttcgtcctaagatcccttattctgagagcataaaagaaatgctaacgacatttggaactgctacctacaaggtgggactaaaggttcatcccaatgaagaggatcctcgtgttcccataatgtgttggggtagctgcgcgtacaccatccaaagcatagaaagaattttgagtgatgaagataaaccattgtttggtcctttaccttgcagactggatgactgtcttaggtcattgacgagatttgccgcagcacactggacagtggcatcagtttcagtggtgcaaggacatttttgtaaactttttgcatcactggtgcctaatgacagccatgaggaacttccatgcatattagatattgacatgtttcatttattgaagagaatggcatggatcaagaaaatcccccttgtgaagaagaatcagcagttcttgctttgtataaaacacttcaccagtatacgggaagtgccttgaaagaaataccatccggctggcatctgtggaggagtgtcagagctggaatcatgcctttcctgaagtgttctgctttattttttcattacttaaatggagttccttccccacccgacattcaagttcctggaacaagccattttgaacatttatgtagctatctttccctaccaaacaacctcatttgcctttttcaagaaaatagtgagataatgaattcactgattgaaagttggtgccgtaacagtgaagttaaaagatatctagaaggtgaaagagatgctataagatatccaagagaatctaacaaattaataaaccttccagaggattacagcagcctcattaatcaagcatccaatttctcgtgcccgaaatcaggtggtgataagagcagagccccaactctgtgccttgtgtgcggatctctgctgtgctcccagagttactgctgccagactgaactggaaggggaggatgtaggagcctgcacagctcacacctactcctgtggctctggagtgggcatcttcctgagagtacgggaatgtcaggtgctatttttagctggcaaaaccaaaggctgtttttattctcctccttaccttgatgactatggggagaccgaccagggactcagacggggaaatcctttacatttatgcaaagagcgattcaagaagattcagaagctctggcaccaacacagtgtcacagaggaaattggacatgcacaggaagccaatcagacactggttggcattgactggcaacatttataattattgcaccaccaaaaaacacaaacttggatttttttaacccagttggctttttaagaaagaaagaagttctgctgaatttggaaataaattctttattt

SEQ ID NO: 33488 - DNA, 7857 bp, Homo sapiens
  source 1..7857: mol_type = unassigned DNA
ttctgtgtccttccctgggtcagggacgagccagtgacttgactcttgggcgctaagcttgggagggagcgcaggaggccgctgtccttcctttccggttcacgtcacccttctctccctctgttgctccacctgcagccacttggacggctccgggactgattgcctggggcaggggtggcagtcgaggccgccggggccgaggtgaggctgcagctctccgggcggcggtagcgctggggaggaggaggagagaagatggcgtcggagctagagccagaggtgcaggccatcgaccggagcttgctggaatgttcggccgaggagattgcggggaaatggctgcaagcaactgacctcactagagaagtgtaccagcatttagcccactatgtacccaaaatctactgcaggggtcccaacccttttccacagaaagaagacatgctggcacagcatgttttgttgggaccaatggaatggtacctttgtggtgaagatcctgcatttggatttccaaaacttgagcaagcaaacaaaccttctcatctttgtggtcgtgtttttaaagtaggagagcctacatattcttgcagagactgtgcagttgatccaacttgtgttttgtgcatggagtgctttttgggaagtattcacagagatcatcgatataggatgacaacatcaggaggtggaggtttctgtgactgtggtgatactgaagcctggaaagagggtccttactgtcaaaaacatgaacttaacacctctgaaattgaggaagaagaggatcctcttgttcatttatcagaagatgtgatagcaagaacttataacatttttgctattacgtttcggtatgcagtagaaatattaacctgggaaaaagaaagtgaattgccagcagatttagagatggtagagaagagtgacacctactattgcatgctgtttaatgatgaggttcacacctatgaacaagttatttatactcttcagaaagctgttaactgtacacaaaaagaagctattggttttgcaactacagtagatcgagatgggcgtaggtctgttcgatatggagattttcagtattgtgagcaagcaaaatcagtaattgtgagaaataccagtagacagacaaagccactcaaagttcaagttatgcattcgtctattgtcgcacatcagaattttggtttgaaacttttgtcttggctgggaagtattattggatattcagatggccttcgccggattttatgtcaagttggtttacaagaagggccagatggtgaaaactcttctctagtggacagactgatgcttagtgattccaaattatggaaaggtgctaggagtgtatatcatcagttgttcatgagcagtctgcttatggatttgaaatacaagaaactatttgctgttcgatttgcaaaaaattaccagcagttgcagagagattttatggaggatgatcacgagcgagcagtgtcggtgactgctctatctgtccagttcttcaccgcacctactctggctcgaatgctcatcacagaagaaaacttaatgagcattatcattaagacttttatggatcatttgagacatcgagatgcccagggcagatttcagtttgaacgatacactgctttacaagccttcaaatttaggagagtacagagccttattttagatctcaagtatgtgttaattagcaaaccaactgaatggtcagatgagctgaggcagaagttcctagaagggtttgatgcctttttggaattactaaaatgtatgcagggaatggatccaattacacgtcaagtaggacaacatattgaaatggaaccagagtgggaagcagccttcacactacaaatgaaattaacacatgtcatttcaatgatgcaggactggtgtgcttcagatgaaaaagtgttaatcgaagcttacaagaaatgtctcgctgtactgatgcagtgtcatggtggttatactgatggtgaacagccaatcacactaagcatttgtggacattcagtggaaactatcagatactgtgtttcccaagaaaaagttagcattcacctcccagtttctcgcttacttgcaggtttacatgtattattaagcaaaagtgaagtggcatataaatttccagagctcctacctctaagtgaacttagcccacccatgttgatagaacaccctcttagatgtcttgttctgtgtgcccaagtacatgccggaatgtggagaagaaatgggttctctctagtaaaccagatttattactaccataatgtgaaatgcagacgtgagatgtttgacaaggatgtagtaatgcttcagacaggtgtctccatgatggatccaaatcatttcctgatgatcatgctcagccgctttgaactttatcagattttcagtactccagactatggaaaaagatttagttctgagattacccataaggatgttgttcagcagaacaatactctaatagaagaaatgctatacctcattataatgcttgttggagagagatttagtcctggagttggacaggtaaatgctacagatgaaatcaagcgagagattatccatcagttgagtatcaagcctatggctcatagtgaattggtaaagtctttacctgaagatgagaacaaggagactggcatggagagtgtaatcgaagcagttgcccatttcaagaaacctggattaacaggacgaggcatgtatgaactgaaaccagaatgtgccaaagagttcaacttgtatttctatcacttttcaagggcagaacagtccaaggcagaagaagcgcaacggaaattgaaaagacaaaatagagaagatacagcactcccacctccggtgttgcctccattctgccctctgtttgcaagcctggttaacattttgcagtcagatgtcatgttgtgcatcatgggaacaattctgcaatgggctgtggaacataatggatatgcctggtcagagtccatgctgcaaagggtgttacatttaattggcatggcactacaagaagaaaaacaacatttagagaatgtcacggaagagcatgtagtaacatttaccttcactcagaagatatcaaaacctggtgaagcgccaaaaaattctcctagcatactagctatgctggaaacactacaaaatgctccctacctagaagtccacaaagacatgattcggtggatattgaagacttttaatgctgttaaaaagatgagggagagttcacctaccagtcccgtggcagagacagaaggaaccataatggaagagagttcaagggacaaagacaaagctgagaggaagagaaaagcagagattgccagactgcgcagagaaaagatcatggctcagatgtctgaaatgcagcggcattttattgatgaaaacaaagaactctttcagcagacattagaactggatgcctcaacctctgctgttcttgatcatagccctgtggcttcagatatgacacttacagcactgggccccgcacaaactcaggttcctgaacaaagacaattcgttacatgtatattgtgtcaagaggagcaagaagttaaagtggaaagcagggcaatggtcttggcagcatttgttcagagatcaactgtattatcaaaaaacagaagtaaatttattcaagatccagaaaaatatgatccattattcatgcaccctgatctgtcttgtggaacacacactagtagctgtgggcacattatgcatgcccattgttggcaaaggtattttgattccgttcaagctaaagaacagcgaaggcaacagagattacgcttacatacgagctatgatgtagaaaacggagaattcctttgccccctttgtgaatgcttgagtaatactgttattcctctgctgcttcctccaagaaatatttttaacaacaggttaaatttttcagaccaaccaaatctgactcagtggattagaacaatatctcagcaaataaaagcattacagtttcttaggaaagaagaaagtactcctaataatgcctctacaaagaattcagaaaatgtggatgaattacagctccctgaagggttcaggcctgattttcgtcctaagatcccttattctgagagcataaaagaaatgctaacgacatttggaactgctacctacaaggtgggactaaaggttcatcccaatgaagaggatcctcgtgttcccataatgtgttggggtagctgcgcgtacaccatccaaagcatagaaagaattttgagtgatgaagataaaccattgtttggtcctttaccttgcagactggatgactgtcttaggtcattgacgagatttgccgcagcacactggacagtggcatcagtttcagtggtgcaaggacatttttgtaaactttttgcatcactggtgcctaatgacagccatgaggaacttccatgcatattagatattgacatgtttcatttattggtgggcttggtgcttgcatttcctgcgttgcagtgtcaggatttttcagggatcagccttggcactggagaccttcacattttccatctggttactatggcacacatcatacagatcttacttacctcatgtacagaagagaatggcatggatcaagaaaatcccccttgtgaagaagaatcagcagttcttgctttgtataaaacacttcaccagtatacgggaagtgccttgaaagaaataccatccggctggcatctgtggaggagtgtcagagctggaatcatgcctttcctgaagtgttctgctttattttttcattacttaaatggagttccttccccacccgacattcaagttcctggaacaagccattttgaacatttatgtagctatctttccctaccaaacaacctcatttgcctttttcaagaaaatagtgagataatgaattcactgattgaaagttggtgccgtaacagtgaagttaaaagatatctagaaggtgaaagagatgctataagatatccaagagaatctaacaaattaataaaccttccagaggattacagcagcctcattaatcaagcatccaatttctcgtgcccgaaatcaggtggtgataagagcagagccccaactctgtgccttgtgtgcggatctctgctgtgctcccagagttactgctgccagactgaactggaaggggaggatgtaggagcctgcacagctcacacctactcctgtggctctggagtgggcatcttcctgagagtacgggaatgtcaggtgctatttttagctggcaaaaccaaaggctgtttttattctcctccttaccttgatgactatggggagaccgaccagggactcagacggggaaatcctttacatttatgcaaagagcgattcaagaagattcagaagctctggcaccaacacagtgtcacagaggaaattggacatgcacaggaagccaatcagacactggttggcattgactggcaacatttataattattgcaccaccaaaaaacacaaacttggatttttttaacccagttggctttttaagaaagaaagaagttctgctgaatttggaaataaattctttatttaaactttccttcccagttttatagtttctggttctgaggactgatgaaaatcatcttccatcagcagattttcttgcactgtttgctgtgcccctcaaatataatgtcttgggttttaagatcgagcaaggagcttctcttcctagattggatcccagcccctttgtgggggtctgactgcatagtcccagccattatgtgatatttcacgttattgatgatagtgaaccgtgggtccgaagctgactcaacggaggcagggaacaaagtctctgtggtctgttgggtcatacttcctggttccactgagtggcccaacactgggactgggttggtgtcccctctgctgacaggaccctactcctaggagcaaagtggttgattttgaaggcagtgttcccttctctccattgactatgagagagttgggggacacacatgcagaagaagcccgtggggagaaggtggattcctggtgtgctggctggtttttcagggctgttagaggttttttttttttctttttttttttatggcaagacttttggctttgagaaaactcacttagagggctttccaaaaacttaggatggtctaaaaaattaggatattcttttagaattaggaagaaaaattaggatattctaaaagaatatggattaaaaatttaggatattcttttagatatcctaatatctagatgagaggccttccttcataagatctggttgtttgggctgtggttggcataagtgatatttattttggcctctgtcacatccagtttcttgagcttttaaggtaagcttcttttggctttttttcagatgttcaccaagcttaagtttaaaataataggtattctaaaagagtatcctaattttcttatctgtattcttttagaataccctaatgtttcagacagtgatattctcttgttatttctaaggctaaattggcagagtatatcatctaaagccaaacactgaagaaggtgagaacccactcccacccagccagcatttcctggaacagacaagctgctgcttccttgctggctcacttagtgcattcctgggatggtctggcacccaggctttttattctttttgatcattgttcttactgaggtgccttcctagaacaagagccacttacaaaatagcttataattattatgtaccacacaactactattgtttgatgtatgactgctgagagcttgaatacatgcagagagtgactgaagacttagtagaggaataaattctgagcctgtctaaggtggggctaaggaacagatgagtaataagaggctcttggatttttttaaccaatgcaactgaccctttcaatcagttttctttgaattacatctacaagttttgttccactcagctaccagtcaactaggcatgctccacagtatcacaggaagaaggtcagaaatctggaactgaagctaaaagaagtgaggatgtagaagccacattcctctccaaggtagtgtgtgaaagaaccgccccctcttgacaggaggatgaccgtcgccattcttgcgtgggactgactcacccagctgagaggaggaccaatagaaagaaaattcacatttgagtccacctctctccccctttttctggccttcattcataagatctggttgtttgggctgtaggtggcataattcatgtttattttggcctctgtcacatccagtttctttagcttttaaggtaagcttcttttggctttttttcatatgttcaccaagctaaaatttaaaataataagaccaggtttctctctgtacaagtggattataaacattttcaccaaatcataacaatactccagctttccggtccgacttcctaggagcctggagttagcaaaggttgtctctggatttcattctctgagaatatcacagagcctgggagaagatgaatttacatgaaattgcaacatacacacctttttattttctggtgttaagctagttgtctttcctaccttacaaatcatgttagttttatgatttgttccgcatgttttatgtttattgtagaaatgtttatataacatacgctttccatatcagggaaaatcatatctgtttaataaattggctataactttaatatctgtggacaacttgtaaaatttggaatgtatcatatgtaaaaagtttaaagatatccaaataaatgctttaggtgttggcatt

SEQ ID NO: 33489 - DNA, 7857 bp, Homo sapiens
  source 1..7857: mol_type = unassigned DNA
ttctgtgtccttccctgggtcagggacgagccagtgacttgactcttgggcgctaagcttgggagggagcgcaggaggccgctgtccttcctttccggttcacgtcacccttctctccctctgttgctccacctgcagccacttggacggctccgggactgattgcctggggcaggggtggcagtcgaggccgccggggccgaggtgaggctgcagctctccgggcggcggtagcgctggggaggaggaggagagaagatggcgtcggagctagagccagaggtgcaggccatcgaccggagcttgctggaatgttcggccgaggagattgcggggaaatggctgcaagcaactgacctcactagagaagtgtaccagcatttagcccactatgtacccaaaatctactgcaggggtcccaacccttttccacagaaagaagacatgctggcacagcatgttttgttgggaccaatggaatggtacctttgtggtgaagatcctgcatttggatttccaaaacttgagcaagcaaacaaaccttctcatctttgtggtcgtgtttttaaagtaggagagcctacatattcttgcagagactgtgcagttgatccaacttgtgttttgtgcatggagtgctttttgggaagtattcacagagatcatcgatataggatgacaacatcaggaggtggaggtttctgtgactgtggtgatactgaagcctggaaagagggtccttactgtcaaaaacatgaacttaacacctctgaaattgaggaagaagaggatcctcttgttcatttatcagaagatgtgatagcaagaacttataacatttttgctattacgtttcggtatgcagtagaaatattaacctgggaaaaagaaagtgaattgccagcagatttagagatggtagagaagagtgacacctactattgcatgctgtttaatgatgaggttcacacctatgaacaagttatttatactcttcagaaagctgttaactgtacacaaaaagaagctattggttttgcaactacagtagatcgagatgggcgtaggtctgttcgatatggagattttcagtattgtgagcaagcaaaatcagtaattgtgagaaataccagtagacagacaaagccactcaaagttcaagttatgcattcgtctattgtcgcacatcagaattttggtttgaaacttttgtcttggctgggaagtattattggatattcagatggccttcgccggattttatgtcaagttggtttacaagaagggccagatggtgaaaactcttctctagtggacagactgatgcttagtgattccaaattatggaaaggtgctaggagtgtatatcatcagttgttcatgagcagtctgcttatggatttgaaatacaagaaactatttgctgttcgatttgcaaaaaactatgagcgtttgcagagtgattatgtgacagatgaccacgacagagagttttcagtcgcagacctctcggttcagatattcacggttccttcacttgctcgaatgctcatcacagaagaaaacttaatgagcattatcattaagacttttatggatcatttgagacatcgagatgcccagggcagatttcagtttgaacgatacactgctttacaagccttcaaatttaggagagtacagagccttattttagatctcaagtatgtgttaattagcaaaccaactgaatggtcagatgagctgaggcagaagttcctagaagggtttgatgcctttttggaattactaaaatgtatgcagggaatggatccaattacacgtcaagtaggacaacatattgaaatggaaccagagtgggaagcagccttcacactacaaatgaaattaacacatgtcatttcaatgatgcaggactggtgtgcttcagatgaaaaagtgttaatcgaagcttacaagaaatgtctcgctgtactgatgcagtgtcatggtggttatactgatggtgaacagccaatcacactaagcatttgtggacattcagtggaaactatcagatactgtgtttcccaagaaaaagttagcattcacctcccagtttctcgcttacttgcaggtttacatgtattattaagcaaaagtgaagtggcatataaatttccagagctcctacctctaagtgaacttagcccacccatgttgatagaacaccctcttagatgtcttgttctgtgtgcccaagtacatgccggaatgtggagaagaaatgggttctctctagtaaaccagatttattactaccataatgtgaaatgcagacgtgagatgtttgacaaggatgtagtaatgcttcagacaggtgtctccatgatggatccaaatcatttcctgatgatcatgctcagccgctttgaactttatcagattttcagtactccagactatggaaaaagatttagttctgagattacccataaggatgttgttcagcagaacaatactctaatagaagaaatgctatacctcattataatgcttgttggagagagatttagtcctggagttggacaggtaaatgctacagatgaaatcaagcgagagattatccatcagttgagtatcaagcctatggctcatagtgaattggtaaagtctttacctgaagatgagaacaaggagactggcatggagagtgtaatcgaagcagttgcccatttcaagaaacctggattaacaggacgaggcatgtatgaactgaaaccagaatgtgccaaagagttcaacttgtatttctatcacttttcaagggcagaacagtccaaggcagaagaagcgcaacggaaattgaaaagacaaaatagagaagatacagcactcccacctccggtgttgcctccattctgccctctgtttgcaagcctggttaacattttgcagtcagatgtcatgttgtgcatcatgggaacaattctgcaatgggctgtggaacataatggatatgcctggtcagagtccatgctgcaaagggtgttacatttaattggcatggcactacaagaagaaaaacaacatttagagaatgtcacggaagagcatgtagtaacatttaccttcactcagaagatatcaaaacctggtgaagcgccaaaaaattctcctagcatactagctatgctggaaacactacaaaatgctccctacctagaagtccacaaagacatgattcggtggatattgaagacttttaatgctgttaaaaagatgagggagagttcacctaccagtcccgtggcagagacagaaggaaccataatggaagagagttcaagggacaaagacaaagctgagaggaagagaaaagcagagattgccagactgcgcagagaaaagatcatggctcagatgtctgaaatgcagcggcattttattgatgaaaacaaagaactctttcagcagacattagaactggatgcctcaacctctgctgttcttgatcatagccctgtggcttcagatatgacacttacagcactgggccccgcacaaactcaggttcctgaacaaagacaattcgttacatgtatattgtgtcaagaggagcaagaagttaaagtggaaagcagggcaatggtcttggcagcatttgttcagagatcaactgtattatcaaaaaacagaagtaaatttattcaagatccagaaaaatatgatccattattcatgcaccctgatctgtcttgtggaacacacactagtagctgtgggcacattatgcatgcccattgttggcaaaggtattttgattccgttcaagctaaagaacagcgaaggcaacagagattacgcttacatacgagctatgatgtagaaaacggagaattcctttgccccctttgtgaatgcttgagtaatactgttattcctctgctgcttcctccaagaaatatttttaacaacaggttaaatttttcagaccaaccaaatctgactcagtggattagaacaatatctcagcaaataaaagcattacagtttcttaggaaagaagaaagtactcctaataatgcctctacaaagaattcagaaaatgtggatgaattacagctccctgaagggttcaggcctgattttcgtcctaagatcccttattctgagagcataaaagaaatgctaacgacatttggaactgctacctacaaggtgggactaaaggttcatcccaatgaagaggatcctcgtgttcccataatgtgttggggtagctgcgcgtacaccatccaaagcatagaaagaattttgagtgatgaagataaaccattgtttggtcctttaccttgcagactggatgactgtcttaggtcattgacgagatttgccgcagcacactggacagtggcatcagtttcagtggtgcaaggacatttttgtaaactttttgcatcactggtgcctaatgacagccatgaggaacttccatgcatattagatattgacatgtttcatttattggtgggcttggtgcttgcatttcctgcgttgcagtgtcaggatttttcagggatcagccttggcactggagaccttcacattttccatctggttactatggcacacatcatacagatcttacttacctcatgtacagaagagaatggcatggatcaagaaaatcccccttgtgaagaagaatcagcagttcttgctttgtataaaacacttcaccagtatacgggaagtgccttgaaagaaataccatccggctggcatctgtggaggagtgtcagagctggaatcatgcctttcctgaagtgttctgctttattttttcattacttaaatggagttccttccccacccgacattcaagttcctggaacaagccattttgaacatttatgtagctatctttccctaccaaacaacctcatttgcctttttcaagaaaatagtgagataatgaattcactgattgaaagttggtgccgtaacagtgaagttaaaagatatctagaaggtgaaagagatgctataagatatccaagagaatctaacaaattaataaaccttccagaggattacagcagcctcattaatcaagcatccaatttctcgtgcccgaaatcaggtggtgataagagcagagccccaactctgtgccttgtgtgcggatctctgctgtgctcccagagttactgctgccagactgaactggaaggggaggatgtaggagcctgcacagctcacacctactcctgtggctctggagtgggcatcttcctgagagtacgggaatgtcaggtgctatttttagctggcaaaaccaaaggctgtttttattctcctccttaccttgatgactatggggagaccgaccagggactcagacggggaaatcctttacatttatgcaaagagcgattcaagaagattcagaagctctggcaccaacacagtgtcacagaggaaattggacatgcacaggaagccaatcagacactggttggcattgactggcaacatttataattattgcaccaccaaaaaacacaaacttggatttttttaacccagttggctttttaagaaagaaagaagttctgctgaatttggaaataaattctttatttaaactttccttcccagttttatagtttctggttctgaggactgatgaaaatcatcttccatcagcagattttcttgcactgtttgctgtgcccctcaaatataatgtcttgggttttaagatcgagcaaggagcttctcttcctagattggatcccagcccctttgtgggggtctgactgcatagtcccagccattatgtgatatttcacgttattgatgatagtgaaccgtgggtccgaagctgactcaacggaggcagggaacaaagtctctgtggtctgttgggtcatacttcctggttccactgagtggcccaacactgggactgggttggtgtcccctctgctgacaggaccctactcctaggagcaaagtggttgattttgaaggcagtgttcccttctctccattgactatgagagagttgggggacacacatgcagaagaagcccgtggggagaaggtggattcctggtgtgctggctggtttttcagggctgttagaggttttttttttttctttttttttttatggcaagacttttggctttgagaaaactcacttagagggctttccaaaaacttaggatggtctaaaaaattaggatattcttttagaattaggaagaaaaattaggatattctaaaagaatatggattaaaaatttaggatattcttttagatatcctaatatctagatgagaggccttccttcataagatctggttgtttgggctgtggttggcataagtgatatttattttggcctctgtcacatccagtttcttgagcttttaaggtaagcttcttttggctttttttcagatgttcaccaagcttaagtttaaaataataggtattctaaaagagtatcctaattttcttatctgtattcttttagaataccctaatgtttcagacagtgatattctcttgttatttctaaggctaaattggcagagtatatcatctaaagccaaacactgaagaaggtgagaacccactcccacccagccagcatttcctggaacagacaagctgctgcttccttgctggctcacttagtgcattcctgggatggtctggcacccaggctttttattctttttgatcattgttcttactgaggtgccttcctagaacaagagccacttacaaaatagcttataattattatgtaccacacaactactattgtttgatgtatgactgctgagagcttgaatacatgcagagagtgactgaagacttagtagaggaataaattctgagcctgtctaaggtggggctaaggaacagatgagtaataagaggctcttggatttttttaaccaatgcaactgaccctttcaatcagttttctttgaattacatctacaagttttgttccactcagctaccagtcaactaggcatgctccacagtatcacaggaagaaggtcagaaatctggaactgaagctaaaagaagtgaggatgtagaagccacattcctctccaaggtagtgtgtgaaagaaccgccccctcttgacaggaggatgaccgtcgccattcttgcgtgggactgactcacccagctgagaggaggaccaatagaaagaaaattcacatttgagtccacctctctccccctttttctggccttcattcataagatctggttgtttgggctgtaggtggcataattcatgtttattttggcctctgtcacatccagtttctttagcttttaaggtaagcttcttttggctttttttcatatgttcaccaagctaaaatttaaaataataagaccaggtttctctctgtacaagtggattataaacattttcaccaaatcataacaatactccagctttccggtccgacttcctaggagcctggagttagcaaaggttgtctctggatttcattctctgagaatatcacagagcctgggagaagatgaatttacatgaaattgcaacatacacacctttttattttctggtgttaagctagttgtctttcctaccttacaaatcatgttagttttatgatttgttccgcatgttttatgtttattgtagaaatgtttatataacatacgctttccatatcagggaaaatcatatctgtttaataaattggctataactttaatatctgtggacaacttgtaaaatttggaatgtatcatatgtaaaaagtttaaagatatccaaataaatgctttaggtgttggcatt

SEQ ID NO: 33490 - DNA, 2423 bp, Homo sapiens
  source 1..2423: mol_type = unassigned DNA
ttctgtgtccttccctgggtcagggacgagccagtgacttgactcttgggcgctaagcttgggagggagcgcaggaggccgctgtccttcctttccggttcacgtcacccttctctccctctgttgctccacctgcagccacttggacggctccgggactgattgcctggggcaggggtggcagtcgaggccgccggggccgaggtgaggctgcagctctccgggcggcggtagcgctggggaggaggaggagagaagatggcgtcggagctagagccagaggtgcaggccatcgaccggagcttgctggaatgttcggccgaggagattgcggggaaatggctgcaagcaactgacctcactagagaagtgtaccagcatttagcccactatgtacccaaaatctactgcaggggtcccaacccttttccacagaaagaagacatgctggcacagcatgttttgttgggaccaatggaatggtacctttgtggtgaagatcctgcatttggatttccaaaacttgagcaagcaaacaaaccttctcatctttgtggtcgtgtttttaaagtaggagagcctacatattcttgcagagactgtgcagttgatccaacttgtgttttgtgcatggagtgctttttgggaagtattcacagagatcatcgatataggatgacaacatcaggaggtggaggtttctgtgactgtggtgatactgaagcctggaaagagggtccttactgtcaaaaacatgaacttaacacctctgaaattgaggaagaagaggatcctcttgttcatttatcagaagatgtgatagcaagaacttataacatttttgctattacgtttcggtatgcagtagaaatattaacctgggaaaaagaaagtgaattgccagcagatttagagatggtagagaagagtgacacctactattgcatgctgtttaatgatgaggttcacacctatgaacaagttatttatactcttcagaaagctgttaactgtacacaaaaagaagctattggttttgcaactacagtagatcgagatgggcgtaggtctgttcgatatggagattttcagtattgtgagcaagcaaaatcagtaattgtgagaaataccagtagacagacaaagccactcaaagttcaagttatgcattcgtctattgtcgcacatcagaattttggtttgaaacttttgtcttggctgggaagtattattggatattcagatggccttcgccggattttatgtcaagttggtttacaagaagggccagatggtgaaaactcttctctagtggacagactgatgcttagtgattccaaattatggaaaggtgctaggagtgtatatcatcagttgttcatgagcagtctgcttatggatttgaaatacaagaaactatttgctgttcgatttgcaaaaaactatgagcgtttgcagagtgattatgtgacagatgaccacgacagagagttttcagtcgcagacctctcggttcagatattcacggttccttcacttttctctatctctgctgggcgcagtggctcacctctgtaatcctagccaaggcaggtggatcacctgagcttaggagtctgagaccagcctggccaacatggtgaaaccccatctctactaaaaatagaaaaattagccaggcgtggtggcgcacgcctgaggctgaggcagaagaatcacttgaacccaagaggcggaggttgcagtgagctgagatcaagccattgcactccagcctgggcgacagagcgagattcggtatccaaaaaaaaaaagttcttgctctgtcactcaggctggagtgaggtggcacgatcacagctcactgcagctttgaccacctgggcttaggcaatcctcctgtctcagcctcccaagtagctgggaccacagatgcatgccaccacacccagctagtcttaacatttttaaattaagcttatatggtttatatttttgatgctgtagtaaactttttatatttttgatgctgtagtaaactttttatatttttaaacaggctatggtagtatttaggaaaactactgatttttatatgtccatcttatatctgtctggtctatctggatatgtatgtattcagattaaataggttctaccagactcttttccataatggttaaaccaattcatgcttctgttaataacgtatgaaagtgatagttgctccacatcctcaccaacacttggttttaccagtcttttaagattttatctattctagtgggacatagtggtttctcattatggttttaatttgcattcttctgatgatgatgaagctgaattcctttttatatgtttattggcatttggatatactcctttgtgaatccctgttaaagttgtcctttgattatcta

SEQ ID NO: 33491 - DNA, 8005 bp, Homo sapiens
  source 1..8005: mol_type = unassigned DNA
tccctggaggagccgctggccctggactctccaaattctgagctctcatcatggcggcggcggccgcggcggccgtcgggggccagcagccgtcacagcccgagctgcccgcgccggggctggccctagacaaggcggccaccgccgcgcacctcaaggcggccctcagccggccggacaaccgcgcaggtgctgaggagctgcaggcgctgctggagcgggtgctgagcgccgagcggccgctggccgcggctgccggcggcgaggacgcggcggcggccggaggcgggggcggtccgggggcggccgaggaggaggccctggagtggtgtaagtgccttctggcgggcggcggcggctacgacgagttctgcgcggcggtgcgggcctacgatcccgcggcgctctgcggcctggtctggacagccaacttcgtggcctaccgctgccggacgtgcggcatctcgccctgcatgtcgctgtgcgccgagtgcttccaccagggcgaccacaccggacacgacttcaacatgttccgcagccaggccgggggcgcctgcgactgcggggacagcaacgtgatgcgggagagcgggttttgcaaaaggcatcaaattaaatcaagttcaaatattccctgtgtccctaaagacttactgatgatgtctgaatttgttcttccaagatttatattttgtcttattcagtacttaagagaaggctataatgaaccagcagctgatggaccatcagaaaaggaccttaacaaagtccttcagcttttggaacctcaaatttcctttttagaagacctgactaaaatgggaggagcaatgcggtctgttcttactcaggttttgacaaaccaacaaaactacaaagatctgacttctggtcttggagaaaatgcttgtgtaaagaaaagtcatgaaaagtaccttatagctttaaagagctctggacttacatatcctgaggataagcttgtatatggtgtgcaggagccatctgctggtactagttctctggctgttcaaggtttcataggcgcaacaggaactttgggacaagtggattcttcagatgaggatgatcaggatggtagtcaaggtctgggcaagagaaaaagggtaaaactaagcagtggcaccaaagatcaatccataatggatgttttgaagcataaaagcttcctagaagaactattattttggactataaaatatgaattccctcaaaagatggtaactttcttactcaacatgcttccagatcaagagtataaggttgcttttacaaaaacttttgttcagcattatgctttcattatgaaaacactgaagaaaagtcatgaatcagacacaatgtctaacagaattgtgcatattagtgttcagttgttcagcaatgaggagctagccagacaggtaacagaagaatgtcagctgctggatattatggtcactgtgctattatacatgatggaaagttgccttattaaaagtgagctacaagatgaagaaaatagtttacatgtggtagtgaactgtggagaagcattactgaagaataacacttactggcctcttgttagtgattttattaatattctttctcatcaaagtgtggccaagagatttttggaggatcacggtttgttagttacatggatgaactttgtatctttctttcaaggtatgaacttaaacaagcgagaactaaacgagcatgtggaatttgagtctcagacctactatgctgcctttgctgctgaacttgaggcctgtgcacagccaatgtgggggcttttatcacattgtaaagttagggaaactcaagagtatacccgaaatgttgttagatattgccttgaagctcttcaagactggtttgatgctattaacttcgtagacgagccagcacctaaccaagtcacttttcatctgccactacatcgttactatgctatgtttttgagtaaggctgtgaaatgtcaagaactagatttggattctgttttaccagatcaggaaatgttaatgaaactaatgattcacccactccaaattcaagcaagtcttgcagaaatccacagcaatatgtgggtaagaaatggtctgcaaatcaaaggacaagccatgacgtatgtccagtctcatttctgtaattccatgattgatcctgacatttacctgttacaggtttgtgcttctagacttgacccagattattttatttcatccgtctttgaaagatttaaggtagtggatttgttgacaatggcatcacaacatcaaaatacagtacttgatgcagagcatgagaggtcgatgttagaaggcgctcttacatttcttgtgattcttttgagtcttcgtttacatttaggaatgtctgatgatgagattctcagggccgagatggtagcccagctgtgtatgaatgacaggacacacagttcattgctggacctcattccagaaaatcctaatcccaaaagtggcattattccaggcagttacagctttgaatcagttttatcagctgtagctgattttaaggctcctgtttttgaacctggaggttctatgcaacaaggcatgtatactcccaaagctgaagtctgggatcaagagtttgaccccgtcatggtcattcttcgaacagtttaccgtagagatgtgcagtctgcaatggacagatatactgcatttttaaaacagagtggaaaatttcctggaaatccctggcctccatataagaaaaggacatcactccatcctagctataaaggtcttatgagacttttgcactgtaaaactttacacattgtgctattcactctgctttacaagattttgatggatcatcaaaatctgtcagaacatgtactctgcatggttttatatctgattgaattaggacttgaaaattctgctgaagaagaatcagatgaagaggcatcagtgggtggaccagaacgttgtcatgacagttggtttcctggcagtaacttagtgtcaaacatgcgacactttataaactatgttagagtaagagttccagagactgctcctgaagtaaagagagactcacctgcaagtactagctctgataacttgggttctttacaaaattctggtacagctcaagttttcagtttagtagcagaacgtagaaagaaatttcaggaaatcatcaatcgcagtagcagtgaagcaaatcaggtggttcgtcccaaaacttcaagtaaatggtctgctcctggttcagctccacagttaactacagccattttggaaattaaagaaagcatattgtctttgctaattaaacttcaccacaaactctcaggaaaacaaaactcctactatcctccttggcttgatgacatagaaattttaatccaaccagaaattcctaaatacagtcatggagatggtataactgccgtggaaagaattttactaaaagctgcatcgcaaagtagaatgaacaaacgcatcattgaagagatatgtagaaaagtgacccctcctgtaccacctaaaaaagtcactgcagcagagaagaaaacattggacaaagaagaaaggcgacagaaggctagagagaggcagcagaaattgcttgcggagtttgcttcacgacagaaaagctttatggaaactgcaatggatgttgattctcctgagaatgatattcctatggagatcaccacggcagaaccacaggtttccgaggcagtatatgactgtgttatttgtggacagagtggcccctcctctgaagatcgacctactggattagttgtactgttacaagcatcctcagttttggggcagtgccgtgacaatgttgagccaaaaaagttgccgatcagtgaagaggagcagatttacccttgggatacctgtgcagccgttcatgatgtgaggctttcattattacagcgttattttaaggatagttcatgtctcttggcagtatcaattggctgggaaggaggtgtttatgtacaaacctgtggtcacacattacatatagattgtcataaatcttacatggaatcattacggaatgaccaggttcttcagggcttctcggtggacaaaggagaattcacgtgtccactctgtaggcagtttgctaacagtgttcttccatgttatcctggaagcaatgtggaaaataacccttggcaacgtcctagcaacaaaagcatacaagatctcataaaggaagtggaggagctgcagggacgaccgggagctttcccatcagaaacaaatttaagtaaagaaatggaatctgtaatgaaagatataaaaaataccactcagaagaaatatagagactatagcaagaccccgggctcaccagacaatgattttctctttatgtactctgttgctagaaccaatttagaacttgaattgattcatcgaggaggcaatttgtgttcaggtggtgcaagcacagctggcaaaaggtcttgtttaaatcagctgtttcatgtattagccttgcacatgcggctttatagcattgactctgagtataatccctggagaaagctcacccagttagaagagatgaatccacagctgggatatgaagaacaacagcctgaggttccaattctttatcatgatgtaacatcccttttgctcatccagatcttaatgatgccacaacccttacgcaaagaccactttacctgcattgtgaaggtactttttaccctactgtacacacaggctcttgcagcactctcagttaaatgcagcgaagaagataggtcagcctggaaacacgcgggagctctcaaaaagagtacatgtgatgcagaaaagtcttacgaagtattactgagctttgtgataagtgaactatttaaaggaaagttataccatgaagaaggaactcaggaatgtgcaatggttaaccctattgcttggtctcctgaatccatggaaaaatgcttacaggacttctgcttaccttttctcagaatcaccagccttcttcagcaccacctttttggggaagatttacctagctgccaggaagaagaagaattttcagttcttgccagctgcctgggacttctgccaacgttttaccaaacagaacatccattcatcagtgcctcctgtctggattggccagttccagcatttgatattataactcagtggtgttttgagataaaatcatttactgaaagacatgcagaacaaggaaaggccttgcttatccaagagtcaaaatggaaattaccacacctactacagttgcctgagaattataacaccatttttcagtactaccacagaaaaacctgtagtgtctgcaccaaggttcctaaagatcctgctgtttgccttgtgtgtggtacttttgtatgcctgaaaggactttgctgcaagcaacaaagttactgtgaatgtgtactgcactctcagaactgtggtgcaggaacaggtattttccttttgatcaatgcatcggtaattatcatcattcgaggtcaccgcttctgcctctggggttccgtgtatttggatgctcatggagaggaagaccgggatcttaggcgaggcaaacctctctacatttgtaaggaaagatacaaagttcttgagcaacagtggatttctcatacttttgatcacatcaataaaagatggggtccacattacaatgggctgtgactctccacctcagcattgcatcgtatcatcattttcgctacgaatttatttttcaacaataagctttaacttaatttgggggattaacacttttgctgagggagaaaaagaaaacatacattatgaagcctttccaaaattaggtgcttggtaatcacgttaatggtataattttttttttttaatatctggagaacattaataacaagttaaattattctttagtggtcattttttaagtgcacaattaataagaagcacaacttgttcacaaactcattcagaaatgattctcccaacaatgcgtatcagctattcattgatacttagagtgggtgtgatttatttgacattttactgcttctttctgtctgtgtgttttaatttgcatctgccaagcataatgcatcttttttcctctgccattcttgtgttgattggagaatttttctgtatgtaattagaaaaaaatgtaaaacatgatttatgtgaaatactgtatagtaaaagttggtctaatagtagaactttaaaattttttcttattgtgaggaatctgttaaaagtttaaagctttgctgaaaactgaattcattctcaggaatttcataaatcttctccccaggtaaataattgaaatagctgtaaaataagtagatagctgctgttaatataatacagtacattttggggggcatatgtgtggttggggggtccttaaaaatcaaaatttgccatttcagttggatgaattactagaggtaataacaaatcttactatgaaatcaagaggtttaagaacatacactgggcagatgttgattccgtgcatgcccaccttttattaccaaacaaggttttgtttatatgattgtattagaaatgctcagacttccccagaaatgaaccataaattttggaacttcctttcagctcaagaggttcagctatattgtatttgtgcagtgtaatcactactatttctgctcggtttcctaaaaggaaaaaaaaggcgcagtggtgatgaccctcatgaatgagccacgcttctgcattcttcttagaaactgctgtgaaaaacaatttatgtttgcagggtttaaaaatcagtaaaaatgggaatgattgagctaaaacccactctatgagaaggaagattactgaaaagcatgtgacatattgctacaaagattttttttcctaaatgattcagtaattgaatgattatttaatatatagtgctatcaagcaatccctggtactttggacttccatggcttgttatataaaattacatttttacatgtaaaaataaactaaacaaatctaatgataaaatatgtcagatccatgttctaaaaaatttttgtaatgacatgacattacaagagtataaaaatggacattaaatcatggccttgcattaaaatatggaaagcagagcagtacatattcaaatgtattcagaaagtcaaaagattacctatcgttctacaataaaatacatggaaatagcttgctatttttatatacatttccaaaatattaagataactttctgtaagagtcaatgattctgttcgactaaatagctgtcctttccaacacattgctacttttttaaatactgtatcataagttcagcctgtcatactttttgcattgatcgttatgaataccagaccatttgtaagtgtggttgaagagcaaaatgctaattgacatctctagtaaatactgttacaggattcatgaacttgaataattctacagtttgaaactctgatgctatatatacatggtataatgtattcagactttgattactacttatttaaaatggaatgttttatggttgtgcatatggatgtgaagtgaaaatattagccttaactttaaaatttgggtgtttgatagtgtttattttgatattggtgaattagtcaccagtaaattttaaaaaagcacttggttgaaaattgtacttgaatacatacatgcatgctgctaaactagaactttaatttttccccataacttttataagtcccatttataaacccacttttaaaaataacaggtccaagttagagtgatgtgtgtatattattcaaaaaaatgtactggtgtgatatcttgtatgaatgatcatttaaatacagtacattactgtagaagctaaattgatctttataattaagcagaaattacaaaactaggaataatcaacattgtaagatatgttaataaaaacctgctgtcatttggtttgtgaaaggtccttaaaa

SEQ ID NO: 33492 - DNA, 4414 bp, Homo sapiens
  source 1..4414: mol_type = unassigned DNA
atgattgctagcaaacagaggcagttcacagaagtcttcaggataatgagctctactttctcccagtctcggttcttgtatgctgcagtggtgacagattctcctgagaatgatattcctatggagatcaccacggcagaaccacaggtttccgaggcagtatatgactgtgttatttgtggacagagtggcccctcctctgaagatcgacctactggattagttgtactgttacaagcatcctcagttttggggcagtgccgtgacaatgttgagccaaaaaagttgccgatcagtgaagaggagcagatttacccttgggatacctgtgcagccgttcatgatgtgaggctttcattattacagcgttattttaaggatagttcatgtctcttggcagtatcaattggctgggaaggaggtgtttatgtacaaacctgtggtcacacattacatatagattgtcataaatcttacatggaatcattacggaatgaccaggttcttcagggcttctcggtggacaaaggagaattcacgtgtccactctgtaggcagtttgctaacagtgttcttccatgttatcctggaagcaatgtggaaaataacccttggcaacgtcctagcaacaaaagcatacaagatctcataaaggaagtggaggagctgcagggacgaccgggagctttcccatcagaaacaaatttaagtaaagaaatggaatctgtaatgaaagatataaaaaataccactcagaagaaatatagagactatagcaagaccccgggctcaccagacaatgattttctctttatgtactctgttgctagaaccaatttagaacttgaattgattcatcgaggaggcaatttgtgttcaggtggtgcaagcacagctggcaaaaggtcttgtttaaatcagctgtttcatgtattagccttgcacatgcggctttatagcattgactctgagtataatccctggagaaagctcacccagttagaagagatgaatccacagctgggatatgaagaacaacagcctgaggttccaattctttatcatgatgtaacatcccttttgctcatccagatcttaatgatgccacaacccttacgcaaagaccactttacctgcattgtgaaggtactttttaccctactgtacacacaggctcttgcagcactctcagttaaatgcagcgaagaagataggtcagcctggaaacacgcgggagctctcaaaaagagtacatgtgatgcagaaaagtcttacgaagtattactgagctttgtgataagtgaactatttaaaggaaagttataccatgaagaaggaactcaggaatgtgcaatggttaaccctattgcttggtctcctgaatccatggaaaaatgcttacaggacttctgcttaccttttctcagaatcaccagccttcttcagcaccacctttttggggaagatttacctagctgccaggaagaagaagaattttcagttcttgccagctgcctgggacttctgccaacgttttaccaaacagaacatccattcatcagtgcctcctgtctggattggccagttccagcatttgatattataactcagtggtgttttgagataaaatcatttactgaaagacatgcagaacaaggaaaggccttgcttatccaagagtcaaaatggaaattaccacacctactacagttgcctgagaattataacaccatttttcagtactaccacagaaaaacctgtagtgtctgcaccaaggttcctaaagatcctgctgtttgccttgtgtgtggtacttttgtatgcctgaaaggactttgctgcaagcaacaaagttactgtgaatgtgtactgcactctcagaactgtggtgcaggaacaggtattttccttttgatcaatgcatcggtaattatcatcattcgaggtcaccgcttctgcctctggggttccgtgtatttggatgctcatggagaggaagaccgggatcttaggcgaggcaaacctctctacatttgtaaggaaagatacaaagttcttgagcaacagtggatttctcatacttttgatcacatcaataaaagatggggtccacattacaatgggctgtgactctccacctcagcattgcatcgtatcatcattttcgctacgaatttatttttcaacaataagctttaacttaatttgggggattaacacttttgctgagggagaaaaagaaaacatacattatgaagcctttccaaaattaggtgcttggtaatcacgttaatggtataattttttttttttaatatctggagaacattaataacaagttaaattattctttagtggtcattttttaagtgcacaattaataagaagcacaacttgttcacaaactcattcagaaatgattctcccaacaatgcgtatcagctattcattgatacttagagtgggtgtgatttatttgacattttactgcttctttctgtctgtgtgttttaatttgcatctgccaagcataatgcatcttttttcctctgccattcttgtgttgattggagaatttttctgtatgtaattagaaaaaaatgtaaaacatgatttatgtgaaatactgtatagtaaaagttggtctaatagtagaactttaaaattttttcttattgtgaggaatctgttaaaagtttaaagctttgctgaaaactgaattcattctcaggaatttcataaatcttctccccaggtaaataattgaaatagctgtaaaataagtagatagctgctgttaatataatacagtacattttggggggcatatgtgtggttggggggtccttaaaaatcaaaatttgccatttcagttggatgaattactagaggtaataacaaatcttactatgaaatcaagaggtttaagaacatacactgggcagatgttgattccgtgcatgcccaccttttattaccaaacaaggttttgtttatatgattgtattagaaatgctcagacttccccagaaatgaaccataaattttggaacttcctttcagctcaagaggttcagctatattgtatttgtgcagtgtaatcactactatttctgctcggtttcctaaaaggaaaaaaaaggcgcagtggtgatgaccctcatgaatgagccacgcttctgcattcttcttagaaactgctgtgaaaaacaatttatgtttgcagggtttaaaaatcagtaaaaatgggaatgattgagctaaaacccactctatgagaaggaagattactgaaaagcatgtgacatattgctacaaagattttttttcctaaatgattcagtaattgaatgattatttaatatatagtgctatcaagcaatccctggtactttggacttccatggcttgttatataaaattacatttttacatgtaaaaataaactaaacaaatctaatgataaaatatgtcagatccatgttctaaaaaatttttgtaatgacatgacattacaagagtataaaaatggacattaaatcatggccttgcattaaaatatggaaagcagagcagtacatattcaaatgtattcagaaagtcaaaagattacctatcgttctacaataaaatacatggaaatagcttgctatttttatatacatttccaaaatattaagataactttctgtaagagtcaatgattctgttcgactaaatagctgtcctttccaacacattgctacttttttaaatactgtatcataagttcagcctgtcatactttttgcattgatcgttatgaataccagaccatttgtaagtgtggttgaagagcaaaatgctaattgacatctctagtaaatactgttacaggattcatgaacttgaataattctacagtttgaaactctgatgctatatatacatggtataatgtattcagactttgattactacttatttaaaatggaatgttttatggttgtgcatatggatgtgaagtgaaaatattagccttaactttaaaatttgggtgtttgatagtgtttattttgatattggtgaattagtcaccagtaaattttaaaaaagcacttggttgaaaattgtacttgaatacatacatgcatgctgctaaactagaactttaatttttccccataacttttataagtcccatttataaacccacttttaaaaataacaggtccaagttagagtgatgtgtgtatattattcaaaaaaatgtactggtgtgatatcttgtatgaatgatcatttaaatacagtacattactgtagaagctaaattgatctttataattaagcagaaattacaaaactaggaataatcaacattgtaagatatgttaataaaaacctgctgtcatttggtttgtgaaaggtcctt

SEQ ID NO: 33493 - DNA, 7951 bp, Homo sapiens
  source 1..7951: mol_type = unassigned DNA
atggcggcggcggccgcggcggccgtcgggggccagcagccgtcacagcccgagctgcccgcgccggggctggccctagacaaggcggccaccgccgcgcacctcaaggcggccctcagccggccggacaaccgcgcaggtgctgaggagctgcaggcgctgctggagcgggtgctgagcgccgagcggccgctggccgcggctgccggcggcgaggacgcggcggcggccggaggcgggggcggtccgggggcggccgaggaggaggccctggagtggtgtaagtgccttctggcgggcggcggcggctacgacgagttctgcgcggcggtgcgggcctacgatcccgcggcgctctgcggcctggtctggacagccaacttcgtggcctaccgctgccggacgtgcggcatctcgccctgcatgtcgctgtgcgccgagtgcttccaccagggcgaccacaccggacacgacttcaacatgttccgcagccaggccgggggcgcctgcgactgcggggacagcaacgtgatgcgggagagcgggttttgcaaaaggcatcaaattaaatcaagttcaaatattccctgtgtccctaaagacttactgatgatgtctgaatttgttcttccaagatttatattttgtcttattcagtacttaagagaaggctataatgaaccagcagctgatggaccatcagaaaaggaccttaacaaagtccttcagcttttggaacctcaaatttcctttttagaagacctgactaaaatgggaggagcaatgcggtctgttcttactcaggttttgacaaaccaacaaaactacaaagatctgacttctggtcttggagaaaatgcttgtgtaaagaaaagtcatgaaaagtaccttatagctttaaagagctctggacttacatatcctgaggataagcttgtatatggtgtgcaggagccatctgctggtactagttctctggctgttcaaggtttcataggcgcaacaggaactttgggacaagtggattcttcagatgaggatgatcaggatggtagtcaaggtctgggcaagagaaaaagggtaaaactaagcagtggcaccaaagatcaatccataatggatgttttgaagcataaaagcttcctagaagaactattattttggactataaaatatgaattccctcaaaagatggtaactttcttactcaacatgcttccagatcaagagtataaggttgcttttacaaaaacttttgttcagcattatgctttcattatgaaaacactgaagaaaagtcatgaatcagacacaatgtctaacagaattgtgcatattagtgttcagttgttcagcaatgaggagctagccagacaggtaacagaagaatgtcagctgctggatattatggtcactgtgctattatacatgatggaaagttgccttattaaaagtgagctacaagatgaagaaaatagtttacatgtggtagtgaactgtggagaagcattactgaagaataacacttactggcctcttgttagtgattttattaatattctttctcatcaaagtgtggccaagagatttttggaggatcacggtttgttagttacatggatgaactttgtatctttctttcaaggtatgaacttaaacaagcgagaactaaacgagcatgtggaatttgagtctcagacctactatgctgcctttgctgctgaacttgaggcctgtgcacagccaatgtgggggcttttatcacattgtaaagttagggaaactcaagagtatacccgaaatgttgttagatattgccttgaagctcttcaagactggtttgatgctattaacttcgtagacgagccagcacctaaccaagtcacttttcatctgccactacatcgttactatgctatgtttttgagtaaggctgtgaaatgtcaagaactagatttggattctgttttaccagatcaggaaatgttaatgaaactaatgattcacccactccaaattcaagcaagtcttgcagaaatccacagcaatatgtgggtaagaaatggtctgcaaatcaaaggacaagccatgacgtatgtccagtctcatttctgtaattccatgattgatcctgacatttacctgttacaggtttgtgcttctagacttgacccagattattttatttcatccgtctttgaaagatttaaggtagtggatttgttgacaatggcatcacaacatcaaaatacagtacttgatgcagagcatgagaggtcgatgttagaaggcgctcttacatttcttgtgattcttttgagtcttcgtttacatttaggaatgtctgatgatgagattctcagggccgagatggtagcccagctgtgtatgaatgacaggacacacagttcattgctggacctcattccagaaaatcctaatcccaaaagtggcattattccaggcagttacagctttgaatcagttttatcagctgtagctgattttaaggctcctgtttttgaacctggaggttctatgcaacaaggcatgtatactcccaaagctgaagtctgggatcaagagtttgaccccgtcatggtcattcttcgaacagtttaccgtagagatgtgcagtctgcaatggacagatatactgcatttttaaaacagagtggaaaatttcctggaaatccctggcctccatataagaaaaggacatcactccatcctagctataaaggtcttatgagacttttgcactgtaaaactttacacattgtgctattcactctgctttacaagattttgatggatcatcaaaatctgtcagaacatgtactctgcatggttttatatctgattgaattaggacttgaaaattctgctgaagaagaatcagatgaagaggcatcagtgggtggaccagaacgttgtcatgacagttggtttcctggcagtaacttagtgtcaaacatgcgacactttataaactatgttagagtaagagttccagagactgctcctgaagtaaagagagactcacctgcaagtactagctctgataacttgggttctttacaaaattctggtacagctcaagttttcagtttagtagcagaacgtagaaagaaatttcaggaaatcatcaatcgcagtagcagtgaagcaaatcaggtggttcgtcccaaaacttcaagtaaatggtctgctcctggttcagctccacagttaactacagccattttggaaattaaagaaagcatattgtctttgctaattaaacttcaccacaaactctcaggaaaacaaaactcctactatcctccttggcttgatgacatagaaattttaatccaaccagaaattcctaaatacagtcatggagatggtataactgccgtggaaagaattttactaaaagctgcatcgcaaagtagaatgaacaaacgcatcattgaagagatatgtagaaaagtgacccctcctgtaccacctaaaaaagtcactgcagcagagaagaaaacattggacaaagaagaaaggcgacagaaggctagagagaggcagcagaaattgcttgcggagtttgcttcacgacagaaaagctttatggaaactgcaatggatgttgattctcctgagaatgatattcctatggagatcaccacggcagaaccacaggtttccgaggcagtatatgactgtgttatttgtggacagagtggcccctcctctgaagatcgacctactggattagttgtactgttacaagcatcctcagttttggggcagtgccgtgacaatgttgagccaaaaaagttgccgatcagtgaagaggagcagatttacccttgggatacctgtgcagccgttcatgatgtgaggctttcattattacagcgttattttaaggatagttcatgtctcttggcagtatcaattggctgggaaggaggtgtttatgtacaaacctgtggtcacacattacatatagattgtcataaatcttacatggaatcattacggaatgaccaggttcttcagggcttctcggtggacaaaggagaattcacgtgtccactctgtaggcagtttgctaacagtgttcttccatgttatcctggaagcaatgtggaaaataacccttggcaacgtcctagcaacaaaagcatacaagatctcataaaggaagtggaggagctgcagggacgaccgggagctttcccatcagaaacaaatttaagtaaagaaatggaatctgtaatgaaagatataaaaaataccactcagaagaaatatagagactatagcaagaccccgggctcaccagacaatgattttctctttatgtactctgttgctagaaccaatttagaacttgaattgattcatcgaggaggcaatttgtgttcaggtggtgcaagcacagctggcaaaaggtcttgtttaaatcagctgtttcatgtattagccttgcacatgcggctttatagcattgactctgagtataatccctggagaaagctcacccagttagaagagatgaatccacagctgggatatgaagaacaacagcctgaggttccaattctttatcatgatgtaacatcccttttgctcatccagatcttaatgatgccacaacccttacgcaaagaccactttacctgcattgtgaaggtactttttaccctactgtacacacaggctcttgcagcactctcagttaaatgcagcgaagaagataggtcagcctggaaacacgcgggagctctcaaaaagagtacatgtgatgcagaaaagtcttacgaagtattactgagctttgtgataagtgaactatttaaaggaaagttataccatgaagaaggaactcaggaatgtgcaatggttaaccctattgcttggtctcctgaatccatggaaaaatgcttacaggacttctgcttaccttttctcagaatcaccagccttcttcagcaccacctttttggggaagatttacctagctgccaggaagaagaagaattttcagttcttgccagctgcctgggacttctgccaacgttttaccaaacagaacatccattcatcagtgcctcctgtctggattggccagttccagcatttgatattataactcagtggtgttttgagataaaatcatttactgaaagacatgcagaacaaggaaaggccttgcttatccaagagtcaaaatggaaattaccacacctactacagttgcctgagaattataacaccatttttcagtactaccacagaaaaacctgtagtgtctgcaccaaggttcctaaagatcctgctgtttgccttgtgtgtggtacttttgtatgcctgaaaggactttgctgcaagcaacaaagttactgtgaatgtgtactgcactctcagaactgtggtgcaggaacaggtattttccttttgatcaatgcatcggtaattatcatcattcgaggtcaccgcttctgcctctggggttccgtgtatttggatgctcatggagaggaagaccgggatcttaggcgaggcaaacctctctacatttgtaaggaaagatacaaagttcttgagcaacagtggatttctcatacttttgatcacatcaataaaagatggggtccacattacaatgggctgtgactctccacctcagcattgcatcgtatcatcattttcgctacgaatttatttttcaacaataagctttaacttaatttgggggattaacacttttgctgagggagaaaaagaaaacatacattatgaagcctttccaaaattaggtgcttggtaatcacgttaatggtataattttttttttttaatatctggagaacattaataacaagttaaattattctttagtggtcattttttaagtgcacaattaataagaagcacaacttgttcacaaactcattcagaaatgattctcccaacaatgcgtatcagctattcattgatacttagagtgggtgtgatttatttgacattttactgcttctttctgtctgtgtgttttaatttgcatctgccaagcataatgcatcttttttcctctgccattcttgtgttgattggagaatttttctgtatgtaattagaaaaaaatgtaaaacatgatttatgtgaaatactgtatagtaaaagttggtctaatagtagaactttaaaattttttcttattgtgaggaatctgttaaaagtttaaagctttgctgaaaactgaattcattctcaggaatttcataaatcttctccccaggtaaataattgaaatagctgtaaaataagtagatagctgctgttaatataatacagtacattttggggggcatatgtgtggttggggggtccttaaaaatcaaaatttgccatttcagttggatgaattactagaggtaataacaaatcttactatgaaatcaagaggtttaagaacatacactgggcagatgttgattccgtgcatgcccaccttttattaccaaacaaggttttgtttatatgattgtattagaaatgctcagacttccccagaaatgaaccataaattttggaacttcctttcagctcaagaggttcagctatattgtatttgtgcagtgtaatcactactatttctgctcggtttcctaaaaggaaaaaaaaggcgcagtggtgatgaccctcatgaatgagccacgcttctgcattcttcttagaaactgctgtgaaaaacaatttatgtttgcagggtttaaaaatcagtaaaaatgggaatgattgagctaaaacccactctatgagaaggaagattactgaaaagcatgtgacatattgctacaaagattttttttcctaaatgattcagtaattgaatgattatttaatatatagtgctatcaagcaatccctggtactttggacttccatggcttgttatataaaattacatttttacatgtaaaaataaactaaacaaatctaatgataaaatatgtcagatccatgttctaaaaaatttttgtaatgacatgacattacaagagtataaaaatggacattaaatcatggccttgcattaaaatatggaaagcagagcagtacatattcaaatgtattcagaaagtcaaaagattacctatcgttctacaataaaatacatggaaatagcttgctatttttatatacatttccaaaatattaagataactttctgtaagagtcaatgattctgttcgactaaatagctgtcctttccaacacattgctacttttttaaatactgtatcataagttcagcctgtcatactttttgcattgatcgttatgaataccagaccatttgtaagtgtggttgaagagcaaaatgctaattgacatctctagtaaatactgttacaggattcatgaacttgaataattctacagtttgaaactctgatgctatatatacatggtataatgtattcagactttgattactacttatttaaaatggaatgttttatggttgtgcatatggatgtgaagtgaaaatattagccttaactttaaaatttgggtgtttgatagtgtttattttgatattggtgaattagtcaccagtaaattttaaaaaagcacttggttgaaaattgtacttgaatacatacatgcatgctgctaaactagaactttaatttttccccataacttttataagtcccatttataaacccacttttaaaaataacaggtccaagttagagtgatgtgtgtatattattcaaaaaaatgtactggtgtgatatcttgtatgaatgatcatttaaatacagtacattactgtagaagctaaattgatctttataattaagcagaaattacaaaactaggaataatcaacattgtaagatatgttaataaaaacctgctgtcatttggtttgtgaaaggtcctt

SEQ ID NO: 33494 - DNA, 8038 bp, Homo sapiens
  source 1..8038: mol_type = unassigned DNA
atggcggcggcggccgcggcggccgtcgggggccagcagccgtcacagcccgagctgcccgcgccggggctggccctagacaaggcggccaccgccgcgcacctcaaggcggccctcagccggccggacaaccgcgcaggtgctgaggagctgcaggcgctgctggagcgggtgctgagcgccgagcggccgctggccgcggctgccggcggcgaggacgcggcggcggccggaggcgggggcggtccgggggcggccgaggaggaggccctggagtggtgtaagtgccttctggcgggcggcggcggctacgacgagttctgcgcggcggtgcgggcctacgatcccgcggcgctctgcggcctggtctggacagccaacttcgtggcctaccgctgccggacgtgcggcatctcgccctgcatgtcgctgtgcgccgagtgcttccaccagggcgaccacaccggacacgacttcaacatgttccgcagccaggccgggggcgcctgcgactgcggggacagcaacgtgatgcgggagagcgggttttgcaaaaggcatcaaattaaatcaagttcaaatattccctgtgtccctaaagacttactgatgatgtctgaatttgttcttccaagatttatattttgtcttattcagtacttaagagaaggctataatgaaccagcagctgatggaccatcagaaaaggaccttaacaaagtccttcagcttttggaacctcaaatttcctttttagaagacctgactaaaatgggaggagcaatgcggtctgttcttactcaggttttgacaaaccaacaaaactacaaagatctgacttctggtcttggagaaaatgcttgtgtaaagaaaagtcatgaaaagtaccttatagctttaaagagctctggacttacatatcctgaggataagcttgtatatggtgtgcaggagccatctgctggtactagttctctggctgttcaaggtttcataggcgcaacaggaactttgggacaagtggattcttcagatgaggatgatcaggatggtagtcaaggtctgggcaagagaaaaagggtaaaactaagcagtggcaccaaagatcaatccataatggatgttttgaagcataaaagcttcctagaagaactattattttggactataaaatatgaattccctcaaaagatggtaactttcttactcaacatgcttccagatcaagagtataaggttgcttttacaaaaacttttgttcagcattatgctttcattatgaaaacactgaagaaaagtcatgaatcagacacaatgtctaacagaattgtgcatattagtgttcagttgttcagcaatgaggagctagccagacaggtaacagaagaatgtcagctgctggatattatggtcactgtgctattatacatgatggaaagttgccttattaaaagtgagctacaagatgaagaaaatagtttacatgtggtagtgaactgtggagaagcattactgaagaataacacttactggcctcttgttagtgattttattaatattctttctcatcaaagtgtggccaagagatttttggaggatcacggtttgttagttacatggatgaactttgtatctttctttcaaggtatgaacttaaacaagcgagaactaaacgagcatgtggaatttgagtctcagacctactatgctgcctttgctgctgaacttgaggcctgtgcacagccaatgtgggggcttttatcacattgtaaagttagggaaactcaagagtatacccgaaatgttgttagatattgccttgaagctcttcaagactggtttgatgctattaacttcgtagacgagccagcacctaaccaagtcacttttcatctgccactacatcgttactatgctatgtttttgagtaaggctgtgaaatgtcaagaactagatttggattctgttttaccagatcaggaaatgttaatgaaactaatgattcacccactccaaattcaagcaagtcttgcagaaatccacagcaatatgtgggtaagaaatggtctgcaaatcaaaggacaagccatgacgtatgtccagtctcatttctgtaattccatgattgatcctgacatttacctgttacaggtttgtgcttctagacttgacccagattattttatttcatccgtctttgaaagatttaaggtagtggatttgttgacaatggcatcacaacatcaaaatacagtacttgatgcagagcatgagaggtcgatgttagaaggcgctcttacatttcttgtgattcttttgagtcttcgtttacatttaggaatgtctgatgatgagattctcagggccgagatggtagcccagctgtgtatgaatgacaggacacacagttcattgctggacctcattccagaaaatcctaatcccaaaagtggcattattccaggcagttacagctttgaatcagttttatcagctgtagctgattttaaggctcctgtttttgaacctggaggttctatgcaacaaggcatgtatactcccaaagctgaagtctgggatcaagagtttgaccccgtcatggtcattcttcgaacagtttaccgtagagatgtgcagtctgcaatggacagatatactgcatttttaaaacagagtggaaaatttcctggaaatccctggcctccatataagaaaaggacatcactccatcctagctataaaggtcttatgagacttttgcactgtaaaactttacacattgtgctattcactctgctttacaagattttgatggatcatcaaaatctgtcagaacatgtactctgcatggttttatatctgattgaattaggacttgaaaattctgctgaagaagaatcagatgaagaggcatcagtgggtggaccagaacgttgtcatgacagttggtttcctggcagtaacttagtgtcaaacatgcgacactttataaactatgttagagtaagagttccagagactgctcctgaagtaaagagagactcacctgcaagtactagctctgataacttgggttctttacaaaattctggtacagctcaagttttcagtttagtagcagaacgtagaaagaaatttcaggaaatcatcaatcgcagtagcagtgaagcaaatcaggtggttcgtcccaaaacttcaagtaaatggtctgctcctggttcagctccacagttaactacagccattttggaaattaaagaaagcatattgtctttgctaattaaacttcaccacaaactctcaggaaaacaaaactcctactatcctccttggcttgatgacatagaaattttaatccaaccagaaattcctaaatacagtcatggagatggtataactgccgtggaaagaattttactaaaagctgcatcgcaaagtagaatgaacaaacgcatcattgaagagatatgtagaaaagtgacccctcctgtaccacctaaaaaagtcactgcagcagagaagaaaacattggacaaagaagaaaggcgacagaaggctagagagaggcagcagaaattgcttgcggagtttgcttcacgacagaaaagctttatggaaactgcaatggatgttgattctcctgagaatgatattcctatggagatcaccacggcagaaccacaggtttccgaggcagtatatgactgtgttatttgtggacagagtggcccctcctctgaagatcgacctactggattagttgtactgttacaagcatcctcagttttggggcagtgccgtgacaatgttgagccaaaaaagttgccgatcagtgaagaggagcagatttacccttgggatacctgtgcagccgttcatgatgtgaggctttcattattacagcgttattttaaggatagttcatgtctcttggcagtatcaattggctgggaaggaggtgtttatgtacaaacctgtggtcacacattacatatagattgtcataaatcttacatggaatcattacggaatgaccaggttcttcagggcttctcggtggacaaaggagaattcacgtgtccactctgtaggcagtttgctaacagtgttcttccatgttatcctggaagcaatgtggaaaataacccttggcaacgtcctagcaacaaaagcatacaagatctcataaaggaagtggaggagctgcagggacgaccgggagctttcccatcagaaacaaatttaagtaaagaaatggaatctgtaatgaaagatataaaaaataccactcagaagaaatatagagactatagcaagaccccgggctcaccagacaatgattttctctttatgtactctgttgctagaaccaatttagaacttgaattgattcatcgaggaggcaatttgtgttcaggtggtgcaagcacagctggcaaaaggtcttgtttaaacttttgcttcattatttttccctttactaaatcagaaattatactgtgccaatatagaaaaagtcatgataaagtttatcctaaatatcagctgtttcatgtattagccttgcacatgcggctttatagcattgactctgagtataatccctggagaaagctcacccagttagaagagatgaatccacagctgggatatgaagaacaacagcctgaggttccaattctttatcatgatgtaacatcccttttgctcatccagatcttaatgatgccacaacccttacgcaaagaccactttacctgcattgtgaaggtactttttaccctactgtacacacaggctcttgcagcactctcagttaaatgcagcgaagaagataggtcagcctggaaacacgcgggagctctcaaaaagagtacatgtgatgcagaaaagtcttacgaagtattactgagctttgtgataagtgaactatttaaaggaaagttataccatgaagaaggaactcaggaatgtgcaatggttaaccctattgcttggtctcctgaatccatggaaaaatgcttacaggacttctgcttaccttttctcagaatcaccagccttcttcagcaccacctttttggggaagatttacctagctgccaggaagaagaagaattttcagttcttgccagctgcctgggacttctgccaacgttttaccaaacagaacatccattcatcagtgcctcctgtctggattggccagttccagcatttgatattataactcagtggtgttttgagataaaatcatttactgaaagacatgcagaacaaggaaaggccttgcttatccaagagtcaaaatggaaattaccacacctactacagttgcctgagaattataacaccatttttcagtactaccacagaaaaacctgtagtgtctgcaccaaggttcctaaagatcctgctgtttgccttgtgtgtggtacttttgtatgcctgaaaggactttgctgcaagcaacaaagttactgtgaatgtgtactgcactctcagaactgtggtgcaggaacaggtattttccttttgatcaatgcatcggtaattatcatcattcgaggtcaccgcttctgcctctggggttccgtgtatttggatgctcatggagaggaagaccgggatcttaggcgaggcaaacctctctacatttgtaaggaaagatacaaagttcttgagcaacagtggatttctcatacttttgatcacatcaataaaagatggggtccacattacaatgggctgtgactctccacctcagcattgcatcgtatcatcattttcgctacgaatttatttttcaacaataagctttaacttaatttgggggattaacacttttgctgagggagaaaaagaaaacatacattatgaagcctttccaaaattaggtgcttggtaatcacgttaatggtataattttttttttttaatatctggagaacattaataacaagttaaattattctttagtggtcattttttaagtgcacaattaataagaagcacaacttgttcacaaactcattcagaaatgattctcccaacaatgcgtatcagctattcattgatacttagagtgggtgtgatttatttgacattttactgcttctttctgtctgtgtgttttaatttgcatctgccaagcataatgcatcttttttcctctgccattcttgtgttgattggagaatttttctgtatgtaattagaaaaaaatgtaaaacatgatttatgtgaaatactgtatagtaaaagttggtctaatagtagaactttaaaattttttcttattgtgaggaatctgttaaaagtttaaagctttgctgaaaactgaattcattctcaggaatttcataaatcttctccccaggtaaataattgaaatagctgtaaaataagtagatagctgctgttaatataatacagtacattttggggggcatatgtgtggttggggggtccttaaaaatcaaaatttgccatttcagttggatgaattactagaggtaataacaaatcttactatgaaatcaagaggtttaagaacatacactgggcagatgttgattccgtgcatgcccaccttttattaccaaacaaggttttgtttatatgattgtattagaaatgctcagacttccccagaaatgaaccataaattttggaacttcctttcagctcaagaggttcagctatattgtatttgtgcagtgtaatcactactatttctgctcggtttcctaaaaggaaaaaaaaggcgcagtggtgatgaccctcatgaatgagccacgcttctgcattcttcttagaaactgctgtgaaaaacaatttatgtttgcagggtttaaaaatcagtaaaaatgggaatgattgagctaaaacccactctatgagaaggaagattactgaaaagcatgtgacatattgctacaaagattttttttcctaaatgattcagtaattgaatgattatttaatatatagtgctatcaagcaatccctggtactttggacttccatggcttgttatataaaattacatttttacatgtaaaaataaactaaacaaatctaatgataaaatatgtcagatccatgttctaaaaaatttttgtaatgacatgacattacaagagtataaaaatggacattaaatcatggccttgcattaaaatatggaaagcagagcagtacatattcaaatgtattcagaaagtcaaaagattacctatcgttctacaataaaatacatggaaatagcttgctatttttatatacatttccaaaatattaagataactttctgtaagagtcaatgattctgttcgactaaatagctgtcctttccaacacattgctacttttttaaatactgtatcataagttcagcctgtcatactttttgcattgatcgttatgaataccagaccatttgtaagtgtggttgaagagcaaaatgctaattgacatctctagtaaatactgttacaggattcatgaacttgaataattctacagtttgaaactctgatgctatatatacatggtataatgtattcagactttgattactacttatttaaaatggaatgttttatggttgtgcatatggatgtgaagtgaaaatattagccttaactttaaaatttgggtgtttgatagtgtttattttgatattggtgaattagtcaccagtaaattttaaaaaagcacttggttgaaaattgtacttgaatacatacatgcatgctgctaaactagaactttaatttttccccataacttttataagtcccatttataaacccacttttaaaaataacaggtccaagttagagtgatgtgtgtatattattcaaaaaaatgtactggtgtgatatcttgtatgaatgatcatttaaatacagtacattactgtagaagctaaattgatctttataattaagcagaaattacaaaactaggaataatcaacattgtaagatatgttaataaaaacctgctgtcatttggtttgtgaaaggtcctt

SEQ ID NO: 33495 - DNA, 3694 bp, Homo sapiens
  source 1..3694: mol_type = unassigned DNA
agaacacgacaccgggaagcgccacccggaggcggaaatcagcccgcgtccggcgcaggcgggagaagggagaggagtgacatccgtttgtcggaagtcgctcctcccccttccttcgctttttttccttgtcattggttcctggcactcgggccccacctcctccggctacgcccctcacggccgcttttcccgcctccgccggggccgagccgctgttcggctgacagttgaggatggccggagccgagggcgccgctgggcggcagtcggagctggagcccgtggtatcgttggtcgacgtccttgaggaggacgaggagctggagaatgaggcgtgcgctgtcctgggcggcagcgactccgagaagtgctcctactctcagggctcagtaaagagacaagcactatatgcctgtagtacctgcaccccagagggagaagaaccagcaggaatttgtttagcttgcagttatgaatgtcatggaagtcacaaactatttgagctatacacaaaaagaaattttcgttgtgattgtggaaacagcaagtttaaaaatttggaatgcaaattacttcctgacaaagcaaaggtaaattctggcaataagtacaatgacaacttttttggattgtactgcatttgcaagagaccttatcctgatcctgaagacgagattccagatgagatgatccagtgcgtagtctgtgaagactggttccatggaaggcatcttggtgccattccccctgagagtggggattttcaggagatggtatgccaggcctgcatgaaacgttgttcttttttgtgggcttatgctgcacaattggcagtaaccaaaatatccactgaggatgatggattggtgcggaacattgatggaataggtgatcaggaagttatcaaacctgaaaatggagagcatcaagatagtaccctcaaagaggatgttccagaacagggaaaggatgatgtccgggaggttaaagtagagcagaacagtgaaccatgtgccggctctagttctgaatctgatctccagacagtgtttaagaatgaaagcctcaacgcagaatcaaaatctggctgcaaacttcaggagcttaaagctaagcagcttataaagaaagacactgccacctattggcccctgaactggcgtagcaagttgtgtacctgccaagactgtatgaaaatgtatggagatctagatgtcttattcctgacagatgaatacgacacagttctggcttatgaaaacaaagggaagattgcccaggccactgacaggagcgatcccctaatggatacccttagcagcatgaatagagtccagcaagtggaactcatttgtgaatacaatgatttgaagactgaacttaaagactatctcaagagatttgctgatgaaggcacggttgttaagagagaggacattcagcagttctttgaagagtttcagtcaaaaaagagaagaagagtggatgggatgcagtattactgcagctagagtggagtatgaagctttctcattcaagccaatgaaaatgcgcttcccattcttggaataaaagaggtgtggttcacatttggccccctttccgtcctcctctgtttggagaggcctcgcgctcccttcattctctttagctgcagtagccaccgtgtggatgctgacttcacagccagcgtcctctgtgactcagctgatgcagctcattccacagacttctccagtgtactcctactccagtgcacccagggttatttgcatagtttttaagtttgattttgttttgagaaagcaaattggtgtcttgtttaatgatctgttatttcactcccagatgtgtgtgttttgccacagagctgttgccttccagaacctcctccgcaggcatcacggaaggctctcttcccgtcacctagaacctctacaggtcccctcgcccctatgatcgtggtgccttgggtcaaagcttcctcaagcctggtctgctccttctttcacgtccctgttttctgaggtttggtcatagcttagaaaggatcttggggcttgttttctctaggcccaacctccagagtagccaggactgatggttttctggtctggatgtctgtcacaggcggagagattaacagatgacagggttgaggaagcaagcctttgttatgaattttactaatacagttcaagtgaaattttcgttcatgattctattggcactagaattagaatttcagtactgtagtgctcacagggcttcctggagaacatttgcccgtatactagtcccttctctgctgcctagaaaacagaccgggtctcacccctgtgaaatcttggtggtttacgaagtcctctggatttcttgatattatcagggatattcataagcatatatcaaaaatggacctattttgatattctgttatgaaaatgttattagaaccccaataaattattatttttcccccttgaatctgctaaagaaaacagatcctgacttagcttacttgaaataagcagggcagggagccctgttttggaagagacagactgtggaagagattacaaacaaggcccgaggctgcacgaatgatgagttttgtgtatataatgttaatgtccaccgccacttccctaacgactatgagatcttttttttgaagatcctcatggaaggttgtacagagccccacatttgaggggaagtcctttcagttgatatgagatctctttaacacccctcagtctatgtaggaaatgccttgtgatacatagagaaccctcagcttctctctgcctctggaggaccaaggtctttcctgacagtcggagacacaccttgatgtatgttaataaaagcatttcaggctgtggggccaccatgtatattaatactccttatgtgtccagcatctgtgtattcattcgagtgcccaatccctggatgagatgaactaggccttataaaaagtcaaagcctcaaagaaatggcacaaccatgttcttcggcactcaggctcctaattgcagatcctcacgaagggtggtatgtggagctggaaggtcttgtggccacaggacatgctggtgagccctgagctggccttgtgcagagggctccgttcaaaggctcggggtgtctttgaggttgtttatcaagctggggaactcttccaagtctgacaatgtttcgaaccctttttgcaaggttgcactattagtataccatcatgtccggaaaacttttaatcttctcaaatatctgatgtaactaccagaaagtcccttacttcctatgaccaatcaggaccaagtcttggaggtgatgtgttacattacgtgcagcacaatagtaccgatcagttaactcagcgctgaagggcttgttttatgaaaggtactattccttctttcacattaactggaaacctctttttttacctgttgttcacaactagttttcttattgactgtattggactgtctcttcttgtagagactgattttggccaacatattaatgcatgttttatgcaaaacacaaatatgatattagttgcttttaaggagttctggcattgtatgtgcatttttgtagaaattgttactggacttataattacatacttaactctgatcaggtttctgtaaaatttaaataaaaccaatacaaaata

SEQ ID NO: 33496 - DNA, 3552 bp, Homo sapiens
  source 1..3552: mol_type = unassigned DNA
agaacacgacaccgggaagcgccacccggaggcggaaatcagcccgcgtccggcgcaggcgggagaagggagaggagtgacatccgtttgtcggaagtcgctcctcccccttccttcgctttttttccttgtcattggttcctggcactcgggccccacctcctccggctacgcccctcacggccgcttttcccgcctccgccggggccgagccgctgttcggctgacagttgaggatggccggagccgagggcgccgctgggcggcagtcggagctggagcccgtggtatcgttggtcgacgtccttgaggaggacgaggagctggagaatgaggcgtgcgctgtcctgggcggcagcgactccgagaagtgctcctactctcagaaattttcgttgtgattgtggaaacagcaagtttaaaaatttggaatgcaaattacttcctgacaaagcaaaggtaaattctggcaataagtacaatgacaacttttttggattgtactgcatttgcaagagaccttatcctgatcctgaagacgagattccagatgagatgatccagtgcgtagtctgtgaagactggttccatggaaggcatcttggtgccattccccctgagagtggggattttcaggagatggtatgccaggcctgcatgaaacgttgttcttttttgtgggcttatgctgcacaattggcagtaaccaaaatatccactgaggatgatggattggtgcggaacattgatggaataggtgatcaggaagttatcaaacctgaaaatggagagcatcaagatagtaccctcaaagaggatgttccagaacagggaaaggatgatgtccgggaggttaaagtagagcagaacagtgaaccatgtgccggctctagttctgaatctgatctccagacagtgtttaagaatgaaagcctcaacgcagaatcaaaatctggctgcaaacttcaggagcttaaagctaagcagcttataaagaaagacactgccacctattggcccctgaactggcgtagcaagttgtgtacctgccaagactgtatgaaaatgtatggagatctagatgtcttattcctgacagatgaatacgacacagttctggcttatgaaaacaaagggaagattgcccaggccactgacaggagcgatcccctaatggatacccttagcagcatgaatagagtccagcaagtggaactcatttgtgaatacaatgatttgaagactgaacttaaagactatctcaagagatttgctgatgaaggcacggttgttaagagagaggacattcagcagttctttgaagagtttcagtcaaaaaagagaagaagagtggatgggatgcagtattactgcagctagagtggagtatgaagctttctcattcaagccaatgaaaatgcgcttcccattcttggaataaaagaggtgtggttcacatttggccccctttccgtcctcctctgtttggagaggcctcgcgctcccttcattctctttagctgcagtagccaccgtgtggatgctgacttcacagccagcgtcctctgtgactcagctgatgcagctcattccacagacttctccagtgtactcctactccagtgcacccagggttatttgcatagtttttaagtttgattttgttttgagaaagcaaattggtgtcttgtttaatgatctgttatttcactcccagatgtgtgtgttttgccacagagctgttgccttccagaacctcctccgcaggcatcacggaaggctctcttcccgtcacctagaacctctacaggtcccctcgcccctatgatcgtggtgccttgggtcaaagcttcctcaagcctggtctgctccttctttcacgtccctgttttctgaggtttggtcatagcttagaaaggatcttggggcttgttttctctaggcccaacctccagagtagccaggactgatggttttctggtctggatgtctgtcacaggcggagagattaacagatgacagggttgaggaagcaagcctttgttatgaattttactaatacagttcaagtgaaattttcgttcatgattctattggcactagaattagaatttcagtactgtagtgctcacagggcttcctggagaacatttgcccgtatactagtcccttctctgctgcctagaaaacagaccgggtctcacccctgtgaaatcttggtggtttacgaagtcctctggatttcttgatattatcagggatattcataagcatatatcaaaaatggacctattttgatattctgttatgaaaatgttattagaaccccaataaattattatttttcccccttgaatctgctaaagaaaacagatcctgacttagcttacttgaaataagcagggcagggagccctgttttggaagagacagactgtggaagagattacaaacaaggcccgaggctgcacgaatgatgagttttgtgtatataatgttaatgtccaccgccacttccctaacgactatgagatcttttttttgaagatcctcatggaaggttgtacagagccccacatttgaggggaagtcctttcagttgatatgagatctctttaacacccctcagtctatgtaggaaatgccttgtgatacatagagaaccctcagcttctctctgcctctggaggaccaaggtctttcctgacagtcggagacacaccttgatgtatgttaataaaagcatttcaggctgtggggccaccatgtatattaatactccttatgtgtccagcatctgtgtattcattcgagtgcccaatccctggatgagatgaactaggccttataaaaagtcaaagcctcaaagaaatggcacaaccatgttcttcggcactcaggctcctaattgcagatcctcacgaagggtggtatgtggagctggaaggtcttgtggccacaggacatgctggtgagccctgagctggccttgtgcagagggctccgttcaaaggctcggggtgtctttgaggttgtttatcaagctggggaactcttccaagtctgacaatgtttcgaaccctttttgcaaggttgcactattagtataccatcatgtccggaaaacttttaatcttctcaaatatctgatgtaactaccagaaagtcccttacttcctatgaccaatcaggaccaagtcttggaggtgatgtgttacattacgtgcagcacaatagtaccgatcagttaactcagcgctgaagggcttgttttatgaaaggtactattccttctttcacattaactggaaacctctttttttacctgttgttcacaactagttttcttattgactgtattggactgtctcttcttgtagagactgattttggccaacatattaatgcatgttttatgcaaaacacaaatatgatattagttgcttttaaggagttctggcattgtatgtgcatttttgtagaaattgttactggacttataattacatacttaactctgatcaggtttctgtaaaatttaaataaaaccaat

SEQ ID NO: 33497 - DNA, 3550 bp, Homo sapiens
  source 1..3550: mol_type = unassigned DNA
agaacacgacaccgggaagcgccacccggaggcggaaatcagcccgcgtccggcgcaggcgggagaagggagaggagtgacatccgtttgtcggaagtcgctcctcccccttccttcgctttttttccttgtcattggttcctggcactcgggccccacctcctccggctacgcccctcacggccgcttttcccgcctccgccggggccgagccgctgttcggctgacagttgaggatggccggagccgagggcgccgctgggcggcagtcggagctggagcccgtggtatcgttggtcgacgtccttgaggaggacgaggagctggagaatgaggcgtgcgctgtcctgggcggcagcgactccgagaagtgctcctactctcagaaattttcgttgtgattgtggaaacagcaagtttaaaaatttggaatgcaaattacttcctgacaaagcaaaggtaaattctggcaataagtacaatgacaacttttttggattgtactgcatttgcaagagaccttatcctgatcctgaagacgagattccagatgagatgatccagtgcgtagtctgtgaagactggttccatggaaggcatcttggtgccattccccctgagagtggggattttcaggagatggtatgccaggcctgcatgaaacgttgttcttttttgtgggcttatgctgcacaattggcagtaaccaaaatatccactgaggatgatggattggtgcggaacattgatggaataggtgatcaggaagttatcaaacctgaaaatggagagcatcaagatagtaccctcaaagaggatgttccagaacagggaaaggatgatgtccgggaggttaaagtagagcagaacagtgaaccatgtgccggctctagttctgaatctgatctccagacagtgtttaagaatgaaagcctcaacgcagaatcaaaatctggctgcaaacttcaggagcttaaagctaagcagcttataaagaaagacactgccacctattggcccctgaactggcgtagcaagttgtgtacctgccaagactgtatgaaaatgtatggagatctagatgtcttattcctgacagatgaatacgacacagttctggcttatgaaaacaaagggaagattgcccaggccactgacaggagcgatcccctaatggatacccttagcagcatgaatagagtccagcaagtggaactcatttgtgaatacaatgatttgaagactgaacttaaagactatctcaagagatttgctgatgaaggcacggttgttaagagagaggacattcagcagttctttgaagagtttcagaaaaaagagaagaagagtggatgggatgcagtattactgcagctagagtggagtatgaagctttctcattcaagccaatgaaaatgcgcttcccattcttggaataaaagaggtgtggttcacatttggccccctttccgtcctcctctgtttggagaggcctcgcgctcccttcattctctttagctgcagtagccaccgtgtggatgctgacttcacagccagcgtcctctgtgactcagctgatgcagctcattccacagacttctccagtgtactcctactccagtgcacccagggttatttgcatagtttttaagtttgattttgttttgagaaagcaaattggtgtcttgtttaatgatctgttatttcactcccagatgtgtgtgttttgccacagagctgttgccttccagaacctcctccgcaggcatcacggaaggctctcttcccgtcacctagaacctctacaggtcccctcgcccctatgatcgtggtgccttgggtcaaagcttcctcaagcctggtctgctccttctttcacgtccctgttttctgaggtttggtcatagcttagaaaggatcttggggcttgttttctctaggcccaacctccagagtagccaggactgatggttttctggtctggatgtctgtcacaggcggagagattaacagatgacagggttgaggaagcaagcctttgttatgaattttactaatacagttcaagtgaaattttcgttcatgattctattggcactagaattagaatttcagtactgtagtgctcacagggcttcctggagaacatttgcccgtatactagtcccttctctgctgcctagaaaacagaccgggtctcacccctgtgaaatcttggtggtttacgaagtcctctggatttcttgatattatcagggatattcataagcatatatcaaaaatggacctattttgatattctgttatgaaaatgttattagaaccccaataaattattatttttcccccttgaatctgctaaagaaaacagatcctgacttagcttacttgaaataagcagggcagggagccctgttttggaagagacagactgtggaagagattacaaacaaggcccgaggctgcacgaatgatgagttttgtgtatataatgttaatgtccaccgccacttccctaacgactatgagatcttttttttgaagatcctcatggaaggttgtacagagccccacatttgaggggaagtcctttcagttgatatgagatctctttaacacccctcagtctatgtaggaaatgccttgtgatacatagagaaccctcagcttctctctgcctctggaggaccaaggtctttcctgacagtcggagacacaccttgatgtatgttaataaaagcatttcaggctgtggggccaccatgtatattaatactccttatgtgtccagcatctgtgtattcattcgagtgcccaatccctggatgagatgaactaggccttataaaaagtcaaagcctcaaagaaatggcacaaccatgttcttcggcactcaggctcctaattgcagatcctcacgaagggtggtatgtggagctggaaggtcttgtggccacaggacatgctggtgagccctgagctggccttgtgcagagggctccgttcaaaggctcggggtgtctttgaggttgtttatcaagctggggaactcttccaagtctgacaatgtttcgaaccctttttgcaaggttgcactattagtataccatcatgtccggaaaacttttaatcttctcaaatatctgatgtaactaccagaaagtcccttacttcctatgaccaatcaggaccaagtcttggaggtgatgtgttacattacgtgcagcacaatagtaccgatcagttaactcagcgctgaagggcttgttttatgaaaggtactattccttctttcacattaactggaaacctctttttttacctgttgttcacaactagttttcttattgactgtattggactgtctcttcttgtagagactgattttggccaacatattaatgcatgttttatgcaaaacacaaatatgatattagttgcttttaaggagttctggcattgtatgtgcatttttgtagaaattgttactggacttataattacatacttaactctgatcaggtttctgtaaaatttaaataaaaccaat

SEQ ID NO: 33498 - DNA, 5179 bp, Homo sapiens
  source 1..5179: mol_type = unassigned DNA
ccaagatggtggcgctgggctcggggtgactacaggagacgacggggccttttcccttcgccaggacccgacacaccaggcttcgctcgctcgcgcacccctccgccgcgtagccatccgccagcgcgggcgcccgccatccgccgcctacttacgcttcacctctgccgacccggcgcgctcggctgcgggcggcggcgcctccttcggctcctcctcggaatagctcgcggcctgtagcccctggcaggagggcccctcagccccccggtgtggacaggcagcggcggctggcgacgaacgccgggatttcggcggccccggcgctccctttcccggcctcgttttccggataaggaagcgcgggtcccgcatgagccccggcggtggcggcagcgaaagagaacgaggcggtggcgggcggaggcggcgggcgagggcgactacgaccagtgaggcggccgccgcagcccaggcgcgggggcgacgacaggttaaaaatctgtaagagcctgattttagaattcaccagctcctcagaagtttggcgaaatatgagttattaagcctacgctcagatcaaggtagcagctagactggtgtgacaacctgtttttaatcagtgactcaaagctgtgatcaccctgatgtcaccgaatggccacagcttgtaaaagatcaggagaacctcagtctgacgacattgaagctagccgaatgaagcgagcagctgcaaagcatctaatagaacgctactaccaccagttaactgagggctgtggaaatgaagcctgcacgaatgagttttgtgcttcctgtccaacttttcttcgtatggataataatgcagcagctattaaagccctcgagctttataagattaatgcaaaactctgtgatcctcatccctccaagaaaggagcaagctcagcttaccttgagaactcgaaaggtgcccccaacaactcctgctctgagataaaaatgaacaagaaaggcgctagaattgattttaaagatgtgacttacttaacagaagagaaggtatatgaaattcttgaattatgtagagaaagagaggattattcccctttaatccgtgttattggaagagttttttctagtgctgaggcattggtacagagcttccggaaagttaaacaacacaccaaggaagaactgaaatctcttcaagcaaaagatgaagacaaagatgaagatgaaaaggaaaaagctgcatgttctgctgctgctatggaagaagactcagaagcatcttcctcaaggataggtgatagctcacagggagacaacaatttgcaaaaattaggccctgatgatgtgtctgtggatattgatgccattagaagggtctacaccagattgctctctaatgaaaaaattgaaactgcctttctcaatgcacttgtatatttgtcacctaacgtggaatgtgacttgacgtatcacaatgtatactctcgagatcctaattatctgaatttgttcattatcgtaatggagaatagaaatctccacagtcctgaatatctggaaatggctttgccattattttgcaaagcgatgagcaagctaccccttgcagcccaaggaaaactgatcagactgtggtctaaatacaatgcagaccagattcggagaatgatggagacatttcagcaacttattacttataaagtcataagcaatgaatttaacagtcgaaatctagtgaatgatgatgatgccattgttgctgcttcgaagtgcttgaaaatggtttactatgcaaatgtagtgggaggggaagtggacacaaatcacaatgaagaagatgatgaagagcccatccctgagtccagcgagctgacacttcaggaacttttgggagaagaaagaagaaacaagaaaggtcctcgagtggaccccctggaaactgaacttggtgttaaaaccctggattgtcgaaaaccacttatcccttttgaagagtttattaatgaaccactgaatgaggttctagaaatggataaagattatacttttttcaaagtagaaacagagaacaaattctcttttatgacatgtccctttatattgaatgctgtcacaaagaatttgggattatattatgacaatagaattcgcatgtacagtgaacgaagaatcactgttctctacagcttagttcaaggacagcagttgaatccatatttgagactcaaagttagacgtgaccatatcatagatgatgcacttgtccggctagagatgatcgctatggaaaatcctgcagacttgaagaagcagttgtatgtggaatttgaaggagaacaaggagttgatgagggaggtgtttccaaagaattttttcagctggttgtggaggaaatcttcaatccagatattggtatgttcacatacgatgaatctacaaaattgttttggtttaatccatcttcttttgaaactgagggtcagtttactctgattggcatagtactgggtctggctatttacaataactgtatactggatgtacattttcccatggttgtctacaggaagctaatggggaaaaaaggaacttttcgtgacttgggagactctcacccagttctatatcagagtttaaaagatttattggagtatgaagggaatgtggaagatgacatgatgatcactttccagatatcacagacagatctttttggtaacccaatgatgtatgatctaaaggaaaatggtgataaaattccaattacaaatgaaaacaggaaggaatttgtcaatctttattctgactacattctcaataaatcagtagaaaaacagttcaaggcttttcggagaggttttcatatggtgaccaatgaatctcccttaaagtacttattcagaccagaagaaattgaattgcttatatgtggaagccggaatctagatttccaagcactagaagaaactacagaatatgacggtggctataccagggactctgttctgattagggagttctgggaaatcgttcattcatttacagatgaacagaaaagactcttcttgcagtttacaacgggcacagacagagcacctgtgggaggactaggaaaattaaagatgattatagccaaaaatggcccagacacagaaaggttacctacatctcatacttgctttaatgtgcttttacttccggaatactcaagcaaagaaaaacttaaagagagattgttgaaggccatcacgtatgccaaaggatttggcatgctgtaaaacaaaacaaaacaaaataaaacaaaaaaaaggaaggaaaaaaaaagaaaaaatttaaaaaattttaaaaatataacgagggataaatttttggtggtgatagtgtcccagtacaaaaaggctgtaagatagtcaaccacagtagtcacctatgtctgtgcctcccttctttattggggacatgtgggctggaacagcagatttcagctacatatatgaacaaatcctttattattattataattatttttttgcgtgaaagtgttacatattctttcacttgtatgtacagagaggtttttctgaatatttattttaagggttaaatcacttttgcttgtgtttattactgcttgaggttgagccttttgagtatttaaaaaatatataccaacagaactactctcccaaggaaaatattgccaccatttgtagaccacgtaaccttcaagtatgtgctacttttttgtccctgtatctaactcaaatcaggaactgtattttttttaatgatttgcttttgaaacttgaagtcttgaaaacagtgtgatgcaattactgctgttctagcccccaaagagttttctgtgcaaaatcttgagaatcaatcaataaagaaagatggaaggaagggagaaattggaatgttttaactgcagccctcagaactttagtaacagcacaacaaattaaaaacaaaaacaactcatgccacagtatgtcgtcttcatgtgtcttgcaatgaactgtttcagtagccaatcctctttcttagtatatgaaaggacagggatttttgttcttgttgttctcgttgttgttttaagtttactggggaaagtgcatttggccaaatgaaatggtagtcaagcctattgcaacaaagttaggaagtttgttgtttgtttattataaacaaaaagcatgtgaaagtgcacttaagatagagtttttattaattacttacttattacctagattttaaatagacaatccaaagtctccccttcgtgttgccatcatcttgttgaatcagccattttatcgaggcacgtgatcagtgttgcaacataatgaaaaagatggctactgtgccttgtgttacttaatcatacagtaagctgacctggaaatgaatgaaactattactcctaagaattacattgtatagccccacagattaaatttaattaattaattcaaaacatgttaaacgttactttcatgtactatggaaaagtacaagtaggtttacattactgatttccagaagtaagtagtttcccctttcctagtcttctgtgtatgtgatgttgttaatttcttttattgcattataaaataaaaggattatgtatttttaactaaggtgagacattgatatatccttttgctacaagctatagctaatgtgctgagcttgtgccttggtgattgattgattgattgactgattgttttaactgattactgtagatcaacctgatgatttgtttgtttgaaattggcaggaaaaatgcagctttcaaatcattggggggagaaaaaggatgtctttcaggattattttaattaatttttttcataattgagacagaactgtttgttatgtaccataatgctaaataaaactgtggcacttttcaccataatttaatttagtggaaaaagaagacaatgctttccatattgtgataaggtaacatggggtttttctgggccagcctttagaacactgttagggtacatacgctaccttgatgaaagggaccttcgtgcaactgtagtcatcttaaaggcttctcatccactgtgcttcttaatgtgtaattaaagtgaggagaaattaaatactctgagggcgttttatataataaattcgtgaagaaatgtgtgctcttca

SEQ ID NO: 33499 - DNA, 4507 bp, Homo sapiens
  source 1..4507: mol_type = unassigned DNA
atgagatctgtgtgtcatagatcaggagaacctcagtctgacgacattgaagctagccgaatgaagcgagcagctgcaaagcatctaatagaacgctactaccaccagttaactgagggctgtggaaatgaagcctgcacgaatgagttttgtgcttcctgtccaacttttcttcgtatggataataatgcagcagctattaaagccctcgagctttataagattaatgcaaaactctgtgatcctcatccctccaagaaaggagcaagctcagcttaccttgagaactcgaaaggtgcccccaacaactcctgctctgagataaaaatgaacaagaaaggcgctagaattgattttaaagatgtgacttacttaacagaagagaaggtatatgaaattcttgaattatgtagagaaagagaggattattcccctttaatccgtgttattggaagagttttttctagtgctgaggcattggtacagagcttccggaaagttaaacaacacaccaaggaagaactgaaatctcttcaagcaaaagatgaagacaaagatgaagatgaaaaggaaaaagctgcatgttctgctgctgctatggaagaagactcagaagcatcttcctcaaggataggtgatagctcacagggagacaacaatttgcaaaaattaggccctgatgatgtgtctgtggatattgatgccattagaagggtctacaccagattgctctctaatgaaaaaattgaaactgcctttctcaatgcacttgtatatttgtcacctaacgtggaatgtgacttgacgtatcacaatgtatactctcgagatcctaattatctgaatttgttcattatcgtaatggagaatagaaatctccacagtcctgaatatctggaaatggctttgccattattttgcaaagcgatgagcaagctaccccttgcagcccaaggaaaactgatcagactgtggtctaaatacaatgcagaccagattcggagaatgatggagacatttcagcaacttattacttataaagtcataagcaatgaatttaacagtcgaaatctagtgaatgatgatgatgccattgttgctgcttcgaagtgcttgaaaatggtttactatgcaaatgtagtgggaggggaagtggacacaaatcacaatgaagaagatgatgaagagcccatccctgagtccagcgagctgacacttcaggaacttttgggagaagaaagaagaaacaagaaaggtcctcgagtggaccccctggaaactgaacttggtgttaaaaccctggattgtcgaaaaccacttatcccttttgaagagtttattaatgaaccactgaatgaggttctagaaatggataaagattatacttttttcaaagtagaaacagagaacaaattctcttttatgacatgtccctttatattgaatgctgtcacaaagaatttgggattatattatgacaatagaattcgcatgtacagtgaacgaagaatcactgttctctacagcttagttcaaggacagcagttgaatccatatttgagactcaaagttagacgtgaccatatcatagatgatgcacttgtccggctagagatgatcgctatggaaaatcctgcagacttgaagaagcagttgtatgtggaatttgaaggagaacaaggagttgatgagggaggtgtttccaaagaattttttcagctggttgtggaggaaatcttcaatccagatattggtatgttcacatacgatgaatctacaaaattgttttggtttaatccatcttcttttgaaactgagggtcagtttactctgattggcatagtactgggtctggctatttacaataactgtatactggatgtacattttcccatggttgtctacaggaagctaatggggaaaaaaggaacttttcgtgacttgggagactctcacccagttctatatcagagtttaaaagatttattggagtatgaagggaatgtggaagatgacatgatgatcactttccagatatcacagacagatctttttggtaacccaatgatgtatgatctaaaggaaaatggtgataaaattccaattacaaatgaaaacaggaaggaatttgtcaatctttattctgactacattctcaataaatcagtagaaaaacagttcaaggcttttcggagaggttttcatatggtgaccaatgaatctcccttaaagtacttattcagaccagaagaaattgaattgcttatatgtggaagccggaatctagatttccaagcactagaagaaactacagaatatgacggtggctataccagggactctgttctgattagggagttctgggaaatcgttcattcatttacagatgaacagaaaagactcttcttgcagtttacaacgggcacagacagagcacctgtgggaggactaggaaaattaaagatgattatagccaaaaatggcccagacacagaaaggttacctacatctcatacttgctttaatgtgcttttacttccggaatactcaagcaaagaaaaacttaaagagagattgttgaaggccatcacgtatgccaaaggatttggcatgctgtaaaacaaaacaaaacaaaataaaacaaaaaaaaggaaggaaaaaaaaagaaaaaatttaaaaaattttaaaaatataacgagggataaatttttggtggtgatagtgtcccagtacaaaaaggctgtaagatagtcaaccacagtagtcacctatgtctgtgcctcccttctttattggggacatgtgggctggaacagcagatttcagctacatatatgaacaaatcctttattattattataattatttttttgcgtgaaagtgttacatattctttcacttgtatgtacagagaggtttttctgaatatttattttaagggttaaatcacttttgcttgtgtttattactgcttgaggttgagccttttgagtatttaaaaaatatataccaacagaactactctcccaaggaaaatattgccaccatttgtagaccacgtaaccttcaagtatgtgctacttttttgtccctgtatctaactcaaatcaggaactgtattttttttaatgatttgcttttgaaacttgaagtcttgaaaacagtgtgatgcaattactgctgttctagcccccaaagagttttctgtgcaaaatcttgagaatcaatcaataaagaaagatggaaggaagggagaaattggaatgttttaactgcagccctcagaactttagtaacagcacaacaaattaaaaacaaaaacaactcatgccacagtatgtcgtcttcatgtgtcttgcaatgaactgtttcagtagccaatcctctttcttagtatatgaaaggacagggatttttgttcttgttgttctcgttgttgttttaagtttactggggaaagtgcatttggccaaatgaaatggtagtcaagcctattgcaacaaagttaggaagtttgttgtttgtttattataaacaaaaagcatgtgaaagtgcacttaagatagagtttttattaattacttacttattacctagattttaaatagacaatccaaagtctccccttcgtgttgccatcatcttgttgaatcagccattttatcgaggcacgtgatcagtgttgcaacataatgaaaaagatggctactgtgccttgtgttacttaatcatacagtaagctgacctggaaatgaatgaaactattactcctaagaattacattgtatagccccacagattaaatttaattaattaattcaaaacatgttaaacgttactttcatgtactatggaaaagtacaagtaggtttacattactgatttccagaagtaagtagtttcccctttcctagtcttctgtgtatgtgatgttgttaatttcttttattgcattataaaataaaaggattatgtatttttaactaaggtgagacattgatatatccttttgctacaagctatagctaatgtgctgagcttgtgccttggtgattgattgattgattgactgattgttttaactgattactgtagatcaacctgatgatttgtttgtttgaaattggcaggaaaaatgcagctttcaaatcattggggggagaaaaaggatgtctttcaggattattttaattaatttttttcataattgagacagaactgtttgttatgtaccataatgctaaataaaactgtggcacttttcaccataatttaatttagtggaaaaagaagacaatgctttccatattgtgataaggtaacatggggtttttctgggccagcctttagaacactgttagggtacatacgctaccttgatgaaagggaccttcgtgcaactgtagtcatcttaaaggcttctcatccactgtgcttcttaatgtgtaattaaagtgaggagaaattaaatactctgagggcgttttatataataaattcgtgaaga

SEQ ID NO: 33500 - DNA, 4516 bp, Homo sapiens
  source 1..4516: mol_type = unassigned DNA
atggagaagctgcaccagtgttattggaaatcaggagaacctcagtctgacgacattgaagctagccgaatgaagcgagcagctgcaaagcatctaatagaacgctactaccaccagttaactgagggctgtggaaatgaagcctgcacgaatgagttttgtgcttcctgtccaacttttcttcgtatggataataatgcagcagctattaaagccctcgagctttataagattaatgcaaaactctgtgatcctcatccctccaagaaaggagcaagctcagcttaccttgagaactcgaaaggtgcccccaacaactcctgctctgagataaaaatgaacaagaaaggcgctagaattgattttaaagatgtgacttacttaacagaagagaaggtatatgaaattcttgaattatgtagagaaagagaggattattcccctttaatccgtgttattggaagagttttttctagtgctgaggcattggtacagagcttccggaaagttaaacaacacaccaaggaagaactgaaatctcttcaagcaaaagatgaagacaaagatgaagatgaaaaggaaaaagctgcatgttctgctgctgctatggaagaagactcagaagcatcttcctcaaggataggtgatagctcacagggagacaacaatttgcaaaaattaggccctgatgatgtgtctgtggatattgatgccattagaagggtctacaccagattgctctctaatgaaaaaattgaaactgcctttctcaatgcacttgtatatttgtcacctaacgtggaatgtgacttgacgtatcacaatgtatactctcgagatcctaattatctgaatttgttcattatcgtaatggagaatagaaatctccacagtcctgaatatctggaaatggctttgccattattttgcaaagcgatgagcaagctaccccttgcagcccaaggaaaactgatcagactgtggtctaaatacaatgcagaccagattcggagaatgatggagacatttcagcaacttattacttataaagtcataagcaatgaatttaacagtcgaaatctagtgaatgatgatgatgccattgttgctgcttcgaagtgcttgaaaatggtttactatgcaaatgtagtgggaggggaagtggacacaaatcacaatgaagaagatgatgaagagcccatccctgagtccagcgagctgacacttcaggaacttttgggagaagaaagaagaaacaagaaaggtcctcgagtggaccccctggaaactgaacttggtgttaaaaccctggattgtcgaaaaccacttatcccttttgaagagtttattaatgaaccactgaatgaggttctagaaatggataaagattatacttttttcaaagtagaaacagagaacaaattctcttttatgacatgtccctttatattgaatgctgtcacaaagaatttgggattatattatgacaatagaattcgcatgtacagtgaacgaagaatcactgttctctacagcttagttcaaggacagcagttgaatccatatttgagactcaaagttagacgtgaccatatcatagatgatgcacttgtccggctagagatgatcgctatggaaaatcctgcagacttgaagaagcagttgtatgtggaatttgaaggagaacaaggagttgatgagggaggtgtttccaaagaattttttcagctggttgtggaggaaatcttcaatccagatattggtatgttcacatacgatgaatctacaaaattgttttggtttaatccatcttcttttgaaactgagggtcagtttactctgattggcatagtactgggtctggctatttacaataactgtatactggatgtacattttcccatggttgtctacaggaagctaatggggaaaaaaggaacttttcgtgacttgggagactctcacccagttctatatcagagtttaaaagatttattggagtatgaagggaatgtggaagatgacatgatgatcactttccagatatcacagacagatctttttggtaacccaatgatgtatgatctaaaggaaaatggtgataaaattccaattacaaatgaaaacaggaaggaatttgtcaatctttattctgactacattctcaataaatcagtagaaaaacagttcaaggcttttcggagaggttttcatatggtgaccaatgaatctcccttaaagtacttattcagaccagaagaaattgaattgcttatatgtggaagccggaatctagatttccaagcactagaagaaactacagaatatgacggtggctataccagggactctgttctgattagggagttctgggaaatcgttcattcatttacagatgaacagaaaagactcttcttgcagtttacaacgggcacagacagagcacctgtgggaggactaggaaaattaaagatgattatagccaaaaatggcccagacacagaaaggttacctacatctcatacttgctttaatgtgcttttacttccggaatactcaagcaaagaaaaacttaaagagagattgttgaaggccatcacgtatgccaaaggatttggcatgctgtaaaacaaaacaaaacaaaataaaacaaaaaaaaggaaggaaaaaaaaagaaaaaatttaaaaaattttaaaaatataacgagggataaatttttggtggtgatagtgtcccagtacaaaaaggctgtaagatagtcaaccacagtagtcacctatgtctgtgcctcccttctttattggggacatgtgggctggaacagcagatttcagctacatatatgaacaaatcctttattattattataattatttttttgcgtgaaagtgttacatattctttcacttgtatgtacagagaggtttttctgaatatttattttaagggttaaatcacttttgcttgtgtttattactgcttgaggttgagccttttgagtatttaaaaaatatataccaacagaactactctcccaaggaaaatattgccaccatttgtagaccacgtaaccttcaagtatgtgctacttttttgtccctgtatctaactcaaatcaggaactgtattttttttaatgatttgcttttgaaacttgaagtcttgaaaacagtgtgatgcaattactgctgttctagcccccaaagagttttctgtgcaaaatcttgagaatcaatcaataaagaaagatggaaggaagggagaaattggaatgttttaactgcagccctcagaactttagtaacagcacaacaaattaaaaacaaaaacaactcatgccacagtatgtcgtcttcatgtgtcttgcaatgaactgtttcagtagccaatcctctttcttagtatatgaaaggacagggatttttgttcttgttgttctcgttgttgttttaagtttactggggaaagtgcatttggccaaatgaaatggtagtcaagcctattgcaacaaagttaggaagtttgttgtttgtttattataaacaaaaagcatgtgaaagtgcacttaagatagagtttttattaattacttacttattacctagattttaaatagacaatccaaagtctccccttcgtgttgccatcatcttgttgaatcagccattttatcgaggcacgtgatcagtgttgcaacataatgaaaaagatggctactgtgccttgtgttacttaatcatacagtaagctgacctggaaatgaatgaaactattactcctaagaattacattgtatagccccacagattaaatttaattaattaattcaaaacatgttaaacgttactttcatgtactatggaaaagtacaagtaggtttacattactgatttccagaagtaagtagtttcccctttcctagtcttctgtgtatgtgatgttgttaatttcttttattgcattataaaataaaaggattatgtatttttaactaaggtgagacattgatatatccttttgctacaagctatagctaatgtgctgagcttgtgccttggtgattgattgattgattgactgattgttttaactgattactgtagatcaacctgatgatttgtttgtttgaaattggcaggaaaaatgcagctttcaaatcattggggggagaaaaaggatgtctttcaggattattttaattaatttttttcataattgagacagaactgtttgttatgtaccataatgctaaataaaactgtggcacttttcaccataatttaatttagtggaaaaagaagacaatgctttccatattgtgataaggtaacatggggtttttctgggccagcctttagaacactgttagggtacatacgctaccttgatgaaagggaccttcgtgcaactgtagtcatcttaaaggcttctcatccactgtgcttcttaatgtgtaattaaagtgaggagaaattaaatactctgagggcgttttatataataaattcgtgaaga

SEQ ID NO: 33501 - DNA, 2699 bp, Homo sapiens
  source 1..2699: mol_type = unassigned DNA
atggagaagctgcaccagtgttattggaactcttctgtctgggagatacaagtttggaagcaatcttggggtacttacccacaaggctggtggagaccagatcaggagaacctcagtctgacgacattgaagctagccgaatgaagcgagcagctgcaaagcatctaatagaacgctactaccaccagttaactgagggctgtggaaatgaagcctgcacgaatgagttttgtgcttcctgtccaacttttcttcgtatggataataatgcagcagctattaaagccctcgagctttataagattaatgcaaaactctgtgatcctcatccctccaagaaaggagcaagctcagcttaccttgagaactcgaaaggtgcccccaacaactcctgctctgagataaaaatgaacaagaaaggcgctagaattgattttaaagatgtgacttacttaacagaagagaaggtatatgaaattcttgaattatgtagagaaagagaggattattcccctttaatccgtgttattggaagagttttttctagtgctgaggcattggtacagagcttccggaaagttaaacaacacaccaaggaagaactgaaatctcttcaagcaaaagatgaagacaaagatgaagatgaaaaggaaaaagctgcatgttctgctgctgctatggaagaagactcagaagcatcttcctcaaggataggtgatagctcacagggagacaacaatttgcaaaaattaggccctgatgatgtgtctgtggatattgatgccattagaagggtctacaccagattgctctctaatgaaaaaattgaaactgcctttctcaatgcacttgtatatttgtcacctaacgtggaatgtgacttgacgtatcacaatgtatactctcgagatcctaattatctgaatttgttcattatcgtaatggagaatagaaatctccacagtcctgaatatctggaaatggctttgccattattttgcaaagcgatgagcaagctaccccttgcagcccaaggaaaactgatcagactgtggtctaaatacaatgcagaccagattcggagaatgatggagacatttcagcaacttattacttataaagtcataagcaatgaatttaacagtcgaaatctagtgaatgatgatgatgccattgttgctgcttcgaagtgcttgaaaatggtttactatgcaaatgtagtgggaggggaagtggacacaaatcacaatgaagaagatgatgaagagcccatccctgagtccagcgagctgacacttcaggaacttttgggagaagaaagaagaaacaagaaaggtcctcgagtggaccccctggaaactgaacttggtgttaaaaccctggattgtcgaaaaccacttatcccttttgaagagtttattaatgaaccactgaatgaggttctagaaatggataaagattatacttttttcaaagtagaaacagagaacaaattctcttttatgacatgtccctttatattgaatgctgtcacaaagaatttgggattatattatgacaatagaattcgcatgtacagtgaacgaagaatcactgttctctacagcttagttcaaggacagcagttgaatccatatttgagactcaaagttagacgtgaccatatcatagatgatgcacttgtccggctagagatgatcgctatggaaaatcctgcagacttgaagaagcagttgtatgtggaatttgaaggagaacaaggagttgatgagggaggtgtttccaaagaattttttcagctggttgtggaggaaatcttcaatccagatattggtatgttcacatacgatgaatctacaaaattgttttggtttaatccatcttcttttgaaactgagggtcagtttactctgattggcatagtactgggtctggctatttacaataactgtatactggatgtacattttcccatggttgtctacaggaagctaatggggaaaaaaggaacttttcgtgacttgggagactctcacccagttctatatcagagtttaaaagatttattggagtatgaagggaatgtggaagatgacatgatgatcactttccagatatcacagacagatctttttggtaacccaatgatgtatgatctaaaggaaaatggtgataaaattccaattacaaatgaaaacaggaaggaatttgtcaatctttattctgactacattctcaataaatcagtagaaaaacagttcaaggcttttcggagaggttttcatatggtgaccaatgaatctcccttaaagtacttattcagaccagaagaaattgaattgcttatatgtggaagccggaatctagatttccaagcactagaagaaactacagaatatgacggtggctataccagggactctgttctgattagggagttctgggaaatcgttcattcatttacagatgaacagaaaagactcttcttgcagtttacaacgggcacagacagagcacctgtgggaggactaggaaaattaaagatgattatagccaaaaatggcccagacacagaaaggttacctacatctcatacttgctttaatgtgcttttacttccggaatactcaagcaaagaaaaacttaaagagagattgttgaaggccatcacgtatgccaaaggatttggcatgctgtaa

SEQ ID NO: 33502 - DNA, 4491 bp, Homo sapiens
  source 1..4491: mol_type = unassigned DNA
acagatcaggagaacctcagtctgacgacattgaagctagccgaatgaagcgagcagctgcaaagcatctaatagaacgctactaccaccagttaactgagggctgtggaaatgaagcctgcacgaatgagttttgtgcttcctgtccaacttttcttcgtatggataataatgcagcagctattaaagccctcgagctttataagattaatgcaaaactctgtgatcctcatccctccaagaaaggagcaagctcagcttaccttgagaactcgaaaggtgcccccaacaactcctgctctgagataaaaatgaacaagaaaggcgctagaattgattttaaagatgtgacttacttaacagaagagaaggtatatgaaattcttgaattatgtagagaaagagaggattattcccctttaatccgtgttattggaagagttttttctagtgctgaggcattggtacagagcttccggaaagttaaacaacacaccaaggaagaactgaaatctcttcaagcaaaagatgaagacaaagatgaagatgaaaaggaaaaagctgcatgttctgctgctgctatggaagaagactcagaagcatcttcctcaaggataggtgatagctcacagggagacaacaatttgcaaaaattaggccctgatgatgtgtctgtggatattgatgccattagaagggtctacaccagattgctctctaatgaaaaaattgaaactgcctttctcaatgcacttgtatatttgtcacctaacgtggaatgtgacttgacgtatcacaatgtatactctcgagatcctaattatctgaatttgttcattatcgtaatggagaatagaaatctccacagtcctgaatatctggaaatggctttgccattattttgcaaagcgatgagcaagctaccccttgcagcccaaggaaaactgatcagactgtggtctaaatacaatgcagaccagattcggagaatgatggagacatttcagcaacttattacttataaagtcataagcaatgaatttaacagtcgaaatctagtgaatgatgatgatgccattgttgctgcttcgaagtgcttgaaaatggtttactatgcaaatgtagtgggaggggaagtggacacaaatcacaatgaagaagatgatgaagagcccatccctgagtccagcgagctgacacttcaggaacttttgggagaagaaagaagaaacaagaaaggtcctcgagtggaccccctggaaactgaacttggtgttaaaaccctggattgtcgaaaaccacttatcccttttgaagagtttattaatgaaccactgaatgaggttctagaaatggataaagattatacttttttcaaagtagaaacagagaacaaattctcttttatgacatgtccctttatattgaatgctgtcacaaagaatttgggattatattatgacaatagaattcgcatgtacagtgaacgaagaatcactgttctctacagcttagttcaaggacagcagttgaatccatatttgagactcaaagttagacgtgaccatatcatagatgatgcacttgtccggctagagatgatcgctatggaaaatcctgcagacttgaagaagcagttgtatgtggaatttgaaggagaacaaggagttgatgagggaggtgtttccaaagaattttttcagctggttgtggaggaaatcttcaatccagatattggtatgttcacatacgatgaatctacaaaattgttttggtttaatccatcttcttttgaaactgagggtcagtttactctgattggcatagtactgggtctggctatttacaataactgtatactggatgtacattttcccatggttgtctacaggaagctaatggggaaaaaaggaacttttcgtgacttgggagactctcacccagttctatatcagagtttaaaagatttattggagtatgaagggaatgtggaagatgacatgatgatcactttccagatatcacagacagatctttttggtaacccaatgatgtatgatctaaaggaaaatggtgataaaattccaattacaaatgaaaacaggaaggaatttgtcaatctttattctgactacattctcaataaatcagtagaaaaacagttcaaggcttttcggagaggttttcatatggtgaccaatgaatctcccttaaagtacttattcagaccagaagaaattgaattgcttatatgtggaagccggaatctagatttccaagcactagaagaaactacagaatatgacggtggctataccagggactctgttctgattagggagttctgggaaatcgttcattcatttacagatgaacagaaaagactcttcttgcagtttacaacgggcacagacagagcacctgtgggaggactaggaaaattaaagatgattatagccaaaaatggcccagacacagaaaggttacctacatctcatacttgctttaatgtgcttttacttccggaatactcaagcaaagaaaaacttaaagagagattgttgaaggccatcacgtatgccaaaggatttggcatgctgtaaaacaaaacaaaacaaaataaaacaaaaaaaaggaaggaaaaaaaaagaaaaaatttaaaaaattttaaaaatataacgagggataaatttttggtggtgatagtgtcccagtacaaaaaggctgtaagatagtcaaccacagtagtcacctatgtctgtgcctcccttctttattggggacatgtgggctggaacagcagatttcagctacatatatgaacaaatcctttattattattataattatttttttgcgtgaaagtgttacatattctttcacttgtatgtacagagaggtttttctgaatatttattttaagggttaaatcacttttgcttgtgtttattactgcttgaggttgagccttttgagtatttaaaaaatatataccaacagaactactctcccaaggaaaatattgccaccatttgtagaccacgtaaccttcaagtatgtgctacttttttgtccctgtatctaactcaaatcaggaactgtattttttttaatgatttgcttttgaaacttgaagtcttgaaaacagtgtgatgcaattactgctgttctagcccccaaagagttttctgtgcaaaatcttgagaatcaatcaataaagaaagatggaaggaagggagaaattggaatgttttaactgcagccctcagaactttagtaacagcacaacaaattaaaaacaaaaacaactcatgccacagtatgtcgtcttcatgtgtcttgcaatgaactgtttcagtagccaatcctctttcttagtatatgaaaggacagggatttttgttcttgttgttctcgttgttgttttaagtttactggggaaagtgcatttggccaaatgaaatggtagtcaagcctattgcaacaaagttaggaagtttgttgtttgtttattataaacaaaaagcatgtgaaagtgcacttaagatagagtttttattaattacttacttattacctagattttaaatagacaatccaaagtctccccttcgtgttgccatcatcttgttgaatcagccattttatcgaggcacgtgatcagtgttgcaacataatgaaaaagatggctactgtgccttgtgttacttaatcatacagtaagctgacctggaaatgaatgaaactattactcctaagaattacattgtatagccccacagattaaatttaattaattaattcaaaacatgttaaacgttactttcatgtactatggaaaagtacaagtaggtttacattactgatttccagaagtaagtagtttcccctttcctagtcttctgtgtatgtgatgttgttaatttcttttattgcattataaaataaaaggattatgtatttttaactaaggtgagacattgatatatccttttgctacaagctatagctaatgtgctgagcttgtgccttggtgattgattgattgattgactgattgttttaactgattactgtagatcaacctgatgatttgtttgtttgaaattggcaggaaaaatgcagctttcaaatcattggggggagaaaaaggatgtctttcaggattattttaattaatttttttcataattgagacagaactgtttgttatgtaccataatgctaaataaaactgtggcacttttcaccataatttaatttagtggaaaaagaagacaatgctttccatattgtgataaggtaacatggggtttttctgggccagcctttagaacactgttagggtacatacgctaccttgatgaaagggaccttcgtgcaactgtagtcatcttaaaggcttctcatccactgtgcttcttaatgtgtaattaaagtgaggagaaattaaatactctgagggcgttttatataataaattcgtgaaga

SEQ ID NO: 33503 - DNA, 5229 bp, Homo sapiens
  source 1..5229: mol_type = unassigned DNA
tctgcagggccgcgcacgcactgacggctgaccgccatcttccctcccgaggcggcagttccaggtgcaagcgccgggtttgctgcccgctgggcgcccctgcagcggcccgagctgtggccggcgtggatgaggggcaggcgaggcagggccgcccctccagtattgccgcccctcccgccccagggcagggctgggagggtacagcccgggggcgggctcgggtcgcctcccggccgccgcgtcctcgctgccccgggccgggcgggcgggcgccgagagcctcccagcccgccccgtgccccgcccgcccggctgcttccgcggcggcgctgcccgcacatgggctaggctgccaggatgttcagcttcgaaggcgacttcaagacgcggcccaaggtgtcccttggcggcgcgagcaggaaggaggaaaaggcttctcttttacatcgtactcaggaagaaagaagaaagagagaggaagaaaggcgaaggttgaaaaatgcaataattatccagtcatttattcgaggctatagagacagaaaacagcaatattccatccaaagaagtgcatttgatcgctgtgctaccttgtcacagtccgggggcgcttttcccattgctaatggccccaaccttacccttttggtaaggcagcttctgtttttttacaaacaaaatgaagactcaaaacgtttgatatggctgtatcagaacttaattaaacacagctctctgtttgtcaagcagttggatggatctgagagacttacatgcttatttcagataaaaagattgatgagcctctgttgcaggttgctgcaaaactgtaatgatgacagtttgaatgttgcacttccaatgagaatgcttgaagtattttcgtctgagaatacttacttgcctgttttacaagatgctagctatgtggtgtcagtgattgaacaaattttgcactacatgattcacaatgggtattataggtctctatatttgttgattaacagcaagcttccatcaagtattgaatattctgatttatctcgagttcctatagcaaaaattttgctagagaatgttctaaaaccattgcactttacttacaactcctgtccggaaggtgcgaggcaacaagtttttacagccttcacagaggagtttctggcagcaccttttacagatcagatttttcatttcatcattccggcgcttgcagatgcgcagaccgttttcccttacgagccctttctgaatgcactgttgttaatagagagtagatgttcaagaaagagtggtggagcaccctggcttttctatttcgttttaactgttggcgaaaattatttgggggccctctctgaggaagggctgctggtgtatttgcgggtgctgcagaccttcctctctcagttaccagtctctcctgccagcgcgagctgtcacgactcagccagtgactctgaggaggagagtgaagaagccgacaagccctcaagcccggaggatggcagactgtcagtatcatacataacagaggaatgcctgaagaagctggacacaaagcagcagaccaacaccctgctcaacctggtgtggagggactctgcgagcgaggaggtcttcaccaccatggcctccgtctgccacacgctgatggtgcagcaccgcatgatggtacccaaagtcaggcttctctacagtttagcctttaatgccaggtttctgagacatctttggtttctaatatcttccatgtcaacacggatgatcacagggtctatggtaccgttgcttcaggtgatatccaggggttctcctatgtcttttgaagattctagtcgaatcatcccactcttttatctttttagctccttgtttagtcattcactaatttccatacatgataacgaattcttcggtgatcccatagaagttgtaggtcaaagacaatcatcaatgatgccttttactttagaagagctgataatgttgtctcgatgccttcgagatgcatgcctggggatcatcaagttggcttatccagaaaccaagccagaagttcgagaagaatatattacagcatttcagagtattggagttactactagctctgaaatgcaacaatgcatacagatggaacagaaaagatggattcagttatttaaggttatcaccaatctagtgaaaatgttgaagtccagagacacgaggagaaatttttgtcctccaaaccactggctgtcagaacaagaagatattaaagcagataaggtcactcagctctatgtgccagcatccagacatgtgtggaggttccggcggatggggaggataggcccgctgcagtccaccctggacgtgggtttggagtccccgccgctgtctgtgtctgaggaaagacagcttgctgtcctgacagagttgccttttgtggttccatttgaggaacgagtaaagatctttcagaggttgatttatgcagataagcaagaagttcaaggagatggtccatttctggatggaattaatgtcacaataagaagaaattacatttatgaagatgcttatgacaaactttctccagaaaatgagcctgatttgaaaaagcggatccgtgtgcacttgctcaatgcccatggcctggatgaagctggcattgatggtggtggtattttcagagagtttttaaatgaactactgaagtcaggatttaaccccaaccaggggttctttaagactactaatgaagggcttctgtaccccaacccggctgctcagatgcttgtgggagattcttttgccagacattactacttcctaggcagaatgcttggaaaggctctctatgagaacatgctggtggagctgccctttgcaggcttctttctttccaagttgcttggaaccagtgccgacgtggacattcaccacctcgcctccctagaccctgaggtgtataagaatttgctctttctgaagagctacgaagacgatgtggaggagcttgggctgaacttcactgtggtgaacaatgacctgggagaggcgcaggtagttgaactaaaattcggtgggaaagacatccctgtcaccagcgccaaccggattgcgtacatccacttggtggcagactacaggctgaacaggcagatccgccagcactgcctggctttccgccagggccttgccaatgtcgtcagcctcgagtggctccgaatgtttgatcagcaagaaattcaggtattaatttctggtgcacaagttcccataagcctagaggacctaaaatcctttacaaactattcaggaggctattctgcagaccatcctgttattaaggtcttctggagagttgtggaagggttcactgatgaagaaaagcgcaaactgctgaagtttgtaacaagctgctctcgaccccctctcttggggtttaaggagttgtatcccgcattttgtattcacaacggaggctccgaccttgagcggctccccacagccagcacctgcatgaacctgctgaagctccccgagttctatgacgagacacttttgcgaagtaaacttctctatgcgattgaatgtgccgctggctttgagctgagctgaagctgatgctggggtcagacccctacagagaaccagtgcttccttcgtcagcagcgcctccccagacccacgaggatactcacactgcacgcctgaggctctcctaagctccttctttcattctgccattcctccctcccttccttttttaaatgatttttattacggtgtggtcacttatttagatggacattgcttttcaaataacttaaaataacacgttatgtgccatgtggctactttagtaatattgccaagaagagcacagtttttacactagtggcatctcagtgaaattaaccaaagatgaagctttggctttgctggtgagatcagagccctcctgagcaggcagcgccactccagggttcagacagggctgcacaggcggcagagatacagggtctgagggctgagacgccatggggccgctgctgcttatgtggttggattgtttacaagcctcattattaaaactgaaggcattttttttttctgctgcctttcccaaagtggttaggtttggaaaagagatgatgatggtaatattttatttgtgctttttaagccatttccccaaatgggactagcatgcttgttttcagtataccgtggcctgcctcatgatggtttggagatactgtctgtggatgtgaggtggggacttcattcattgtcctatttctatctccactttgtgcctggagagctttcaggggaggtggaggaggagggtctgccaagctactgcaacatctgtcacccactatacccagttacttgggggaggacagacactgtggtgtcattaaagttgtttgaaccaaagtggcggctgcatctttgtcccgatgctagccgtgccggtctcccatcatccgctcgccctcctttcccctgggctgcgcccacttgtcttcctggatatttgggggtgactcgccatgcttggcaccctctgcttcctggtgctgctctgactcgaagacgggacagtccctggtgcacatccagggaagaggagtgtcggtagttcttgcagtaggcactttatcaggacctgacctgttgctgggtgattttagtctctacaaacagaaagcgtttcaaagcgtcagctgtgggagcagagtgaccctttgctgatgctggggggaggggatctaaatcctcatttatctcttctatgtctcgtattttactgtcactggaggctctgtgggctgtcatagttaattgaccataattagcaatatacttttaaagtgggaaagctgaatgacacttttaagacaatgaacattatcaaaacaaaatgtataatttcttaatttgaataataaattaagcgtttaaatgctatttgtagtcttgatatacagaaataaaataattagggttggtcttttttattttaggttgttttatgttgaatgttctatatcttattagttaatttgtatattttattagtattttggaaatagcatatctgagactgaagagaaattgacaattcacttatttgtggtttttttctcagctattctgagcttatttatttatttgtatgttctaatggctaaacatttacattaaatgttttttttcccaaga

SEQ ID NO: 33504 - DNA, 1626 bp, Homo sapiens
  source 1..1626: mol_type = unassigned DNA
cctcccagcccgccccgtgccccgcccgcccggctgcttccgcggcggcgctgcccgcacatgggctaggctgccaggatgttcagcttcgaaggcgacttcaagacgcggcccaaggtgtcccttggcggcgcgagcaggaagtattccatccaaagaagtgcatttgatcgctgtgctaccttgtcacagtccgggggcgcttttcccattgctaatggccccaaccttacccttttggtaaggcagcttctgtttttttacaaacaaaatgaagactcaaaacgtttgatatggctgtatcagaacttaattaaacacagctctctgtttgtcaagcagttggatggatctgagagacttacatgcttatttcagataaaaagattgatgagcctctgttgcaggttgctgcaaaactgtaatgatgacagtttgaatgttgcacttccaatgagaatgcttgaagtattttcgtctgagaatacttacttgcctgttttacaagatgctagctatgtggtgtcagtgattgaacaaattttgcactacatgattcacaatgggtattataggtctctatatttgttgattaacagcaagcttccatcaagtattgaatattctgatttatctcgagttcctatagcaaaaattttgctagagaatgttctaaaaccattgcactttacttacaactcctgtccggaaggtgcgaggcaacaagtttttacagccttcacagaggagtttctggcagcaccttttacagatcagatttttcatttcatcattccggcgcttgcagatgcgcagaccgttttcccttacgagccctttctgaatgcactgttgttaatagagagtagatgttcaagaaagagtggtggagcaccctggcttttctatttcgttttaactgttggcgaaaattatttgggggccctctctgaggaagggctgctggtgtatttgcgggtgctgcagaccttcctctctcagttaccagtctctcctgccagcgcgagctgtcacgactcagccagtgactctgaggaggagagtgaagaagccgacaagccctcaagcccggaggatggcagactgtcagtatcatacataacagaggaatgcctgaagaagctggacacaaagcagcagaccaacaccctgctcaacctggtgtggagggactctgcgagcgaggaggtcttcaccaccatggcctccgtctgccacacgctgatggtgcagcaccgcatgatggtacccaaagtcagggtgtacaaatgaatgtggagacctttgtaccctgacatggaaagatttccgagacagatgcgtacatgaaaaccgggaagacacaggacagtatgtagaagaaccggcttttcctataagaaggatggaaaaaataggaatatatattcatattgcataaagaaacttggaagcatatacaagaaactcatgaaagtgaacactcgtgtctgaatatgccgaggaagctggggctggagcagaagtgctcttctgagtacactatttttatatcacttttaagttttggattaggtgaatgacttaatattttaaaattggttaagtaataaatgaattgccagc

SEQ ID NO: 33505 - DNA, 753 bp, Homo sapiens
  source 1..753: mol_type = unassigned DNA
cttcctcaacatggctgcgcccttgtcagtggaggtggagttcgggagctcacctggctgtctttttctctggtcctcctttgcagaggtggtgcggagctcctgtttgacggtattaagaaacatcgagtcactttgcctggacaggaggaaccctgggacatccggaacctgctcatctggatcaagaagaatttgctaaaagagcggccagagttgttcatccagggagacagcgtgtgagtcccactcctcccttccctgaagcaggtggagggagggacggatatttgagcccccaccctcgggttcagtcctggccttctctgaatccggttctccccttcctcctccctaactcttccagctctgagatctgttttcagttttcttgttactaaaccgaactcttgaggattttttaaatcccagatgaaaggagcctggtgaatttctcagaaaacttggattctgccctctggttgccacagacttgctgtgggaccttaggcgacttacttcgcttctctgggcctcagttactctctacacagaaagtgctgaggaaaaaacgtagctagtacaactgaagagctaaatattctgttttatttcattgtaatttaaatagccacatgcagctagtagattaccatacagtgcagcacgggtctagaattccaaggagtcattgactctgtgcgtgcacacacccatgcacatgcacacacactcactggggacaccccatag

SEQ ID NO: 33506 - DNA, 3045 bp, Homo sapiens
  source 1..3045: mol_type = unassigned DNA
gcgagctcggcttcctcaacatggctgcgcccttgtcagtggaggtggagttcggaggtggtgcggagctcctgtttgacggtattaagaaacatcgagtcactttgcctggacaggaggaaccctgggacatccggaacctgctcatctggatcaagaagaatttgctaaaagagcggccagagttgttcatccagggagacagcgtgtgagtcccactcctcccttccctgaagcaggtggagggagggacggatatttgagcccccaccctcgggttcagtcctggccttctctgaatccggttctccccttcctcctccctaactcttccagctctgagatctgttttcagttttcttgttactaaaccgaactcttgaggattttttaaatcccagatgaaaggagcctggtgaatttctcagaaaacttggattctgccctctggttgccacagacttgctgtgggaccttaggcgacttacttcgcttctctgggcctcagttactctctacacagaaagtgctgaggaaaaaacgtagctagtacaactgaagagctaaatattctgttttatttcattgtaatttaaatagccacatgcagctagtagattaccatacagtgcagcacgggtctagaattccaaggagtcattgactctgtgcgtgcacacacccatgcacatgcacacacactcactggggacaccccatagaagcccagtgcagtctccttggaaaggaccaggttccagttgccacgaagttacttctaaaacaaggccagtcccccacgtgaaaggtggccggtgcagttgtgaggctcgcttatttgcctcgaagcataggtcactgtcaggtcctaagggatcaggcctaggggatcagccctccttcaggtcatggtccagtggtcctggaggccacctctaaggccagcagtgctccttgggccattaccagtgggagccaggctaagctgcctgaccaaatgttgacctaccctgccttatgccaggcaggactgcacgtgagcattgccatgtggcatggcaactgattcggaagaggcaaaacagccttctctccaggatgggcatgcagaggcctaaaaaaaagccgaagttcttttccagggctaacgagaataagattagacccctggaaaagtcctactaatggttaccatgacagtgtggcaagcactccacacatatcagctcatttcgttttcgtataggccttgtgggttagacagtatcacttatcccattttcagatgaggaacctgatactcagaaacaaaatgacctgcccatggtctgggtggtggtgctggctggcatttgcacccattttccatctggctacaaagaccatgcatgactgacctggtttccttcacactcagaccagcctccccttcctgggatatctttagccagaccccaggaggaaggctcctcagcacactctcctgcagcccaaagctctcagcctctcttcctctgtgctactgcctcctgcctctcactccttgctactcaccaccatctttcccacaggcggccaggaattctggtgctgattaacgatgccgactgggagctactggtcagtaccttgggggacatccctcccccagcccctgcccttgctgcttcagtgggaaagcgttgggcctctcctcaggcacatatagagtggctgggtaatcctccgccccactccagccccacactgaggctgctggagtctcccactccaggtgaggaagggatgggtagctggggacatgggagtactcctccatcctgaagatttgcaggttgaggtataggatacccatttttctggtagagtctgtctcttccagagcagccagtcctcagcccctgttctcccaactcctggggtggacctgggaaggtggccctgagggtctcccgctcccctctctcccgcaccagggtgagctggactaccagcttcaggaccaggacagcgtcctcttcatctccactctgcacggcggctgagggcccttctctgggcctgggcacccttagaggggagaacgaagcaatcagacatccccttgggccctgcttccaggtctccctgtcccccttgcctgccttcttccctgctctgtcccctaagctccctccaggcagggaaaagaggccaggtgctaaaaatgagcctttctcaagcacgtgagcagcggaaggcagacaggcgccagagcccagcactcccttttccagcagctgtggtgggggagggttcccctccagtttgtcaagagttgaaggaggctctgtggccaggtgacctggctgccttccactccttgtacctcagtctaaacatggagtggccgctgacaaggcgctccagccccagagccagcgtcttcatggggaagatgaatggacctgagtagctgaaggaaggcccctccctacccaaagactggaggcttctcagcctcaatttccctgtctgtacagctgagggctctgcctgtcccccactgctatcagtatggaaccccagctggggtcccctattgagtgccgactccccccaccgccagcagctgctcctccagccacacccctcctgctccccccacccctagcccttgaccctggctggcctgccccgctccacaggccaccagatgggctcctgagaccctccccaggctgcttacagctcattctgctgggggtagagatgaggggagggagtaagttaaaccttggactagcaagtagaagcctggggggatgcgtgtgcctcagtttcctcctccacaactgaatatagtggctgaaaactggggagatacttgatggcgcgaatgtccgttttctctcccttcccacctcctgcaggaagcaggacggggcaggcagcacctggtaggcacagtgctttgcccctcctccccttcccttctggaagtcttggggcctcagtgcttgcaacagccggccttgggcaaataaaagactaggttgtttacta

SEQ ID NO: 33507 - DNA, 1368 bp, Homo sapiens
  source 1..1368: mol_type = unassigned DNA
ccggaaatttgcgggcgcgccggaagttgaggggagtttcctgcgagctcggcttcctcaacatggctgcgcccttgtcagtggaggtggagttcggaggtggtgcggagctcctgtttgacggtattaagaaacatcgagtcactttgcctggacaggaggaaccctgggacatccggaacctgctcatctggatcaagaagaatttgctaaaagagcggccagagttgttcatccagggagacagcgtgcggccaggaattctggtgctgattaacgatgccgactgggagctactgggtgagctggactaccagcttcaggaccaggacagcgtcctcttcatctccactctgcacggcggctgagggcccttctctgggcctgggcacccttagaggggagaacgaagcaatcagacatccccttgggccctgcttccaggtctccctgtcccccttgcctgccttcttccctgctctgtcccctaagctccctccaggcagggaaaagaggccaggtgctaaaaatgagcctttctcaagcacgtgagcagcggaaggcagacaggcgccagagcccagcactcccttttccagcagctgtggtgggggagggttcccctccagtttgtcaagagttgaaggaggctctgtggccaggtgacctggctgccttccactccttgtacctcagtctaaacatggagtggccgctgacaaggcgctccagccccagagccagcgtcttcatggggaagatgaatggacctgagtagctgaaggaaggcccctccctacccaaagactggaggcttctcagcctcaatttccctgtctgtacagctgagggctctgcctgtcccccactgctatcagtatggaaccccagctggggtcccctattgagtgccgactccccccaccgccagcagctgctcctccagccacacccctcctgctccccccacccctagcccttgaccctggctggcctgccccgctccacaggccaccagatgggctcctgagaccctccccaggctgcttacagctcattctgctgggggtagagatgaggggagggagtaagttaaaccttggactagcaagtagaagcctggggggatgcgtgtgcctcagtttcctcctccacaactgaatatagtggctgaaaactggggagatacttgatggcgcgaatgtccgttttctctcccttcccacctcctgcaggaagcaggacggggcaggcagcacctggtaggcacagtgctttgcccctcctccccttcccttctggaagtcttggggcctcagtgcttgcaacagccggccttgggcaaataaaagactaggttgtttacta

SEQ ID NO: 33508 - DNA, 1726 bp, Homo sapiens
  source 1..1726: mol_type = unassigned DNA
ccggaaatttgcgggcgcgccggaagttgaggggagtttcctgcgagctcggcttcctcaacatggctgcgcccttgtcagtggaggtggagttcggaggtggtgcggagctcctgtttgacggtattaagaaacatcgagtcactttgcctggacaggaggaaccctgggacatccggaacctgctcatctggatcaagaagaatttgctaaaagagcggccagagttgttcatccagggagacagcgtgcggccaggaattctggtgctgattaacgatgccgactgggagctactggtcagtaccttgggggacatccctcccccagcccctgcccttgctgcttcagtgggaaagcgttgggcctctcctcaggcacatatagagtggctgggtaatcctccgccccactccagccccacactgaggctgctggagtctcccactccaggtgaggaagggatgggtagctggggacatgggagtactcctccatcctgaagatttgcaggttgaggtataggatacccatttttctggtagagtctgtctcttccagagcagccagtcctcagcccctgttctcccaactcctggggtggacctgggaaggtggccctgagggtctcccgctcccctctctcccgcaccagggtgagctggactaccagcttcaggaccaggacagcgtcctcttcatctccactctgcacggcggctgagggcccttctctgggcctgggcacccttagaggggagaacgaagcaatcagacatccccttgggccctgcttccaggtctccctgtcccccttgcctgccttcttccctgctctgtcccctaagctccctccaggcagggaaaagaggccaggtgctaaaaatgagcctttctcaagcacgtgagcagcggaaggcagacaggcgccagagcccagcactcccttttccagcagctgtggtgggggagggttcccctccagtttgtcaagagttgaaggaggctctgtggccaggtgacctggctgccttccactccttgtacctcagtctaaacatggagtggccgctgacaaggcgctccagccccagagccagcgtcttcatggggaagatgaatggacctgagtagctgaaggaaggcccctccctacccaaagactggaggcttctcagcctcaatttccctgtctgtacagctgagggctctgcctgtcccccactgctatcagtatggaaccccagctggggtcccctattgagtgccgactccccccaccgccagcagctgctcctccagccacacccctcctgctccccccacccctagcccttgaccctggctggcctgccccgctccacaggccaccagatgggctcctgagaccctccccaggctgcttacagctcattctgctgggggtagagatgaggggagggagtaagttaaaccttggactagcaagtagaagcctggggggatgcgtgtgcctcagtttcctcctccacaactgaatatagtggctgaaaactggggagatacttgatggcgcgaatgtccgttttctctcccttcccacctcctgcaggaagcaggacggggcaggcagcacctggtaggcacagtgctttgcccctcctccccttcccttctggaagtcttggggcctcagtgcttgcaacagccggccttgggcaaataaaagactaggttgtttactagc

SEQ ID NO: 33509 - DNA, 3996 bp, Homo sapiens
  source 1..3996: mol_type = unassigned DNA
gtggcccatcccgtctgctctctgtcccgtctcccgacccgtacgcttttccctcaactcgcgcgcacgaatggttaaaaaaagggtgtgaggctcgagcccgccagccaggccgctagcacctcgcgcgcgccctcagcgaggacccgcacgagctgcccggctctgtgcctgcgttgtttgaaactgtggaacccgttaggcttttggggaactacagtcccagctggctccggagcccgtgcgtgccaggggcgagtggccgtcgcgagacggctcctgcctttcgtgtctctgcagcgtggagactggaaccggcaatttcaaaggacgccacgttcaatcgcagcgctggcgcgggcggaggctaaaacacgggggtcctgagactgaggaaaacgcgccaagttcccctcggtggcggagtgctaaagaccctagcggttcaggcgttcggcgagcggggccgctgcttgttgcgctcctggctctcccggggcgggcgcagatgggcgccgctcccgggatgtagttggtgttggtgcaagacgggagcgagcggcggtcggggttcccgctcttgggagcggatggtcactcccccgcggggagggcgagccgaccagattttcctggggccggggacccggcgggctcggggcagggactcacctgtcgcacccacactcattcgggttggacttgccggcgtcaccgccgcggacttcgctttgggccatgaccagatataattggtgattacaactttcctctataaattaactcttgacactccttgggatttgaagaaaaaaatgcctggtgtcatacctagtgaaagtaatggactttcaagaggtagcccttcaaagaaaaacagactttccttaaagttttttcagaaaaaggaaactaagagagctttggatttcacagattctcaagaaaatgaagaaaaagcttctgaatatagagcatctgaaattgatcaagttgttcctgcagcacagtcttcacctataaactgtgagaagagagaaaacttgttaccatttgtgggactgaataatctcggcaatacttgctatcttaatagtatacttcaggtattatatttttgtcccggttttaaatctggagtaaagcacttatttaatattatttcaaggaagaaagaagctctaaaggatgaagccaatcaaaaagacaagggaaattgcaaagaagattctttggcaagttatgaattgatatgcagtttacagtccttaatcatttcggttgaacagctccaggctagttttctcttaaatccagagaaatatactgatgaacttgccactcagccaaggcgactgcttaacacactgagggaactcaaccctatgtatgaaggatatctacagcatgatgcacaggaagtattacaatgtattttgggaaacattcaagaaacatgccaactcctaaaaaaagaagaagtaaaaaatgtggcagaattacctactaaggtagaagaaatacctcatccgaaagaggaaatgaatggtattaacagcatagagatggacagtatgaggcattctgaagactttaaagagaaactcccaaaaggaaatgggaaaagaaaaagtgacactgaatttggtaacatgaagaaaaaagttaaattatccaaggaacaccagtcattggaagagaaccagagacaaactagatcaaaaagaaaagctacaagtgatacattagagagtcctcctaaaataattcccaagtatatttctgaaaatgagagtccaagaccctcacaaaagaaatcaagagttaaaataaattggttaaagtctgcaactaagcaacccagcattctttctaaattttgtagtctgggaaaaataacaacaaaccaaggagtcaaaggacaatctaaagaaaatgaatgtgatcctgaagaggacttggggaagtgtgaaagtgataacacaactaatggttgtggacttgaatctccaggaaatactgttacacctgtaaatgttaatgaagttaaacccataaacaaaggtgaagaacaaattggttttgagctagtggagaaattatttcaaggtcagctggtattaaggacgcgttgcttggaatgtgaaagtttaacagaaagaagagaagattttcaagacatcagtgtgccagtacaagaagatgagctttccaaagtagaggagagttctgaaatttctccagagccaaaaacagaaatgaagaccctgagatgggcaatttcacaatttgcttcagtagaaaggattgtaggagaagataaatatttctgtgaaaactgccatcattatactgaagctgaacgaagtcttttgtttgacaaaatgcctgaagttataactattcatttgaagtgctttgctgctagtggtttggagtttgattgttatggtggtggactttccaagatcaacactcctttattgacacctcttaaattgtcactagaagaatggagcacaaagccaactaacgacagctatggattatttgcggttgtgatgcatagtggcattacaattagtagtgggcattacactgcttctgttaaagtcactgaccttaacagtttagaactagataaaggaaattttgtggttgaccaaatgtgtgaaataggtaagccagaaccattgaatgaggaggaagcaaggggtgtggttgagaattataatgatgaagaagtgtcaattagagttggtggaaatacacagccaagtaaagttttgaacaaaaaaaatgtagaagctattggacttcttggaggacaaaagagcaaagcagattatgagctatacaacaaagcctctaatcctgataaggttgctagtacagcgtttgctgaaaatagaaattctgagactagtgatactactgggacccatgaatctgatagaaacaaggaatccagtgaccaaacaggcattaatattagtggatttgagaacaaaatttcatacgtagtgcaaagcttaaaggagtatgaggggaagtggttgctttttgatgattctgaagtcaaagttactgaagagaaggactttctgaattctctttccccttctacatctcctacttctactccttacttgctattttataagaaattatagagtgagtgtattttccttgtgtatatattaaacacacccatacaaacattggtaaagttgattacatcaaagaatctttagcttatcttttgaagctactggatattattggtctctctaggtttttatataaatagtgaaatttgaattactgaaaaccatgttaatttttagaactcattttcctcagtagagactagtgatgcattagcttctgggaacaaacttgtatcggttcttaattaaattatccaaaacggaggcatttaaacacttggatttacaccagtcttttgtgtttgctttttaaaataaagtgctcgtatttgtattctccatattttggagtaattatctacatgatgtttatagttcctgtggtttttcacccaagaagcagaatctcattcagtacatttagttttataagagtcatgaagctaaatccttgggctatgtcagaggcacaaagtctagaatgtgtgtattcacaatggtgtatgtacattttgtgccttgattcacttagaagtgtctcagaaaacctggacagttcgcttctacacaagaattttatatgtatttatgaagatgattctgtaccctagtatatctttttgggcatggactaatttgtatctgtttaactcatattctgcacgatctgtatatagtacatcaaacttagaggtgtgaccttaaatttaactttttttaaaaactgggaggtcaataaaatttaaactgcttaactatgtatatgaatatttgaattttttacttgtatatttttataaatacagctgagttttcttaaagcgaa

SEQ ID NO: 33510 - DNA, 3507 bp, Homo sapiens
  source 1..3507: mol_type = unassigned DNA
ggggcttaccgcgagggcctcgctccggaagccgcaccctccgcggcgtcccaccgtcgaggattaacaaaacgccaaacaagattttaacagtcggcagcgaaagcgcgcactcgagcgccaatgagagcggaaggaggggcaccgcgcctgaggaacactccgtatgtcgaacaatgattggctggagcccacctttcttcttttttgctattagatgggcttgctgctcccgcccatctaattggctttggtctagatataattggtgattacaactttcctctataaattaactcttgacactccttgggatttgaagaaaaaaatgcctggtgtcatacctagtgaaagtaatggactttcaagaggtagcccttcaaagaaaaacagactttccttaaagttttttcagaaaaaggaaactaagagagctttggatttcacagattctcaagaaaatgaagaaaaagcttctgaatatagagcatctgaaattgatcaagttgttcctgcagcacagtcttcacctataaactgtgagaagagagaaaacttgttaccatttgtgggactgaataatctcggcaatacttgctatcttaatagtatacttcaggtattatatttttgtcccggttttaaatctggagtaaagcacttatttaatattatttcaaggaagaaagaagctctaaaggatgaagccaatcaaaaagacaagggaaattgcaaagaagattctttggcaagttatgaattgatatgcagtttacagtccttaatcatttcggttgaacagctccaggctagttttctcttaaatccagagaaatatactgatgaacttgccactcagccaaggcgactgcttaacacactgagggaactcaaccctatgtatgaaggatatctacagcatgatgcacaggaagtattacaatgtattttgggaaacattcaagaaacatgccaactcctaaaaaaagaagaagtaaaaaatgtggcagaattacctactaaggtagaagaaatacctcatccgaaagaggaaatgaatggtattaacagcatagagatggacagtatgaggcattctgaagactttaaagagaaactcccaaaaggaaatgggaaaagaaaaagtgacactgaatttggtaacatgaagaaaaaagttaaattatccaaggaacaccagtcattggaagagaaccagagacaaactagatcaaaaagaaaagctacaagtgatacattagagagtcctcctaaaataattcccaagtatatttctgaaaatgagagtccaagaccctcacaaaagaaatcaagagttaaaataaattggttaaagtctgcaactaagcaacccagcattctttctaaattttgtagtctgggaaaaataacaacaaaccaaggagtcaaaggacaatctaaagaaaatgaatgtgatcctgaagaggacttggggaagtgtgaaagtgataacacaactaatggttgtggacttgaatctccaggaaatactgttacacctgtaaatgttaatgaagttaaacccataaacaaaggtgaagaacaaattggttttgagctagtggagaaattatttcaaggtcagctggtattaaggacgcgttgcttggaatgtgaaagtttaacagaaagaagagaagattttcaagacatcagtgtgccagtacaagaagatgagctttccaaagtagaggagagttctgaaatttctccagagccaaaaacagaaatgaagaccctgagatgggcaatttcacaatttgcttcagtagaaaggattgtaggagaagataaatatttctgtgaaaactgccatcattatactgaagctgaacgaagtcttttgtttgacaaaatgcctgaagttataactattcatttgaagtgctttgctgctagtggtttggagtttgattgttatggtggtggactttccaagatcaacactcctttattgacacctcttaaattgtcactagaagaatggagcacaaagccaactaacgacagctatggattatttgcggttgtgatgcatagtggcattacaattagtagtgggcattacactgcttctgttaaagtcactgaccttaacagtttagaactagataaaggaaattttgtggttgaccaaatgtgtgaaataggtaagccagaaccattgaatgaggaggaagcaaggggtgtggttgagaattataatgatgaagaagtgtcaattagagttggtggaaatacacagccaagtaaagttttgaacaaaaaaaatgtagaagctattggacttcttggaggacaaaagagcaaagcagattatgagctatacaacaaagcctctaatcctgataaggttgctagtacagcgtttgctgaaaatagaaattctgagactagtgatactactgggacccatgaatctgatagaaacaaggaatccagtgaccaaacaggcattaatattagtggatttgagaacaaaatttcatacgtagtgcaaagcttaaaggagtatgaggggaagtggttgctttttgatgattctgaagtcaaagttactgaagagaaggactttctgaattctctttccccttctacatctcctacttctactccttacttgctattttataagaaattatagagtgagtgtattttccttgtgtatatattaaacacacccatacaaacattggtaaagttgattacatcaaagaatctttagcttatcttttgaagctactggatattattggtctctctaggtttttatataaatagtgaaatttgaattactgaaaaccatgttaatttttagaactcattttcctcagtagagactagtgatgcattagcttctgggaacaaacttgtatcggttcttaattaaattatccaaaacggaggcatttaaacacttggatttacaccagtcttttgtgtttgctttttaaaataaagtgctcgtatttgtattctccatattttggagtaattatctacatgatgtttatagttcctgtggtttttcacccaagaagcagaatctcattcagtacatttagttttataagagtcatgaagctaaatccttgggctatgtcagaggcacaaagtctagaatgtgtgtattcacaatggtgtatgtacattttgtgccttgattcacttagaagtgtctcagaaaacctggacagttcgcttctacacaagaattttatatgtatttatgaagatgattctgtaccctagtatatctttttgggcatggactaatttgtatctgtttaactcatattctgcacgatctgtatatagtacatcaaacttagaggtgtgaccttaaatttaactttttttaaaaactgggaggtcaataaaatttaaactgcttaactatgtatatgaatatttgaattttttacttgtatatttttataaatacagctgagttttcttaaagcg

SEQ ID NO: 33511 - DNA, 502 bp, Homo sapiens
  source 1..502: mol_type = unassigned DNA
ggaggcggggcttaccgcgagggcctcgctccggaagccgcaccctccgcggcgtcccaccgtcgaggattaacaaaacgccaaacaagattttaacagtcggcagcgaaagcgcgcactcgagcgccaatgagagcggaaggaggggcaccgcgcctgaggaacactccatataattggtgattacaactttcctctataaattaactcttgacactccttgggatttgaagaaaaaaatgcctggtgtcatacctagtgaaagtaatggactttcaagaggtagcccttcaaagaaaaacagactttccttaaagttttttcagaaaaaggaaactaagagagctttggatttcacagattctcaagaaaatgaagaaaaagcttctgaatatagagcatctgaaattgatcaagttgttcctgcagcacagtcttcacctataaactgtgagaagagagaaaacttgttaccatttgtgggactgaataatctcggcaa

SEQ ID NO: 33512 - DNA, 893 bp, Homo sapiens
  source 1..893: mol_type = unassigned DNA
cggaggcggggcttaccgcgagggcctcgctccggaagccgcaccctccgcggcgtcccaccgtcgaggattaacaaaacgccaaacaagattttaacagtcggcagcgaaagcgcgcactcgagcgccaatgagagcggaaggaggggcaccgcgcctgaggaacactccgtatgtcgaacaatgattggctggagcccacctttcttcttttttgctattagatgggcttgctgctcccgcccatctaattggctttggtctagatataattggtgattacaactttcctctataaattaactcttgacactccttgggatttgaagaaaaaaatgcctggtgtcatacctagtgaaagtaatggactttcaagaggtagcccttcaaagaaaaacagactttccttaaagttttttcagaaaaaggaaactaagagagctttggatttcacagattctcaagaaaatgaagaaaaagcttctgaatatagagcatctgaaattgatcaagttgttcctgcagcacagtcttcacctataaactgtgagaagagagaaaacttgttaccatttgtgggactgaataatctcggcaatacttgctatcttaatagtatacttcaggtattatatttttgtcccggttttaaatctggagtaaagcacttatttaatattatttcaaggaagaaagaagctctaaaggatgaagccaatcaaaaagacaagggaaattgcaaagaagattctttggcaagttatgaattgatatgcagtttacagtccttaatcatttcggttgaacagctccaggctagttttctcttaaatccagagaaatatactgatgaacttgccactcagccaaggcgactgcttaacacactgagg

SEQ ID NO: 33513 - DNA, 3376 bp, Homo sapiens
  source 1..3376: mol_type = unassigned DNA
ctccccgcgccccgcggcgcgcggccagtgcgcaggcgcggcggccgatgcgagtgtgtatgtgcgggcgagaagatggcggcggcgggggaagcagcgtgagcagccggaggatcgcggagtcccaatgaaacgggcagccatggccctccacagcccgcagtatatttttggagattttagccctgatgaattcaatcaattctttgtgactcctcgatcttcagttgagcttcctccatacagtggaacagttctgtgtggcacacaggctgtggataaactacctgatggacaagaatatcagagaattgagtttggtgtcgatgaagtcattgaacccagtgacactttgccgagaacccccagctacagtatttcaagcacactgaaccctcaggcccctgaatttattctcggttgtacagcttccaaaataacccctgatggtatcactaaagaagcaagctatggctccatcgactgccagtacccaggctctgccctcgctttggatggaagttctaatgtggaggcggaagttttggaaaatgatggtgtctcaggtggtcttggacaaagggagcgtaaaaagaagaaaaagcggccacctggatattacagctatttgaaagatggtggcgatgatagtatctccacagaagccctggtcaatggccatgccaattcagcagtcccgaacagtgtcagtgcagaggatgcagaatttatgggtgacatgcccccgtcagttacgcccaggacttgtaacagcccccagaactccacagactctgtcagtgacattgtgcctgacagtcctttccccggagcactcggcagtgacaccaggactgcagggcagccagaggggggccccggggctgattttggtcagtcctgcttccctgcagaggctggcagagacaccctgtcaaggacagctggggctcagccctgcgttggtaccgatactactgaaaaccttggagttgctaatggacaaatacttgaatcctcgggtgagggcacagctaccaacggggtggagttgcacaccacggaaagcatagacttggacccaaccaaacccgagagtgcatcacctcctgctgacggcacgggctctgcatcaggcacccttcctgtcagccagcccaagtcctgggccagcctctttcatgattctaagccctcttcctcctcgccggtggcctatgtggaaactaagtattcccctcccgccatatctcccctggtttctgaaaagcaggttgaagtcaaagaagggcttgttccggtttcagaggatcctgtagccataaagattgcagagttgctggagaatgtaaccctaatccataaaccagtgtcgttgcaaccccgtgggctgatcaataaagggaactggtgctacattaatgctacactgcaggcattggttgcttgcccgccgatgtaccacctgatgaagttcattcctctgtattccaaagtgcaaaggccttgtacgtcaacacccatgatagacagctttgttcggctaatgaatgagttcactaatatgccagtacctccaaaaccccgacaagctcttggagataaaatcgtgagggatattcgccctggagctgcctttgagcccacatatatttacagactcctgacagttaacaagtcaagcctgtctgaaaagggtcgacaagaagatgctgaggaatacttaggcttcattctaaatggacttcatgaggaaatgttgaacctaaagaagcttctctcaccaagtaatgaaaaacttacgatttccaacggccccaaaaaccactcggtcaatgaagaagagcaggaagaacaaggtgaaggaagcgaggatgaatgggaacaagtgggcccccggaacaagacttccgtcacccgccaggcggattttgttcagactccaatcaccggcatttttggtggacacatcaggtctgtggtttaccagcagagttcaaaagaatctgccactttgcagccatttttcacgttgcagttggatatccagtcagacaagatacgcacagtccaggatgcactggagagcttggtggcaagagaatctgtccaaggttataccacaaaaaccaaacaagaggttgagataagtcgaagagtgactctggaaaaactccctcctgtcctcgtgctgcacctgaaacgattcgtttatgagaagactggtgggtgccagaagcttatcaaaaatattgaatatcctgtggacttggaaattagtaaagaactgctttctccaggggttaaaaataagaattttaaatgccaccgaacctatcggctctttgcagtggtctaccatcacggcaacagtgcgacgggcggccattacactacagacgtcttccagatcggtctgaatggctggctgcgcatcgatgaccagacagtcaaggtgatcaaccagtaccaggtggtgaaaccaactgctgaacgcacagcctacctcctgtattaccgccgagtggacctgctgtaaaccctgtgtgcgctgtgtgtgcgcccagtgcccgcttcgtaggacaccacctcacactcacttcccgcctctctttagtggctctttagagagaaactctttctccctttgcaaaaatgggctagaatgaaaaggagatgccttggggttcgtgcacaacacagcttctgttgactctaacttccaaatcaaaatcatttggttgaaacagactgttgcttgattttagaaaatacacaaaaacccatatttctgaaataatgctgattcctgagataagaaagtggatttgatccccagtctcattgcttagtagaataaatcctgcaccagcaacaacacttgtaaatttgtgaaaatgaattttatctttccttaaaaaagaaattttttaatccatcacacttttcttccctaccctttagtttttgataaatgataaaaatgagccagttatcaaagaagaactagttcttacttcaaaagaaaaataaacataaaaaataagttgctggttcctaacaggaaaaattttaataattgtactgagagaaactgcttacgtacacattgcagatcaaatatttggagttaaaatgttagtctacatagatgggtgattgtaactttattgccattaaaagatttcaaattgcattcatgcttctgtgtacacataatgaaaaatgggcaaataatgaagatctctccttcagtctgctctgtttaattctgctgtctgctcttctctaatgctgcgtccctaattgtacacagtttagtgatatctaggagtataaagttgtcgcccatcaataaaaatcacaaagttggttt

SEQ ID NO: 33514 - DNA, 3311 bp, Homo sapiens
  source 1..3311: mol_type = unassigned DNA
gcgggcgagaagatggcggcggcgggggaagcagcgtgagcagccggaggatcgcggagtcccaatgaaacgggcagccatggccctccacagcccgcagtatatttttggagattttagccctgatgaattcaatcaattctttgtgactcctcgatcttcagttgagcttcctccatacagtggaacagttctgtgtggcacacaggctgtggataaactacctgatggacaagaatatcagagaattgagtttggtgtcgatgaagtcattgaacccagtgacactttgccgagaacccccagctacagtatttcaagcacactgaaccctcaggcccctgaatttattctcggttgtacagcttccaaaataacccctgatggtatcactaaagaagcaagctatggctccatcgactgccagtacccaggctctgccctcgctttggatggaagttctaatgtggaggcggaagttttggaaaatgatggtgtctcaggtggtcttggacaaagggagcgtaaaaagaagaaaaagcggccacctggatattacagctatttgaaagatggtggcgatgatagtatctccacagaagccctggtcaatggccatgccaattcagcagtcccgaacagtgtcagtgcagaggatgcagaatttatgggtgacatgcccccgtcagttacgcccaggacttgtaacagcccccagaactccacagactctgtcagtgacattgtgcctgacagtcctttccccggagcactcggcagtgacaccaggactgcagggcagccagaggggggccccggggctgattttggtcagtcctgcttccctgcagaggctggcagagacaccctgtcaaggacagctggggctcagccctgcgttggtaccgatactactgaaaaccttggagttgctaatggacaaatacttgaatcctcgggtgagggcacagctaccaacggggtggagttgcacaccacggaaagcatagacttggacccaaccaaacccgagagtgcatcacctcctgctgacggcacgggctctgcatcaggcacccttcctgtcagccagcccaagtcctgggccagcctctttcatgattctaagccctcttcctcctcgccggtggcctatgtggaaactaagtattcccctcccgccatatctcccctggtttctgaaaagcaggttgaagtcaaagaagggcttgttccggtttcagaggatcctgtagccataaagattgcagagttgctggagaatgtaaccctaatccataaaccagtgtcgttgcaaccccgtgggctgatcaataaagggaactggtgctacattaatgctacactgcaggcattggttgcttgcccgccgatgtaccacctgatgaagttcattcctctgtattccaaagtgcaaaggccttgtacgtcaacacccatgatagacagctttgttcggctaatgaatgagttcactaatatgccagtacctccaaaaccccgacaagctcttggagataaaatcgtgagggatattcgccctggagctgcctttgagcccacatatatttacagactcctgacagttaacaagtcaagcctgtctgaaaagggtcgacaagaagatgctgaggaatacttaggcttcattctaaatggacttcatgaggaaatgttgaacctaaagaagcttctctcaccaagtaatgaaaaacttacgatttccaacggccccaaaaaccactcggtcaatgaagaagagcaggaagaacaaggtgaaggaagcgaggatgaatgggaacaagtgggcccccggaacaagacttccgtcacccgccaggcggattttgttcagactccaatcaccggcttttggtggacacatcaggtctgtggtttaccagcagagttcaaaagaatctgccactttgcagccatttttcacgttgcagttggatatccagtcagacaagatacgcacagtccaggatgcactggagagcttggtggcaagagaatctgtccaaggttataccacaaaaaccaaacaagaggttgagataagtcgaagagtgactctggaaaaactccctcctgtcctcgtgctgcacctgaaacgattcgtttatgagaagactggtgggtgccagaagcttatcaaaaatattgaatatcctgtggacttggaaattagtaaagaactgctttctccaggggttaaaaataagaattttaaatgccaccgaacctatcggctctttgcagtggtctaccatcacggcaacagtgcgacgggcggccattacactacagacgtcttccagatcggtctgaatggctggctgcgcatcgatgaccagacagtcaaggtgatcaaccagtaccaggtggtgaaaccaactgctgaacgcacagcctacctcctgtattaccgccgagtggacctgctgtaaaccctgtgtgcgctgtgtgtgcgcccagtgcccgcttcgtaggacaccacctcacactcacttcccgcctctctttagtggctctttagagagaaactctttctccctttgcaaaaatgggctagaatgaaaaggagatgccttggggttcgtgcacaacacagcttctgttgactctaacttccaaatcaaaatcatttggttgaaacagactgttgcttgattttagaaaatacacaaaaacccatatttctgaaataatgctgattcctgagataagaaagtggatttgatccccagtctcattgcttagtagaataaatcctgcaccagcaacaacacttgtaaatttgtgaaaatgaattttatctttccttaaaaaagaaattttttaatccatcacacttttcttccctaccctttagtttttgataaatgataaaaatgagccagttatcaaagaagaactagttcttacttcaaaagaaaaataaacataaaaaataagttgctggttcctaacaggaaaaattttaataattgtactgagagaaactgcttacgtacacattgcagatcaaatatttggagttaaaatgttagtctacatagatgggtgattgtaactttattgccattaaaagatttcaaattgcattcatgcttctgtgtacacataatgaaaaatgggcaaataatgaagatctctccttcagtctgctctgtttaattctgctgtctgctcttctctaatgctgcgtccctaattgtacacagtttagtgatatctaggagtataaagttgtcgcccatcaataaaaatcacaaagttggttt

SEQ ID NO: 33515 - DNA, 3067 bp, Homo sapiens
  source 1..3067: mol_type = unassigned DNA
gatgcgagtgtgtatgtgcgggcgagaagatggcggcggcgggggaagcagcgtgagcagccggaggatcgcggagtcccaatgaaacgggcagccatggccctccacagcccgcagtatatttttggagattttagccctgatgaattcaatcaattctttgtgactcctcgatcttcagttgaggacaagaatatcagagaattgagtttggtgtcgatgaagtcattgaacccagtgacactttgccgagaacccccagctacagtatttcaagcacactgaaccctcaggcccctgaatttattctcggttgtacagcttccaaaataacccctgatggtatcactaaagaagcaagctatggctccatcgactgccagtacccaggctctgccctcgctttggatggaagttctaatgtggaggcggaagttttggaaaatgatggtgtctcaggtggtcttggacaaagggagcgtaaaaagaagaaaaagcggccacctggatattacagctatttgaaagatggtggcgatgatagtatctccacagaagccctggtcaatggccatgccaattcagcagtcccgaacagtgtcagtgcagaggatgcagaatttatgggtgacatgcccccgtcagttacgcccaggacttgtaacagcccccagaactccacagactctgtcagtgacattgtgcctgacagtcctttccccggagcactcggcagtgacaccaggactgcagggcagccagaggggggccccggggctgattttggtcagtcctgcttccctgcagaggctggcagagacaccctgtcaaggacagctggggctcagccctgcgttggtaccgatactactgaaaaccttggagttgctaatggacaaatacttgaatcctcgggtgagggcacagctaccaacggggtggagttgcacaccacggaaagcatagacttggacccaaccaaacccgagagtgcatcacctcctgctgacggcacgggctctgcatcaggcacccttcctgtcagccagcccaagtcctgggccagcctctttcatgattctaagccctcttcctcctcgccggtggcctatgtggaaactaagtattcccctcccgccatatctcccctggtttctgaaaagcaggttgaagtcaaagaagggcttgttccggtttcagaggatcctgtagccataaagattgcagtgttcggctaatgaatgagttcactaatatgccagtacctccaaaaccccgacaagctcttggagataaaatcgtgagggatattcgccctggagctgcctttgagcccacatatatttacagactcctgacagttaacaagtcaagcctgtctgaaaagggtcgacaagaagatgctgaggaatacttaggcttcattctaaatggacttcatgaggaaatgttgaacctaaagaagcttctctcaccaagtaatgaaaaacttacgatttccaacggccccaaaaaccactcggtcaatgaagaagagcaggaagaacaaggtgaaggaagcgaggatgaatgggaacaagtgggcccccggaacaagacttccgtcacccgccaggcggattttgttcagactccaatcaccggcatttttggtggacacatcaggtctgtggtttaccagcagagttcaaaagaatctgccactttgcagccatttttcacgttgcagttggatatccagtcagacaagatacgcacagtccaggatgcactggagagcttggtggcaagagaatctgtccaaggttataccacaaaaaccaaacaagaggttgagataagtcgaagagtgactctggaaaaactccctcctgtcctcgtgctgcacctgaaacgattcgtttatgagaagactggtgggtgccagaagcttatcaaaaatattgaatatcctgtggacttggaaattagtaaagaactgctttctccaggggttaaaaataagaattttaaatgccaccgaacctatcggctctttgcagtggtctaccatcacggcaacagtgcgacgggcggccattacactacagacgtcttccagatcggtctgaatggctggctgcgcatcgatgaccagacagtcaaggtgatcaaccagtaccaggtggtgaaaccaactgctgaacgcacagcctacctcctgtattaccgccgagtggacctgctgtaaaccctgtgtgcgctgtgtgtgcgcccagtgcccgcttcgtaggacaccacctcacactcacttcccgcctctctttagtggctctttagagagaaactctttctccctttgcaaaaatgggctagaatgaaaaggagatgccttggggttcgtgcacaacacagcttctgttgactctaacttccaaatcaaaatcatttggttgaaacagactgttgcttgattttagaaaatacacaaaaacccatatttctgaaataatgctgattcctgagataagaaagtggatttgatccccagtctcattgcttagtagaataaatcctgcaccagcaacaacacttgtaaatttgtgaaaatgaattttatctttccttaaaaaagaaattttttaatccatcacacttttcttccctaccctttagtttttgataaatgataaaaatgagccagttatcaaagaagaactagttcttacttcaaaagaaaaataaacataaaaaataagttgctggttcctaacaggaaaaattttaataattgtactgagagaaactgcttacgtacacattgcagatcaaatatttggagttaaaatgttagtctacatagatgggtgattgtaactttattgccattaaaagatttcaaattgcattcatgcttctgtgtacacataatgaaaaatgggcaaataatgaagatctctccttcagtctgctctgtttaattctgctgtctgctcttctctaatgctgcgtccctaattgtacacagtttagtgatatctaggagtataaagttgtcgcccatcaataaaaatcacaaagttggttt

SEQ ID NO: 33516 - DNA, 3289 bp, Homo sapiens
  source 1..3289: mol_type = unassigned DNA
atggcagtagccccgcgactgtttggggggctctgcttccgtttccgggaccagaatccggaagtggctgttgaggggcgtcttccaatctcgcacagctgcgttggctgtagaagagaacggacggcgatggcgacggtcgcagcaaatccagctgctgctgcggcggctgtggcggcggcagcggcggtgactgaggatagagagccacagcacgaggagctgccaggcctggacagccagtggcgccagatagaaaacggcgagagtgggcgagaacgtccactgcgggccggcgaaagctggttccttgtggagaagcactggtataagcagtgggaggcatacgtgcagggaggggaccaggactccagcaccttccctggctgcatcaacaatgccacactctttcaagatgagataaactggcgcctcaaggagggactggtggaaggcgaggattatgtgctgctcccagcagctgcttggcattacctggtcagctggtatggtctagagcatggccagccacccattgaacgcaaggtcatagagctgcccaacatccagaaggtcgaagtgtacccagtagaactgctgcttgtccggcacaatgatttgggcaaatctcacactgttcagttcagccataccgattctattggcctagtattgcgcacagctcgggagcggtttctggtggagccccaggaagacactcggctttgggccaagaactcagaaggctctttggataggttgtatgacacacacatcacggttctcgatgcggcccttgagactgggcagttgatcatcatggagacccgcaagaaagatggcacttggcccagcgcacagctgcatgtcatgaacaacaacatgtcggaagaggatgaggacttcaagggtcagccaggcatctgtggcctcaccaatctgggcaacacgtgcttcatgaactcggccctgcagtgcctcagcaatgtgccacagctcaccgagtacttcctcaacaactgctacctggaggagctcaacttccgcaacccactgggcatgaagggtgagatcgcagaggcctatgcagacctggtgaagcaggcgtggtctggccaccaccgctccattgtgccacatgtgttcaagaacaaggttggccattttgcatcccaatttctgggctaccagcagcatgactctcaggagctgctgtcattcctcctggacgggctgcatgaggaccttaatcgggtgaagaagaaggagtatgtggagctgtgcgatgctgctgggcgaccggatcaggaggtggcacaggaggcatggcaaaaccacaaacggcggaacgattctgtgatcgtggacactttccacggcctcttcaagtccacgctggtgtgccccgattgtggcaatgtatctgtgaccttcgaccccttctgctacctcagtgttccactgcctatcagccacaagagggtcttggaggtcttctttatccccatggatccgcgccgcaagccagagcagcaccggctcgtggtccccaagaaaggcaagatctcggatctatgtgtggctctgtccaaacacacgggcatctcgccagagaggatgatggtggctgatgtcttcagtcaccgcttctataagctctatcagctagaggagcctctgagcagcatcttggaccgtgatgatatcttcgtctatgaggtgtcaggtcgcattgaggccattgagggctcaagagaggacatcgtggttcctgtctacctgcgggagcgcacccctgcccgtgactacaacaactcctactacggcctgatgctttttggacaccccctcctggtatcagtgccccgggaccgcttcacctgggagggcctgtataacgtcctgatgtaccggctctcacgctacgtgaccaaacccaactcagatgatgaggacgatggggatgagaaagaagatgacgaggaggataaagatgacgtccctgggccctcaactgggggcagcctccgagaccctgagccagagcaggctgggcccagctctggagtcacgaacaggtgcccgttcctcctggacaattgccttggcacatctcagtggcccccaaggcgacgacgcaagcagctgttcaccctgcagacggtgaactccaatgggaccagcgaccgcacaacctcccctgaagaagtccatgcccagccgtacattgctatcgactgggagccagagatgaagaagcgttactatgacgaggtagaggctgagggctacgtgaagcatgactgcgtcgggtacgtgatgaagaaggctcccgtgcggctgcaggagtgcattgagctcttcaccactgtggagaccctggagaaggaaaacccctggtactgcccttcctgcaagcagcaccagctggcaaccaagaagctggacctgtggatgctgccggagattctcatcatccacctgaaacgcttttcctacaccaagttctcccgagagaagctggacaccctcgtggagtttcctatccgggacctggacttctctgagtttgtcatccagccacagaatgagtcgaatccggagctgtacaaatatgacctcatcgcggtttccaaccattatgggggcatgcgtgatggacactacacaacatttgcctgcaacaaggacagcggccagtggcactactttgatgacaacagcgtctcccctgtcaatgagaatcagatcgagtccaaggcagcctatgtcctcttctaccaacgccaggacgtggcgcgacgcctgctgtccccggccggctcatctggcgccccagcctcccctgcctgcagctccccacccagctctgagttcatggatgttaattgagagccctgggtcctgccacagaaaaaaaaaaaaaaaagccctctctgcaatctcgcttctcgtgtccgccccgcttctcttattcgtgttaggtgcccccgccaggcattgcaggcttagtcgtggctactgttctcctgtgccgctgcatcgctctctcccgggaaagaacaggtcgtgtctcctcctagcagtgcgcgccccgcctgtgtttgcccttccagcagtgaccctcccttctagtctttatttatggtcgtgcccttccctctcctcagcccagagtgttctgcgtgggtggtgatgggggttcacctgaacacagagtgtattttcttattgaggccctgtaccttctgctgtgtgtgtgtatatataaagcaccagtctgctcccc

SEQ ID NO: 33517 - DNA, 3515 bp, Homo sapiens
  source 1..3515: mol_type = unassigned DNA
gatggtacaatgaagggcattctgatcaggctaacaaaaacactgctcccagggtaggagtcctagcccacctcgggaacctcagcctccactttccatgccacctgtgccctaagtctacagggcgttaggaccccacaaggcacttttgtctttcttggttcccactgaagattttaccccacctagcccttcgacgcgtctgtgcacggggccatttccaatatggcagtagccccgcgactgtttggggggctctgcttccgtttccgggaccagaatccggaagtggctgttgaggggcgtcttccaatctcgcacagctgcgttggctgtagaagagaacggacggcgatggcgacggtcgcagcaaatccagctgctgctgcggcggctgtggcggcggcagcggcggtgactgaggatagagagccacagcacgaggagctgccaggcctggacagccagtggcgccagatagaaaacggcgagagtgggcgagaacgtccactgcgggccggcgaaagctggttccttgtggagaagcactggtataagcagtgggaggcatacgtgcagggaggggaccaggactccagcaccttccctggctgcatcaacaatgccacactctttcaagatgagataaactggcgcctcaaggagggactggtggaaggcgaggattatgtgctgctcccagcagctgcttggcattacctggtcagctggtatggtctagagcatggccagccacccattgaacgcaaggtcatagagctgcccaacatccagaaggtcgaagtgtacccagtagaactgctgcttgtccggcacaatgatttgggcaaatctcacactgttcagttcagccataccgattctattggcctagtattgcgcacagctcgggagcggtttctggtggagccccaggaagacactcggctttgggccaagaactcagaaggctctttggataggttgtatgacacacacatcacggttctcgatgcggcccttgagactgggcagttgatcatcatggagacccgcaagaaagatggcacttggcccagcgcacagctgcatgtcatgaacaacaacatgtcggaagaggatgaggacttcaagggtcagccaggcatctgtggcctcaccaatctgggcaacacgtgcttcatgaactcggccctgcagtgcctcagcaatgtgccacagctcaccgagtacttcctcaacaactgctacctggaggagctcaacttccgcaacccactgggcatgaagggtgagatcgcagaggcctatgcagacctggtgaagcaggcgtggtctggccaccaccgctccattgtgccacatgtgttcaagaacaaggttggccattttgcatcccaatttctgggctaccagcagcatgactctcaggagctgctgtcattcctcctggacgggctgcatgaggaccttaatcgggtgaagaagaaggagtatgtggagctgtgcgatgctgctgggcgaccggatcaggaggtggcacaggaggcatggcaaaaccacaaacggcggaacgattctgtgatcgtggacactttccacggcctcttcaagtccacgctggtgtgccccgattgtggcaatgtatctgtgaccttcgaccccttctgctacctcagtgttccactgcctatcagccacaagagggtcttggaggtcttctttatccccatggatccgcgccgcaagccagagcagcaccggctcgtggtccccaagaaaggcaagatctcggatctatgtgtggctctgtccaaacacacgggcatctcgccagagaggatgatggtggctgatgtcttcagtcaccgcttctataagctctatcagctagaggagcctctgagcagcatcttggaccgtgatgatatcttcgtctatgaggtgtcaggtcgcattgaggccattgagggctcaagagaggacatcgtggttcctgtctacctgcgggagcgcacccctgcccgtgactacaacaactcctactacggcctgatgctttttggacaccccctcctggtatcagtgccccgggaccgcttcacctgggagggcctgtataacgtcctgatgtaccggctctcacgctacgtgaccaaacccaactcagatgatgaggacgatggggatgagaaagaagatgacgaggaggataaagatgacgtccctgggccctcaactgggggcagcctccgagaccctgagccagagcaggctgggcccagctctggagtcacgaacaggtgcccgttcctcctggacaattgccttggcacatctcagtggcccccaaggcgacgacgcaagcagctgttcaccctgcagacggtgaactccaatgggaccagcgaccgcacaacctcccctgaagaagtccatgcccagccgtacattgctatcgactgggagccagagatgaagaagcgttactatgacgaggtagaggctgagggctacgtgaagcatgactgcgtcgggtacgtgatgaagaaggctcccgtgcggctgcaggagtgcattgagctcttcaccactgtggagaccctggagaaggaaaacccctggtactgcccttcctgcaagcagcaccagctggcaaccaagaagctggacctgtggatgctgccggagattctcatcatccacctgaaacgcttttcctacaccaagttctcccgagagaagctggacaccctcgtggagtttcctatccgggacctggacttctctgagtttgtcatccagccacagaatgagtcgaatccggagctgtacaaatatgacctcatcgcggtttccaaccattatgggggcatgcgtgatggacactacacaacatttgcctgcaacaaggacagcggccagtggcactactttgatgacaacagcgtctcccctgtcaatgagaatcagatcgagtccaaggcagcctatgtcctcttctaccaacgccaggacgtggcgcgacgcctgctgtccccggccggctcatctggcgccccagcctcccctgcctgcagctccccacccagctctgagttcatggatgttaattgagagccctgggtcctgccacagaaaaaaaaaaaaaaaagccctctctgcaatctcgcttctcgtgtccgccccgcttctcttattcgtgttaggtgcccccgccaggcattgcaggcttagtcgtggctactgttctcctgtgccgctgcatcgctctctcccgggaaagaacaggtcgtgtctcctcctagcagtgcgcgccccgcctgtgtttgcccttccagcagtgaccctcccttctagtctttatttatggtcgtgcccttccctctcctcagcccagagtgttctgcgtgggtggtgatgggggttcacctgaacacagagtgtattttcttattgaggccctgtaccttctgctgtgtgtgtgtatatataaagcaccagtctgctcccca

SEQ ID NO: 33518 - DNA, 4497 bp, Homo sapiens
  source 1..4497: mol_type = unassigned DNA
cggaggcagcggctgcgccctgcgccggggcggagccgggggcgggccggcggccggcaggcgggggctggggcccgaggccgggagtgcctgagcgccggcggcgacgacggcagcggcggcccagcgggctcggtggttgggtccgcggcggctcggggtccgcccgcgggctgcggtgcgagcgggcggcccggctcccctcctcccccgcccgccgccgccgctgtgattgggtggaagatggcgctggccggatggaaatcctaatgacagtctccaaattcgcctccatctgtaccatgggcgccaatgcttcggcattagagaaagagattggtccagaacagtttccggtcaatgagcactattttggattagtcaattttgggaatacctgctactgcaattcagttcttcaagcactttatttttgtcgtccatttcgggaaaaagttcttgcgtataagagtcaacctaggaaaaaggagagccttcttacatgcttagcagatctcttccatagcatagccactcagaagaaaaaggttggagtaataccccctaagaagttcatcacaagattacggaaagaaaatgagctttttgacaactacatgcaacaagatgcccatgaattcttaaattacctactaaatacaattgctgatattttacaagaagagagaaagcaggaaaaacaaaatggtcgtttacctaatggtaatattgataatgaaaataataacagcacaccagacccaacgtgggttcatgagatttttcagggaacattaactaatgaaaccagatgtcttacttgtgaaactataagcagcaaagatgaagattttttagacctttctgttgacgtggaacaaaatacatcaattactcactgcttaaggggtttcagcaacacagaaactctgtgcagtgaatacaagtattactgtgaagagtgtcgcagcaaacaggaagcacacaaacggatgaaagttaaaaaactgcccatgattctagctctacacctgaagagatttaaatatatggatcaacttcatcgatatacaaaactctcttaccgggtagtttttcctttagaacttcgtctgtttaacacttcaggtgatgccaccaatccagacagaatgtacgaccttgttgctgttgtggttcactgtggaagtggtcccaatcgaggccattatattgcaatagttaagagtcatgatttttggttgttgtttgatgacgacattgtagaaaaaatagatgcacaagctattgaagaattctacgggttgacatcagatatctcaaagaactctgagtctggttacatccttttctatcagtctcgggactgagagggaaccgtgatgaagagacactttctgcctcatttcttctctggttattttggaaaggatcaagcactgatttttcaagaaaagagaaatgcaggaagctcagggggcagtagcacactttgcacacgataaagcaaagacgatggattgacaagcccttccgatcatggtagttgatttatttgctcaggtatcatgctgtctgtacagttccatacaacaaggaggtgaaatcagagataccagctcctcttttaaaacagccttccagtcattggcacgcattttctctttattaattgcaccaataatgctttgaattccttgggggtgcagtagaaagaatcggaatctgtgccgtattgataaggagatgatgttgaacacactgcataaatttgcctggttcagtatgtatagaagcatattcagtggtcttttcaagagtaaaccagaaatacttttgggcccaacacttgcagttgccttcctgatgtaaaaactaacatgctagataatccagtgtcgggaagacaaagatgttttgcttctctgaagaagcttataataatatacagtatatgtatatgtagggagcaattggtcaaaagtggctttttgtttccccaaggggaaagactggctttgtaattataattttttccttatttattttacttaaaactggtagagtctaagtattatatgaagtgcccatgattctgtcagtaaatttgaacatatttttattagttaatgtcagtttaagttgtccttttgtttgtttctatttttaaggtgaattttaatttctatctgaaatcagttaagataccttgagaaaaactgcagtgagaggagataaatatcctttttcaggaggaactgatatctctggctaaatatttgtccttttattatggtttctaaatcagttattttcttcagctttaatttcataaaattaaaaaactattttaaaaattcctgtagttgttggaataattaaaaattctggtgcagtggtggtataccaatctttagaattcttaagtattctaatgtttcaagttgagatcatgcttgggaaaatcatgtcatagcatttatgttattttcagatgccattttttaccctggaaagaagtcataatgttcatcataaccctagcagcctggatagtgagctaaacaaacccttcaaagattaaattttaatcaagtagaccgggaatacaaaagacaagtccttccttcccttccccccacctttacaaatcttactggaagggtgttcagaaattaaaatctgtgtttgctaagacttcattctgttgggggttttaagaagtaatatatgtaacataaaatatatgtaaacgattgcagtttttttggacgtttttccatgcatcagtaagttgtctgacagtagccaaatgtaacttgcagaaaattattgaaaattatattcagaataatagcaatcaggccttggatgttctttattaaactcttttcaggcagtaaatttaaaaaaaattgtcattttctaaagtccttttgctaaaactgttgactatggaaaacaacaaaaaggaattttttagtctgctgctattattaacatttattatctgtatcttttggctcaggaaatgacttcacctattttttccataagcagacctttaacagagtcacttaattgggctgcttaaacagatgttctgggagaaaattataatatttagtatttgtacaaaatatcaaaaagtattttgacaagtttctttttaagatagttcctaaagccttaccctggctagaggtgttttgtacaaattatatataagccagcctgatctaccaacatgccacagagaatcacaatcaacagtgtggggaaagtcagggcagtggaagtggatgcactctttttattttgaaggcttaaaccaaattgtcttggaattaaagctgtatttctgcagctttcggtacagagaaaaagaggaaagtgaagctgtgtcagttttaacattagctatatcaacatgtttaagaaagatagatgaagtcatttgcataaaggtacagcattgaaatactatgttgtgtttgtttttacatttttgcattaaaaaaaaacatgccgtaaaagccaagttaaatttcatattaaagcaagttctagtgtatgtgttgagttcctggtaatcacatacttgttcacatctacaccgtacttcatagtatgatttgtcaggggagggattgtggggtgacagttttacatttactttttcttcttaatgcagctggatctaagtaaaatgttttgaagtttatcagaaactaaatgtacttttaaaacgtatagggtcagggttgggggaaaaatacaggtatagtaagtaagaaaagtgacccatgaagaaagcatcgtgaggttgtatgttggttgactgtgattaaaatgcggggctggtgtaagttgtaagtggtggctgattgccgtgtaactatgtacatgattgttgggatggctgtcccatattttgtatattggaataaaaatttctataaattattgtaactaaaagtaaatattctaaattaagtcccacttcttaagtcacatggcttctgtcttggaaattttacctttaaaagattatttaagacaggaaccaggaggcttgggaacagggaaagagggaaatgttgtattatgtgggtcttggggcctctaaccatcagtatagggttttttctttccttgatggcagtagaaagacctcattttcataacataactactcttgatactttctttaaaaacactttttattaaagattctatcatgaggtatttggctgggagctgggaggctaaagcgctcatgtcctggctcttcagtgaatttaactgtgtgaccttgggcaagtcacttaacctctctgtgcttcagtctccctgtcttgtaaaatgggagtaatacctacctcacagggttgttgtggggattaattagagataatgtctgtaaagcatttaaggttcttgaagaaggcactatataaatacaaaataatatctattaaagttggtttatttgtg

SEQ ID NO: 33519 - DNA, 8323 bp, Homo sapiens
  source 1..8323: mol_type = unassigned DNA
ggcctcctcggagttgcccctctgcaagccaacaattcgggatagaaaacacctccgtggtgttttcccggggccctcccgcgccgcgttcggccgccagcccgctcgagctcccgcgccaacgcctcaggggttcgccctccgccccccgccgccgcgcccggcccacgcgcagggcccctctccagcgccccctccccggcacgctgcggctggcgctccccagccccgcctgacgctgcagctgggccggagactcgccattggattaaaaatagcgtcgccagtccgccccaagcccgcggtgcccgctcccgccccgcagcccgctctccccgcccgccccggctcggccggctgccgttgcccgcgcagcccgcccgtcagcccgctcgctggcgccgccgccgccggcagaccccgcgctccggctccggctcggctcgctcggctccggtgcgcgccgaggccatgcagcgccggggcgccctgttcggcatgccgggcggcagcggaggcaggaagatggctgcaggagacatcggcgagctgctagtgccccacatgcccacgatccgcgtgcccaggtccggcgacagggtctacaagaacgagtgcgccttctcctacgactctcccaattctgaaggtggactctatgtatgcatgaatacatttttggcctttggaagggaacatgttgaaagacattttcgaaaaactggacagagtgtatacatgcacctgaaaagacatgtgcgagagaaggtaagaggggcgtctggtggagcgttaccaaaaaggaggaattccaagatttttttagatctagatactgatgacgatttaaatagcgacgattatgaatatgaagatgaagccaaacttgttatattcccagatcactatgaaatagcactaccaaatattgaggagttaccagccctggtaacaattgcttgtgatgcagttctcagctcaaaatctccatacagaaagcaggacccagacacgtgggaaaatgaattgccagtatctaaatatgccaacaacctcacccagctggacaatggagtcaggattcctccaagtggttggaagtgtgccagatgcgacctgcgagaaaacctctggttgaatctgactgacggctctgtcctgtgtggaaagtggttctttgacagctctgggggcaacgggcatgcgctggagcattacagagacatgggctacccactagccgtgaaactgggaaccatcactcctgacggggcagatgtttattcttttcaagaagaagaacctgttttggatcctcatttggccaagcacttagcgcattttggaattgatatgcttcatatgcatgggacagagaatgggctccaggacaatgacatcaagctgagggtcagtgagtgggaagtgatccaggagtcgggcacgaaactgaagccaatgtatggtcctggctacacgggtctgaagaacctgggcaacagctgctatctcagctctgtcatgcaggccatcttcagcatcccagaattccagagagcgtatgtaggaaaccttcccagaatatttgactactcgcctttagatccaacacaagatttcaacacacagatgactaagttaggacatggccttctctcaggccagtattcaaagcctccggtgaaatctgaactcattgaacaggtgatgaaggaggagcacaagccacagcagaacgggatctctccgcgcatgtttaaggcctttgtaagcaagagccacccggaattctcctctaacaggcagcaagatgcccaggaattcttcttgcacctggtgaatctagtagagaggaaccgcatcggctcagaaaacccaagcgatgtttttcgttttttggtggaagaacgcattcagtgctgtcagacccggaaagtccgctacacggagagggtggattacctgatgcagttacctgtggccatggaggcggcaaccaacaaggatgaactgatcgcttatgaactaacgagaagggaagcagaagcaaacagaagaccccttcctgagttggtacgtgccaagataccatttagtgcctgccttcaggccttctctgaaccagaaaatgttgatgatttctggagcagtgccctacaagcaaagtctgcgggtgtgaaaacatctcgctttgcttcattccctgaatacttggtagtgcagataaagaagttcacttttggtcttgactgggttcccaaaaaatttgatgtttctattgatatgccagacctacttgatatcaaccatctccgagccagggggttacagccaggagaggaagaacttccagacatcagcccccccatagtcattcctgatgactcaaaagatcgcctgatgaaccaattgatagacccatcagacatcgatgagtcatcagtgatgcagctggccgagatgggtttcccgctggaagcatgtcgcaaggctgtgtacttcactggaaatatgggcgccgaggtggccttcaactggatcattgttcacatggaagagccagattttgctgagccgctgaccatgcctggttatggaggggcagcttctgctggagcctctgtttttggtgcttctggactggataaccaacctccagaggaaatcgtagctatcatcacctccatgggatttcagcgaaatcaggctattcaggcactacgagcaacgaataataacctggaaagagcactggattggatctttagccaccctgagtttgaagaagacagtgattttgtgattgagatggagaataatgccaatgcaaacattatttctgaggccaagcccgaaggacctagagtcaaggatggatctggaacatatgagctatttgcattcatcagtcacatgggaacatccacaatgagtggtcattacatttgccatatcaaaaaggaaggaagatgggtgatttacaatgaccacaaagtttgtgcctcagaaaggccccctaaagacctgggctacatgtacttttaccgcaggataccaagctaaacctcaaatataaaaattggcgaaaagaagccatacgcctttttaatttgccaaaaaaaaaaagaagaagaagaagttgaaacaactagacatgaaggaatatatggggtatttatcgtttatttaaagagcacgatcagttgacaccttctgaaatagaactgagaagaaatttctattagtgatgatacactattatattgtagatagtttttataaatgttcaaaaagatgatgatatttaaaaacaaaaaaagtattcatattgctggtggaggatctgccatcagcacatcaaaaatggggatgtgcccccagccctctattttgctttgggggtcagtgatagtggcctctggagaaaccaaataatgtggccagtggtgtggccttacccacaacaaatgaaaagcccacttgtgtttcatatagaaaatcagcagttgggtggggctttatttgtgacataatttttttcatgacatacaataatttctgatgtatccatgtagatattatgctctgtccataatagagcctctgcaatgaaagatatttttaatttgtcacattaaaattcataatacgattgtgtgaatgtgtgtgagactgactgagagtgtgagacttttactagaaaagtgagtccactagaaaatctgtgacaagttggtttttaaagtctgaacagttgatattaagcatatctgaaaaaagcaagtaaatattttaacaaaactatgactcaggaaccttcgagaagattagttccccacttagatttttaaggagtaaaaagggctgagttatgcctttaagtgctgtcaagaattcacttgggtttgggacatttgctggtgtaatgctagatgcccacagcagcataatattgtactttgtcaaaggtaggtaaattctctgtttctcagcagccctttccccaaaaggtatggtgtttatttttagtaaaaatagctaatctctttttaccatctcacatgataactctttggagtcatgtcaagtgccccaaatttgtctgtgattttcccatctctgagctctttatctgcctccgtttccttgtttttctggggccagagtctcatctctgcctttttttggtgtatcaccttctgacttgccttcattgcttgtctgatgtgaccaacagtgtgatcttggacacactaaggattttagatgcaaagaaactttatacaacattatgaaagactatcctttccattttggttatttcagcattttagttgcaacctgggattagattagagtttccaacgtgatgaaaagtggaatgatagcattctataatttccataattttcctactggtccgtaccaaattctagagtctctggagttgctatttcagagtatttggtcaaacgaaaaagaatttattgctgtctgtttaacatgtatttgtttggttgaaaggatctttttagaaactgtaggaaaataaacagaaccaaccaggtgaaacaaagcacagacattgggttaggatgtagtgagttgtgaacaatcaggattctgggtgtgatgggggtccctgtctcataggtgatcctttggtgccatgtgaccgagagacatggtgtctaaggcccatggcctggagacctgggtgctgctcctagctgactgtggaccttgggcaagtccttcatccgtcctgtgcctcactgtcctcatctgaacaatggtatgatgacacctgccctctctttcaatcatgctttgaggatacagtgagattggttacagtgaaccttcaatgagtagaatgtggtatgccatggtgggttgtagtagatggtgctccctgccttttctcctctgttttcctcaatttgggaacaaatgagattggcagaaggagggagctcacggtgcagtacttttctaccaaagtgtgcccactggtgtcacctcctaatgttaacttggatttcctaaagcagtcccactctgttatgagagtcactgactcccgtggacatccccacagtaagcagccttacaaaatccagtccccttagggcagagtgagtgtcatagaataatgactccaaacccacgtcaaaaatggcttgttttcagcgatgttataaaacaaaggcctgttttttggaattgggggtgactgggtggtttggattgaaatgtggacaaagatagcatgtgtattttgaataaaataaaaattttgtaataaaacttttaaaaatcagtgatgtaaaatcaatatttaagactataggctataaattgtttgatttcattaactagcccttttgatgcctagacatgttgtaaaaaaattgtgctatggctgccttttcttctgccccacaacacaaagggctatttctacaaggcaaagttttgtatatgtgctattctttacttcagattgagagttgggaaaaactggagtaaataatgggtttcttacttgcttaaaagcatatttatatgtgtatctcaatatatacaaggcaggttcccctataaaagtctggaatgtactgcttaattttacacttgtgtagacacgattatttgtgactgaaaagtggaataacgtgtggattttgtcaactcattatcagtctgttagcagtcctctatgtgaggcatggtggtctaattgtgaaattctccctgtatatgggtgtctgtgtgaaagacagcactttcttcctgtaaatatcttttgatatccatttatgtagaattccaatgaatatgtctttggaaaaggtaatgtatcaaagtttttattttgccaattgatctaaatgcccatataactaatcagaaatccagtttggttcagattgggattttcttttaaagaaaaaaaaagtatgcagaaaagactattggaagaatcatgtgttagtgacactttacatcaacgttgcttcaatattttggaattgaccaggctgctttctcctacctgcaagagaatgtgcctgacatttcccagtgcttactttgggctataggaagtccagcggggatagctcgagcctcttgctccctgagtcatttattccctttacctgaacagagccttacctgcaattcatagtgagagcacctgggtctgtatcctgactccactctaagtgaggtgggactgaatcactgtacctctctgggccttttcatttgaaacaagtgggttagactagattagctccaaagtcctctcttgccctaacattttatttttattttcctgtggttaccactagggtctgacacgtaaaatgtgagggatcacttagaggtttggatgttatatttttgcattgttacagcttatactccccagttgaggacctgtgtcattcttagtggccccacgacccctctgtttgtattcctgctccacttatctatacttttttgggtaatcatcccactttttttttttcttgagatggagtctcgctgtgttgccaaggctggagtacagtggtgcaatctcagctcactgcagcctcctcccgggttcaagtgattctcctgcctcagcttcccaagtagctgggattactggcgcacgccactacgcccagctaatttttgtatttttagtagagacagggttttgccatgttggccaggctggtcttgaactcttgacctcaacctgcctcagcctcccaaagtgctgggattacacgcatgagctaccgcgtccagccccactttttttctactcttgaaaaaaacaactttctagtccatgaggtactttggctccatccccctcaaaaacaaaacaaaaaatccatttaaagtgtcctcctagaaaagcctcagaactgccttcaactacatctgtcacctttatagaatattttgaaattctggaagaggatgggaaacaaaattctaatttagctagagctgtgatccccaaataagtgctgacaaaattgtctaccacagaaaggccgtccttgtcatcttgtaggcatcactgctgctaaatcacatcagtacatgccttctgtggggagatggcagggggcaggggcaggaccaggggatgggattagataaagtgtgataatgtcctttagataaaagaaatcctacgctatagaacaaggttctgtactcttgagttggtgtctgagatcacctgcacagtgttacagagattttccactccataaatcactctaaaagagtttgcataagactcggtagacctgtgctattcaatgtggcagtcaacagccatatgtggcgatgactactcaaagtttggcttgttcaaatcgagactgtgttgtacacatacaatacacaccagattttgaaggcttggtaccaaaaaggaatttaaaatatttcaccaatatttcatattgataacatgctgaaatgacactattttggatgtactaagtaaaatattaacaatttaatatatttatataattgaaattaaaattcttttcacccatttttatttttttaaaaatgtggcccctaaagaacttcaaattagacatgtggataacgttatacttctattggacagccccactctagacttacatggtgtggggtaggcagtgaaatccgtaaataggaaacgcaattctgcaaagtatctaaatagacagaaacaacacaaatatttttgctggagtcaggagcactgtgaggcacagaacatctcccagaaagcagattttttttttctgccgaaaaaccaatatatatatgtatgatcccaattaaaagacaaaagcaaatgagccccaaactgcctgtcttcagctttgcctgggagctgctacctttgctcttctagcatcttctaggtaccaaggatattagccacttgagggtgttgggcatatttgtttcattgtaggcaaaatcctcttgtggtttcccctccccaggtattgttgagtctgttcaaagctgggtgtgttgaaacactgcacaaatcctgccactcttgatgtgccgcttgtctcagccttggcagaggctgagtctgttcctgtgcccacctgtccagcaggttttgatgttggctcctgaaagagtttgtatttattttattttgcactagtcacagttgttgttaaactgtatcaaatgttttgggagattatttgcctgagatggaaagagagatggatgatttattgcttcaattgttttaaattaaaagctattctcacaa

SEQ ID NO: 33520 - DNA, 4156 bp, Homo sapiens
  source 1..4156: mol_type = unassigned DNA
gtctcctcgctgcagtcgctccggagctgcacgggtgttttgcgtgttgctgcgtcatcgccagtggccggtttgaatgagactcgtcgcaccgaagccgccgccaccaccgcgcctccgcctcggccgccgccgcagctgctcctggtccccgtccctttgccgccctcgtcaggcccagctctcctgcgccgccgcctcccgccgcgccccgccatgccgctctactccgttactgtaaaatggggaaaggagaaatttgaaggtgtagaattgaatacagatgaacctccaatggtattcaaggctcagctgtttgcgttgactggagtccagcctgccagacagaaagttatggtgaaaggaggaacgctaaaggatgatgattggggaaacatcaaaataaaaaatggaatgactctactaatgatggggtcagcagatgctcttccagaagaaccctcagccaaaactgtcttcgtagaagacatgacagaagaacagttagcatctgctatggagttaccatgtggattgacaaaccttggtaacacttgttacatgaatgccacagttcagtgtattcgttctgtgcctgaactcaaagatgcccttaaaaggtatgcaggtgccttgagagcttcaggggaaatggcttcagcgcagtatattactgcagcccttagagatttgtttgattccatggataaaacttcttccagtattccacctattattctactgcagtttttgcacatggctttcccacagtttgccgagaaaggtgaacaaggacagtatcttcaacaggatgctaatgaatgttggatacaaatgatgcgagtattgcaacagaaattggaagcaatagaggatgattctgttaaagagacagactcctcatctgcatcggcagcgacaccttctaaaaagaaaagtttaatcgatcagttcttcggtgttgagtttgaaactaccatgaaatgtacagaatctgaagaagaagaagtcaccaaaggaaaggaaaatcaacttcagcttagctgttttatcaatcaggaagtcaagtatctttttacaggacttaaattgcgacttcaggaagaaatcaccaaacagtctccaacgttgcaaagaaatgccttgtatatcaaatcttccaagatcagccggctgcctgcttacttgaccattcagatggttcgatttttttataaagagaaggaatctgtgaatgccaaagttcttaaggatgttaaatttcctcttatgttggatatgtatgaactgtgtacaccagaacttcaagagaaaatggtgtcttttcgatccaaattcaaggatctagaagataaaaaagtgaatcagcagccaaatacaagtgacaaaaagagtagtccccagaaagaagttaagtatgaacccttttcttttgctgatgatattggctccaataattgtggatactatgacttacaagcagtactaacacaccagggaaggtctagttcttcaggtcattatgtatcatgggtgaaaaggaaacaagatgaatggattaagtttgatgatgacaaagtcagcatcgtaacaccagaagatatcttacggctttctggtggtggagactggcatatcgcttacgttctactctatgggcctcgcagagttgaaataatggaagaggaaagtgaacagtaatcttcattttagtatttatgcttagatgtgaaaataaatgttatttgttgatcatttctataatccagagctttagaggaagacacataggtgggtttatgtttcacctcatttggaacaaaagaggacagaagcagaccactctgtgcaccaacctaaaaaattacagagaagagaaaattatctttggattgtgctgccctatataaaggtggcagaaagacatttttaaaaagcttattatttcttgcattattttaaaaagttcagagttgaaatgcctttcaaccatttccttctgtggtcatttttcttgctgcctttttcacccaagattcagcagtcagatgtttactgcacacctattacctattatttgctgttcttgcatggttcaaaccaccattctgtagccacccatcctttgccttatctaacaaacatttttccaggaaggtggaaaaggaagtgttgctctcattgtgtgactcagtgctgctgtccatcccatggaaacatgggcacaatcaagtatttgtccagcctattgcaggcttttcctgactttaaaataaattgtgatcaataatagtacctttgattatacatttattattgtgtctctctctgatgtactgtggattgtacatttaactttggaatggctttgtaataatcagtcttaagaaaatgttgacaagctctggttgcttatttttagaaaatgaggacatttaataataataaaaaaaaagggattaatagcttttgacctcaagtcttttgtcttctgagtgttggagcttggctgaagacatgtttaatactgtacaatttctgaagatggttattaacactgtgctgttaagcatccatttaaaaatatttgttatcttctttgcctgcctgtattttaaaaagaaatacaaagttgtaaaagtaatggatttctttggatgctgaatgcagtgatgttatcagtcagattctttccttggctcagttgtgtttgtatttcctttcttaattccccaaatcttggctgggcacggtggctcacgcctgtaatcccagcactttgggaggctgaggcaggtggttcactggaggttgagttcgagaccagcctggccacatggtgaaaccctgtctctactaaagatataaaaattagctggatgtggtggtgcacacctgtgatcccagctacttgggaggctgaggtgggagaattgcttgaacctggaaggcagaagttgcagtgagctgagatcacaccactgcactccagcctgggtgacagagagactctgtctcaaaaaaaaaaagaaaaaattcccaaatcttaatgtctgtttcagaattttagtgattttaaagtgatagtagaaaataccaagcatatgaggtatttcaatatgataggcttcttacattttaatagttactcatctttgttccaggacccttgactgatgctagggaaaggataaagcatagaataccagccagtttggctctgattttgagttatttataataaagtttggggattatcataacatctcatatctttgtgtatgttgttttaatgctcggcagagcacaacactgatgataactattaaaaatagaaaataacagccattttactttcaaatctgatgtgatgcaatctgtgaacactaggaggggataaaataagcattgcagggaaacttatttgtaaatagcttcctcacctaaactttgacttggcaatcaatactttctactttgtggaggggattaagaatagaatgggcaggatgagaccatgaaaattataatgattcatgtatatttgtatgatgcttgtaactttgcaaagtcttttttattcattgtctcatttggtcagaacaattttattgaggacatgaatttaacaattagaatttagattttctgactgtagctactaaatgttgtagctactagaccaggtgagctaggtttagagcaaagtatataagccttgtatggactatattagaattttaaaaattgtaattaattccttatcatcattataaaaagcttgatttttttatttgatctaaaaaagcattattccaaagaattttttcaagtagaaatgggagttagttataccagtgttgtttttaactaataaggctattttagaattcagccttgcctgtaaggtctttgagaagggagaggagtaggccaaaaaaaaaaaagtcttgattcctgaatgtgccttatatgctgtgccactcacaccgaggccatcatctcaacattagagttgtgctagattactgcttgactgactagctaggttaggcctaagagtgtttaccgaataatctgcactcactcagtagcccttcttcaggattaaaaacgatgatgacctcatcttagagccctaaagggaaatgcttat

SEQ ID NO: 33521 - DNA, 4051 bp, Homo sapiens
  source 1..4051: mol_type = unassigned DNA
gtctcctcgctgcagtcgctccggagctgcacgggtgttttgcgtgttgctgcgtcatcgccagtggccggtttgaatgagactcgtcgcaccgaagccgccgccaccaccgcgcctccgcctcggccgccgccgcagctgctcctggtccccgtccctttgccgccctcgtcaggcccagctctcctgcgccgccgcctcccgccgcgccccgccatgccgctctactccgttactgtaaaatggggaaaggagaaatttgaaggtgtagaattgaatacagatgaacctccaatggtattcaaggctcagctgtttgcgttgactggagtccagcctgccagacagaaagttatggtgaaaggaggaacgctaaaggatgatgattggggaaacatcaaaataaaaaatatggagttaccatgtggattgacaaaccttggtaacacttgttacatgaatgccacagttcagtgtattcgttctgtgcctgaactcaaagatgcccttaaaaggtatgcaggtgccttgagagcttcaggggaaatggcttcagcgcagtatattactgcagcccttagagatttgtttgattccatggataaaacttcttccagtattccacctattattctactgcagtttttgcacatggctttcccacagtttgccgagaaaggtgaacaaggacagtatcttcaacaggatgctaatgaatgttggatacaaatgatgcgagtattgcaacagaaattggaagcaatagaggatgattctgttaaagagacagactcctcatctgcatcggcagcgacaccttctaaaaagaaaagtttaatcgatcagttcttcggtgttgagtttgaaactaccatgaaatgtacagaatctgaagaagaagaagtcaccaaaggaaaggaaaatcaacttcagcttagctgttttatcaatcaggaagtcaagtatctttttacaggacttaaattgcgacttcaggaagaaatcaccaaacagtctccaacgttgcaaagaaatgccttgtatatcaaatcttccaagatcagccggctgcctgcttacttgaccattcagatggttcgatttttttataaagagaaggaatctgtgaatgccaaagttcttaaggatgttaaatttcctcttatgttggatatgtatgaactgtgtacaccagaacttcaagagaaaatggtgtcttttcgatccaaattcaaggatctagaagataaaaaagtgaatcagcagccaaatacaagtgacaaaaagagtagtccccagaaagaagttaagtatgaacccttttcttttgctgatgatattggctccaataattgtggatactatgacttacaagcagtactaacacaccagggaaggtctagttcttcaggtcattatgtatcatgggtgaaaaggaaacaagatgaatggattaagtttgatgatgacaaagtcagcatcgtaacaccagaagatatcttacggctttctggtggtggagactggcatatcgcttacgttctactctatgggcctcgcagagttgaaataatggaagaggaaagtgaacagtaatcttcattttagtatttatgcttagatgtgaaaataaatgttatttgttgatcatttctataatccagagctttagaggaagacacataggtgggtttatgtttcacctcatttggaacaaaagaggacagaagcagaccactctgtgcaccaacctaaaaaattacagagaagagaaaattatctttggattgtgctgccctatataaaggtggcagaaagacatttttaaaaagcttattatttcttgcattattttaaaaagttcagagttgaaatgcctttcaaccatttccttctgtggtcatttttcttgctgcctttttcacccaagattcagcagtcagatgtttactgcacacctattacctattatttgctgttcttgcatggttcaaaccaccattctgtagccacccatcctttgccttatctaacaaacatttttccaggaaggtggaaaaggaagtgttgctctcattgtgtgactcagtgctgctgtccatcccatggaaacatgggcacaatcaagtatttgtccagcctattgcaggcttttcctgactttaaaataaattgtgatcaataatagtacctttgattatacatttattattgtgtctctctctgatgtactgtggattgtacatttaactttggaatggctttgtaataatcagtcttaagaaaatgttgacaagctctggttgcttatttttagaaaatgaggacatttaataataataaaaaaaaagggattaatagcttttgacctcaagtcttttgtcttctgagtgttggagcttggctgaagacatgtttaatactgtacaatttctgaagatggttattaacactgtgctgttaagcatccatttaaaaatatttgttatcttctttgcctgcctgtattttaaaaagaaatacaaagttgtaaaagtaatggatttctttggatgctgaatgcagtgatgttatcagtcagattctttccttggctcagttgtgtttgtatttcctttcttaattccccaaatcttggctgggcacggtggctcacgcctgtaatcccagcactttgggaggctgaggcaggtggttcactggaggttgagttcgagaccagcctggccacatggtgaaaccctgtctctactaaagatataaaaattagctggatgtggtggtgcacacctgtgatcccagctacttgggaggctgaggtgggagaattgcttgaacctggaaggcagaagttgcagtgagctgagatcacaccactgcactccagcctgggtgacagagagactctgtctcaaaaaaaaaaagaaaaaattcccaaatcttaatgtctgtttcagaattttagtgattttaaagtgatagtagaaaataccaagcatatgaggtatttcaatatgataggcttcttacattttaatagttactcatctttgttccaggacccttgactgatgctagggaaaggataaagcatagaataccagccagtttggctctgattttgagttatttataataaagtttggggattatcataacatctcatatctttgtgtatgttgttttaatgctcggcagagcacaacactgatgataactattaaaaatagaaaataacagccattttactttcaaatctgatgtgatgcaatctgtgaacactaggaggggataaaataagcattgcagggaaacttatttgtaaatagcttcctcacctaaactttgacttggcaatcaatactttctactttgtggaggggattaagaatagaatgggcaggatgagaccatgaaaattataatgattcatgtatatttgtatgatgcttgtaactttgcaaagtcttttttattcattgtctcatttggtcagaacaattttattgaggacatgaatttaacaattagaatttagattttctgactgtagctactaaatgttgtagctactagaccaggtgagctaggtttagagcaaagtatataagccttgtatggactatattagaattttaaaaattgtaattaattccttatcatcattataaaaagcttgatttttttatttgatctaaaaaagcattattccaaagaattttttcaagtagaaatgggagttagttataccagtgttgtttttaactaataaggctattttagaattcagccttgcctgtaaggtctttgagaagggagaggagtaggccaaaaaaaaaaaagtcttgattcctgaatgtgccttatatgctgtgccactcacaccgaggccatcatctcaacattagagttgtgctagattactgcttgactgactagctaggttaggcctaagagtgtttaccgaataatctgcactcactcagtagcccttcttcaggattaaaaacgatgatgacctcatcttagagccctaaagggaaatgcttat

SEQ ID NO: 33522 - DNA, 1681 bp, Homo sapiens
  source 1..1681: mol_type = unassigned DNA
gtcatcgccagtggccggtttgaatgagactcgtcgcaccgaagccgccgccaccaccgcgcctccgcctcggccgccgccgcagctgctcctggtccccgtccctttgccgccctcgtcaggcccagctctcctgcgccgccgcctcccgccgcgccccgccatgccgctctactccgttactgtaaaatggggaaaggagaaatttgaaggtgtagaattgaatacagatgaacctccaatggtattcaaggctcagctgtttgcgttgactggagtccagcctgccagacagaaagttatggtgaaaggaggaacgctaaagggaatgactctactaatgatggggtcagcagatgctcttccagaagaaccctcagccaaaactgtcttcgtagaagacatgacagaagaacagttagcatctgctatggagttaccatgtggattgacaaaccttggtaacacttgttacatgaatgccacagttcagtgtattcgttctgtgcctgaactcaaagatgcccttaaaaggtatgcaggtgccttgagagcttcaggggaaatggcttcagcgcagtatattactgcagcccttagagatttgtttgattccatggataaaacttcttccagtattccacctattattctactgcagtttttgcacatggctttcccacagtttgccgagaaaggtgaacaaggacagtatcttcaacaggatgctaatgaatgttggatacaaatgatgcgagtattgcaacagaaattggaagcaatagaggatgattctgttaaagagacagactcctcatctgcatcggcagcgacaccttctaaaaagaaaagtttaatcgatcagttcttcggtgttgagtttgaaactaccatgaaatgtacagaatctgaagaagaagaagtcaccaaaggaaaggaaaatcaacttcagcttagctgttttatcaatcaggaagtcaagtatctttttacaggacttaaattgcgacttcaggaagaaatcaccaaacagtctccaacgttgcaaagaaatgccttgtatatcaaatcttccaagatcagccggctgcctgcttacttgaccattcagatggttcgatttttttataaagagaaggaatctgtgaatgccaaagttcttaaggatgttaaatttcctcttatgttggatatgtatgaactgtgtacaccagaacttcaagagaaaatggtgtcttttcgatccaaattcaaggatctagaagataaaaaagtgaatcagcagccaaatacaagtgacaaaaagagtagtccccagaaagaagttaagtatgaacccttttcttttgctgatgatattggctccaataattgtggatactatgacttacaagcagtactaacacaccagggaaggtctagttcttcaggtcattatgtatcatgggtgaaaaggaaacaagatgaatggattaagtttgatgatgacaaagtcagcatcgtaacaccagaagatatcttacggctttctggtggtggagactggcatatcgcttacgttctactctatgggcctcgcagagttgaaataatggaagaggaaagtgaacagtaatcttcattttagtatttatgcttagatgtgaaaataaatgttatttgttgatcatttctataatcc

SEQ ID NO: 33523 - DNA, 1803 bp, Homo sapiens
  source 1..1803: mol_type = unassigned DNA
ccctcacttgctccctccttccttcccgccacccctccaccgccttccccctcctccctcctctcgccacctctaggccccgccccggtcctgccgcccagtctcctcgctgcagtcgctccggagctgcacgggtgttttgcgtgttgctgcgtcatcgccagtggccggtttgaatgagactcgtcgcaccgaagccgccgccaccaccgcgcctccgcctcggccgccgccgcagctgctcctggtccccgtccctttgccgccctcgtcaggcccagctctcctgcgccgccgcctcccgccgcgccccgccatgccgctctactccgttactgtaaaatggggaaaggagaaatttgaaggtgtagaattgaatacagatgaacctccaatggtattcaaggctcagctgtttgcgttgactggagtccagcctgccagacagaaagttatggtgaaaggaggaacgctaaaggatgatgattggggaaacatcaaaataaaaaatatggagttaccatgtggattgacaaaccttggtaacacttgttacatgaatgccacagttcagtgtattcgttctgtgcctgaactcaaagatgcccttaaaaggtatgcaggtgccttgagagcttcaggggaaatggcttcagcgcagtatattactgcagcccttagagatttgtttgattccatggataaaacttcttccagtattccacctattattctactgcagtttttgcacatggctttcccacagtttgccgagaaaggtgaacaaggacagtatcttcaacaggatgctaatgaatgttggatacaaatgatgcgagtattgcaacagaaattggaagcaatagaggatgattctgttaaagagacagactcctcatctgcatcggcagcgacaccttctaaaaagaaaagtttaatcgatcagttcttcggtgttgagtttgaaactaccatgaaatgtacagaatctgaagaagaagaagtcaccaaaggaaaggaaaatcaacttcagcttagctgttttatcaatcaggaagtcaagtatctttttacaggacttaaattgcgacttcaggaagaaatcaccaaacagtctccaacgttgcaaagaaatgccttgtatatcaaatcttccaagatcagccggctgcctgcttacttgaccattcagatggttcgatttttttataaagagaaggaatctgtgaatgccaaagttcttaaggatgttaaatttcctcttatgttggatatgtatgaactgtgtacaccagaacttcaagagaaaatggtgtcttttcgatccaaattcaaggatctagaagataaaaaagtgaatcagcagccaaatacaagtgacaaaaagagtagtccccagaaagaagttaagtatgaacccttttcttttgctgatgatattggctccaataattgtggatactatgacttacaagcagtactaacacaccagggaaggtctagttcttcaggtcattatgtatcatgggtgaaaaggaaacaagatgaatggattaagtttgatgatgacaaagtcagcatcgtaacaccagaagatatcttacggctttctggtggtggagactggcatatcgcttacgttctactctatgggcctcgcagagttgaaataatggaagaggaaagtgaacagtaatcttcattttagtatttatgcttagatgtgaaaataaatgttatttgttgatcatttctataatccagagctttagaggaagacacataggtgggtttatgtttcac

SEQ ID NO: 33524 - DNA, 2129 bp, Homo sapiens
  source 1..2129: mol_type = unassigned DNA
gacagaatgagactccgtctcaaaaaaaaaaaaaaaaaaaaaaagcgagggctggaagtctggagcaggtgcgcggctgcaacggcagccgcgggaagctcgggccggcagggtttccccgcacgctggcgcccagctcccggcgcggaggccgctgtaagtttcgctttccattcagtggaaaacgaaagctgggcggggtgccacgagcgcggggccagaccaaggcgggcccggagcggaacttcggtcccagctcggtccccggctcagtcccgacgtggaactcagcagcggaggctggacgcttgcatggcgcttgagagattccatcgtgcctggctcacataagcgcttcctggaagtgaagtcgtgctgtcctgaacgcgggccaggcagctgcggcctgggggttttggagtgatcacgaatgagcaaggcgtttgggctcctgaggcaaatctgtcagtccatcctggctgagtcctcgcagtccccggcagatcttgaagaaaagaaggaagaagacagcaacatgaagagagagcagcccagagagcgtcccagggcctgggactaccctcatggcctggttggtttacacaacattggacagacctgctgccttaactccttgattcaggtgttcgtaatgaatgtggacttcaccaggatattgaagaggatcacggtgcccaggggagctgacgagcagaggagaagcgtccctttccagatgcttctgctgctggagaagatgcaggacagccggcagaaagcagtgcggcccctggagctggcctactgcctgcagaagtgcaacgtgcccttgtttgtccaacatgatgctgcccaactgtacctcaaactctggaacctgattaaggaccagatcactgatgtgcacttggtggagagactgcaggccctgtatacgatccgggtgaaggactccttgatttgcgttgactgtgccatggagagtagcagaaacagcagcatgctcaccctcccactttctctttttgatgtggactcaaagcccctgaagacactggaggacgccctgcactgcttcttccagcccagggagttatcaagcaaaagcaagtgcttctgtgagaactgtgggaagaagacccgtgggaaacaggtcttgaagctgacccatttgccccagaccctgacaatccacctcatgcgattctccatcaggaattcacagacgagaaagatctgccactccctgtacttcccccagagcttggatttcagccagatccttccaatgaagcgagagtcttgtgatgctgaggagcagtctggagggcagtatgagctttttgctgtgattgcgcacgtgggaatggcagactccggtcattactgtgtctacatccggaatgctgtggatggaaaatggttctgcttcaatgactccaatatttgcttggtgtcctgggaagacatccagtgtacctacggaaatcctaactaccactggcaggaaactgcatatcttctggtttacatgaagatggagtgctaatggaaatgcccaaaaccttcagagattgacacgctgtcattttccatttccgttcctggatctacggagtcttctaagagattttgcaatgaggagaagcattgttttcaaactatataactgagccttatttataattagggatattatcaaaatatgtaaccatgaggcccctcaggtcctgatcagtcagaatggatgctttcaccagcagacccggccatgtggctgctcggtcctgggtgctcgctgctgtgcaagacattagccctttagttatgagcctgtgggaacttcaggggttcccagtggggagagcagtggcagtgggaggcatctgggggccaaaggtcagtggcagggggtatttcagtattatacaactgctgtgaccagacttgtatactggctgaatatcagtgctgtttgtaatttttcactttgagaaccaacattaattccatatgaatcaagtgttttgtaactgctattcatttattcagcaaatatttattgatcatctcttctccataagatagtgtgataaacacagtcatgaataaagttattttccacaaaa

SEQ ID NO: 33525 - DNA, 1180 bp, Homo sapiens
  source 1..1180: mol_type = unassigned DNA
ataactgctgacccatgtctgctcccagagctaggtgacccagcagccaagcccttgagtgggaactgcaaaagctggggctgcctatgtgtggtccaaaccctcccctctccaggagaaagctgggagtagggattccttcctcacagtaagtgtttgtccaacatgatgctgcccaactgtacctcaaactctggaacctgattaaggaccagatcactgatgtgcacttggtggagagactgcaggccctgtatacgatccgggtgaaggactccttgatttgcgttgactgtgccatggagagtagcagaaacagcagcatgctcaccctcccactttctctttttgatgtggactcaaagcccctgaagacactggaggacgccctgcactgcttcttccagcccagggagttatcaagcaaaagcaagtgcttctgtgagaactgtgggaagaagacccgtgggaaacaggtcttgaagctgacccatttgccccagaccctgacaatccacctcatgcgattctccatcaggaattcacagacgagaaagatctgccactccctgtacttcccccagagcttggatttcagccagatccttccaatgaagcgagagtcttgtgatgctgaggagcagtctggagggcagtatgagctttttgctgtgattgcgcacgtgggaatggcagactccggtcattactgtgtctacatccggaatgctgtggatggaaaatggttctgcttcaatgactccaatatttgcttggtgtcctgggaagacatccagtgtacctacggaaatcctaactaccactggcctccttttctttgtcatgcatgcatattaattgaggatggagaatatctacgcttgttcaggccagccaacatacgacagtttacttcaagagaggagacatgggttgaatgctggtgtgttttaactctgcagtgcaaacagctgcaacaagtgtggtgaactaaacaccagatggccctttgctgccttatttgtcattgtgccttacatgtagcttgcaggatttgattacgcttatgttttgtggtgatcatactttcaactattcctaaaatactgcttcagtcttatctgtttggggtcaactgccgaggatttcatacaaattaatgaagtttgtgaatctaaag

SEQ ID NO: 33526 - DNA, 2195 bp, Homo sapiens
  source 1..2195: mol_type = unassigned DNA
gagacggtgaagccggtggccggtggccgggcgggaccaacaaagatggcggcggcccctgcggcgggagcgatctgggcaacggctgcggctaaagctgcagccgggcccacgggggggctgcacgggggtagtagggggtggccctgaactggggcctggccctggctggcctctcccgccgcctcactgggggacaggtccagcctgtggtgtccacaatgccccaggcctctgagcaccgcctgggccgtacccgagagccacctgttaatatccagccccgagtgggatccaagctaccatttgcccccagggcccgcagcaaggagcgcagaaacccagcctctgggccaaaccccatgttacgacctctgcctccccggccaggtctgcctgatgaacggctcaagaaactggagctgggacggggacggacctcaggccctcgtcccagaggcccccttcgagcagatcatggggttcccctgcctggctcaccacccccaacagtggctttgcctctcccatctcggaccaacttagcccgttccaagtctgtgagcagtggggacttgcgtccaatggggattgccttgggagggcaccgtggcaccggagagcttggggctgcactgagccgcttggccctccggcctgagccacccactttgagacgtagcacttctctccgccgcctagggggctttcctggaccccctaccctgttcagcatacggacagagccccctgcttcccatggctccttccacatgatatccgcccggtcctctgagcctttctactctgatgacaagatggctcatcacacactccttctgggctctggtcatgttggccttcgaaacctgggaaacacgtgcttcctgaatgctgtgctgcagtgtctgagcagcactcgacctcttcgggacttctgtctgagaagggacttccggcaagaggtgcctggaggaggccgagcccaagagctcactgaagcctttgcagatgtgattggtgccctctggcaccctgactcctgcgaagctgtgaatcctactcgattccgagctgtcttccagaaatatgttccctccttctctggatacagccagcaggatgcccaagagttcctgaagctcctcatggagcggctacaccttgaaatcaaccgccgaggccgccgggctccaccgatacttgccaatggtccagttccctctccaccccgccgaggaggggctctgctagaagaacctgagttaagtgatgatgaccgagccaacctaatgtggaaacgttacctggagcgagaggacagcaagattgtggacctgtttgtgggccagttgaaaagttgtctcaagtgccaggcctgtgggtatcgctccacgaccttcgaggttttttgtgacctgtccctgcccatccccaagaaaggatttgctgggggcaaggtgtctctgcgggattgtttcaaccttttcactaaggaagaagagctagagtcggagaatgccccagtgtgtgaccgatgtcggcagaaaactcgaagtaccaaaaagttgacagtacaaagattccctcgaatcctcgtgctccatctgaatcgattttctgcctcccgaggctccatcaaaaaaagttcagtaggtgtagactttccactgcagcgactgagcctaggggactttgccagtgacaaagccggaagtcctgtataccagctgtatgccctttgcaaccactcaggcagcgtccactatggccactacacagccctgtgccggtgccagactggttggcatgtctacaatgactctcgtgtctcccctgtcagtgaaaaccaggtggcatccagcgagggctacgtgctgttctaccaactgatgcaggagccaccccggtgcctgtgacacctctaagctctggcacctgtgaagccctttaaacacccttaagccccaggctccccgtttacctcagagacgtctatttttgtgtctttttaatcggggaggggggagggggtggttgtagctccattattttttttattaaaaaatacccttccacctggaggctcccttgtctcccagccccatgtacaaagctcaccaagcccctgcccatgtacagcccccagaccctctgcaatatcactttttgtgaataaatttattaagaaaaaa

SEQ ID NO: 33527 - DNA, 2095 bp, Homo sapiens
  source 1..2095: mol_type = unassigned DNA
ctgcggcgggagcgatctgggcaacggctgcggctaaagctgcagccgggcccacgggggggctgcacgggggtagtagggggtggccctgaactggggcctggccctggctggcctctcccgccgcctcactgggggacaggtccagcctgtggtgtccacaatgccccaggcctctgagcaccgcctgggccgtacccgagagccacctgttaatatccagccccgagtgggatccaagctaccatttgcccccagggcccgcagcaaggagcgcagaaacccagcctctgggccaaaccccatgttacgacctctgcctccccggccaggtctgcctgatgaacggctcaagaaactggagctgggacggggacggacctcaggccctcgtcccagaggcccccttcgagcagatcatggggttcccctgcctggctcaccacccccaacagtggctttgcctctcccatctcggaccaacttagcccgttccaagtctgtgagcagtggggacttgcgtccaatggggattgccttgggagggcaccgtggcaccggagagcttggggctgcactgagccgcttggccctccggcctgagccacccactttgagacgtagcacttctctccgccgcctagggggctttcctggaccccctaccctgttcagcatacggacagagccccctgcttcccatggctccttccacatgatatccgcccggtcctctgagcctttctactctgatgacaagatggctcatcacacactccttctgggctctggtcatgttggccttcgaaacctgggaaacacgtgcttcctgaatgctgtgctgcagtgtctgagcagcactcgacctcttcgggacttctgtctgagaagggacttccggcaagaggtgcctggaggaggccgagcccaagagctcactgaagcctttgcagatgtgattggtgccctctggcaccctgactcctgcgaagctgtgaatcctactcgattccgagctgtcttccagaaatatgttccctccttctctggatacagccagcaggatgcccaagagttcctgaagctcctcatggagcggctacaccttgaaatcaaccgccgaggccgccgggctccaccgatacttgccaatggtccagttccctctccaccccgccgaggaggggctctgctagaagaacctgagttaagtgatgatgaccgagccaacctaatgtggaaacgttacctggagcgagaggacagcaagattgtggacctgtttgtgggccagttgaaaagttgtctcaagtgccaggcctgtgggtatcgctccacgaccttcgaggttttttgtgacctgtccctgcccatccccaagaaaggatttgctgggggcaaggtgtctctgcgggattgtttcaaccttttcactaaggaagaagagctagagtcggagaatgccccagtgtgtgaccgatgtcggcagaaaactcgaagtaccaaaaagttgacagtacaaagattccctcgaatcctcgtgctccatctgaatcgattttctgcctcccgaggctccatcaaaaaaagttcagtaggtgtagactttccactgcagcgactgagcctaggggactttgccagtgacaaagccggcagcgtccactatggccactacacagccctgtgccggtgccagactggttggcatgtctacaatgactctcgtgtctcccctgtcagtgaaaaccaggtggcatccagcgagggctacgtgctgttctaccaactgatgcaggagccaccccggtgcctgtgacacctctaagctctggcacctgtgaagccctttaaacacccttaagccccaggctccccgtttacctcagagacgtctatttttgtgtctttttaatcggggaggggggagggggtggttgtagctccattattttttttattaaaaaatacccttccacctggaggctcccttgtctcccagccccatgtacaaagctcaccaagcccctgcccatgtacagcccccagaccctctgcaatatcactttttgtgaataaatttattaagaaaaaa

SEQ ID NO: 33528 - DNA, 2342 bp, Homo sapiens
  source 1..2342: mol_type = unassigned DNA
gcgcaggcgctttgagagacggtgaagccggtggccggtggccgggcgggaccaacaaagatggcggcggcccctgcggcgggagcgatctgggcaacggctgcggctaaagctgcagccgggcccacgggggggctgcacgggggtagtagggggtggccctgaactggggcctggccctggctggcctctcccgccgcctcactgggggacaggtactggggatacgatggctgattcgatagatctggttcctgccctcagtgcgtatactgctccccactttcgttgatgtggtagtggtgatgactgagccaaccacctaatgtggaaatgagaggacagcaagattgtgggtccagcctgtggtgtccacaatgccccaggcctctgagcaccgcctgggccgtacccgagagccacctgttaatatccagccccgagtgggatccaagctaccatttgcccccagggcccgcagcaaggagcgcagaaacccagcctctgggccaaaccccatgttacgacctctgcctccccggccaggtctgcctgatgaacggctcaagaaactggagctgggacggggacggacctcaggccctcgtcccagaggcccccttcgagcagatcatggggttcccctgcctggctcaccacccccaacagtggctttgcctctcccatctcggaccaacttagcccgttccaagtctgtgagcagtggggacttgcgtccaatggggattgccttgggagggcaccgtggcaccggagagcttggggctgcactgagccgcttggccctccggcctgagccacccactttgagacgtagcacttctctccgccgcctagggggctttcctggaccccctaccctgttcagcatacggacagagccccctgcttcccatggctccttccacatgatatccgcccggtcctctgagcctttctactctgatgacaagatggctcatcacacactccttctgggctctggtcatgttggccttcgaaacctgggaaacacgtgcttcctgaatgctgtgctgcagtgtctgagcagcactcgacctcttcgggacttctgtctgagaagggacttccggcaagaggtgcctggaggaggccgagcccaagagctcactgaagcctttgcagatgtgattggtgccctctggcaccctgactcctgcgaagctgtgaatcctactcgattccgagctgtcttccagaaatatgttccctccttctctggatacagccagcaggatgcccaagagttcctgaagctcctcatggagcggctacaccttgaaatcaaccgccgaggccgccgggctccaccgatacttgccaatggtccagttccctctccaccccgccgaggaggggctctgctagaagaacctgagttaagtgatgatgaccgagccaacctaatgtggaaacgttacctggagcgagaggacagcaagattgtggacctgtttgtgggccagttgaaaagttgtctcaagtgccaggcctgtgggtatcgctccacgaccttcgaggttttttgtgacctgtccctgcccatccccaagaaaggatttgctgggggcaaggtgtctctgcgggattgtttcaaccttttcactaaggaagaagagctagagtcggagaatgccccagtgtgtgaccgatgtcggcagaaaactcgaagtaccaaaaagttgacagtacaaagattccctcgaatcctcgtgctccatctgaatcgattttctgcctcccgaggctccatcaaaaaaagttcagtaggtgtagactttccactgcagcgactgagcctaggggactttgccagtgacaaagccggaagtcctgtataccagctgtatgccctttgcaaccactcaggcagcgtccactatggccactacacagccctgtgccggtgccagactggttggcatgtctacaatgactctcgtgtctcccctgtcagtgaaaaccaggtggcatccagcgagggctacgtgctgttctaccaactgatgcaggagccaccccggtgcctgtgacacctctaagctctggcacctgtgaagccctttaaacacccttaagccccaggctccccgtttacctcagagacgtctatttttgtgtctttttaatcggggaggggggagggggtggttgtagctccattattttttttattaaaaaatacccttccacctggaggctcccttgtctcccagccccatgtacaaagctcaccaagcccctgcccatgtacagcccccagaccctctgcaatatcactttttgtgaataaatttatt

SEQ ID NO: 33529 - DNA, 5220 bp, Homo sapiens
  source 1..5220: mol_type = unassigned DNA
gcagccgcagctcgggggcggtgcctgccttgcagcctcccctcggcgatcgcgcagccccatctttgtccggcctccgcgctttgttctcggcgcccgggccttggccagcctggccagccgccgagcagcccccacgccgcgctggcgtcgtcctcgcctccctcgccgccgccccccgcgcgcggccgggccttgccccccatggtgtcccggccagagcccgagggcgaggccatggacgccgagctggcggtagcgccgccgggctgctcgcacctgggcagcttcaaggtggacaactggaagcagaacctgcgggccatctaccagtgcttcgtgtggagcggcacggctgaggcccgcaagcgcaaggccaagtcctgtatctgccatgtctgtggcgtccacctcaacaggctgcattcctgcctctactgtgtcttcttcggctgtttcacaaagaagcatattcacgagcatgcgaaggcgaagcggcacaacctggccattgatctgatgtacggaggcatctactgttttctgtgccaggactacatctatgacaaagacatggaaataatcgccaaggaggagcagcgaaaagcttggaaaatgcaaggcgttggagagaagttttcaacttgggaaccaaccaaacgggagcttgaactgctgaagcacaacccgaaaaggagaaagatcacctcgaactgcaccataggtctgcgtgggctgatcaaccttgggaacacatgcttcatgaactgcatcgtgcaggccctgacccacacgccacttctgcgggacttcttcctgtctgacaggcaccgctgtgagatgcagagccccagctcctgtctggtctgtgagatgtcctcactgtttcaggagttttactctggacaccggtcccctcacatcccgtataagttgctgcacctggtgtggacccacgcgaggcacctagcaggctacgagcagcaggacgcccacgagttcctcatcgcggccctggacgtgctccaccgacactgcaaaggtgatgacaatgggaagaaggccaacaaccccaaccactgcaactgcatcatagaccagatcttcacaggcgggttgcagtcagacgtcacctgccaagtctgccatggagtctccaccaccatcgaccccttctgggacatcagcttggatctccccggctcttccaccccattctggcccctgagcccagggagcgagggcaacgtggtaaacggggaaagccacgtgtcgggaaccaccacgctcacggactgcctgcgacgattcaccagaccagagcacttgggcagcagcgccaagatcaagtgcagcggttgccatagctaccaggagtccacaaagcagctcactatgaagaaactgcccatcgtagcctgttttcatctcaaacgatttgaacactcagccaagctgcggcggaagatcaccacgtatgtgtccttccccctggagctggacatgacccctttcatggcctccagcaaagagagcaggatgaatggacagtaccagcagcccacggacagtctcaacaatgacaacaagtattccctgtttgctgttgttaaccatcaagggaccttggagagtggccactacaccagctttatccggcagcacaaagaccagtggttcaagtgtgacgatgccatcatcaccaaggccagcatcaaggacgtcctggacagcgaagggtacttgctgttctatcacaaacagttcctggaatacgagtagccttatctgcagctggtcagaaaaacaaaggcaatgcattggcaagcctcacaaagtgatcctccctggcccccccctcccccaagtctcccgccgcctccccggcctggtgacaccacctcccatgcagatgtggcccctctgcacctgggacccatcgggtcgggatggaccacacggacggggaggctcctggagctgctttgaagatggatgagatgaggggtgtgctctgggtgggaggagcagcgtacacccgtcaccagaacatctcttgtgtcatgacatgggggtgcaacgggggcctcacagcacagagtgaccgctgcctggcgttccccagcactcggtgtggaaaggcccctacctgctgtaagattatgggtccatgaaagcagtaagctggacacagaggtgtagtgtgcgggacagagggccttgcagatgcctttctgttggtgttttagtgttaaaatacggagagtatggaactcttcacctccattttctcagcggctgtgaagcagcctcctagcttcggaagtacggacactacgtcgcgttttcaagcgtgtctgttctgcaggtaacagcatcaagctgcacgtggaagcatctcgcggttttctagaaacaggcattttcttatccctctcccgctcctttttccacaaaggtgaatttcataaatgtaatactagtaaagtgaatgaattactgagtttatacagaaatttaggtaacttctcctttagtctcaagagcgagtcttgctttttaatgggtgccgtttatgttgctgcccgccctgtgtgcctggctcctctgggtgccttggtgtctgctggtggctggcagtgggcgcagcggaggagagttgtgctgcagctcatacggtgtgtctgtcatctcagtctggagtaaatgcagtgtctgccggtgtctgatgggttctgtccctcgtattttctttgccttctatcccattgcctggctaccgctgcctggcagccaagggtgttggtcgcgaagctggagtggcctctggtggagcctgcatcttgtctcgtctgcctctgctttacatttggtgtactttcgggcgtggtggcagtaaaatgacaccgtgattgagcttgtcagcagagctgaaagagaaagtagaaggatgtgcattgtttcttgtaagatatcttgcatgtatctgtgtattcaaattcaaacagagatggtttgtccatttgtccactgagaaattagaaactagggacaagggggaggaaaagtactgaaatacagtttatgaagcaagtgtgtctcgggctgtgcttgtcccaggagccccagcagcatctgaactgaggcttcttcagtcctgcaggaacaggatcatctgtctcagcggtgggcagatgttttcatagacagccagggagtaaacactgttggctctgtgggctgtatggtctctgccataaatagtacagagatgtggctgtgtctagtacaacttttagacacagaaatctgaatgacatatattgttctgtgtcaagaaacttagattttttttttaactatttaaaaacgtgaaacctattcttagctcacaggccatggagaagctggtggggaccagacccagctccttagctggctgggctggggagggggtagtgacagtggcagctgctactcactgctcagtgtggaaaacacaggacttggcaatcacagcccgcagaaccatcatgtgtggcagaagcctgagggatgcggtttcttgcccacgtgctctgttcattttctgttgtttttctgcacttaaagaattcacatggaagcatgttttataaaatgaattaccagagaaacagagatgggccgagattttcagaaatggtcccatgtgaccaagttctgctgtttgggtgacagtgctttgaagatctcctttgaggatgtgcagtctttttttttttttttttgagatggagtttgttgcccaggctggagtgagtggcacagtctcggctcactgcaacctccacctcctgggttcaagcagttctcgtgccgcagcctcccaagtagctgggactacaggcatgcaccaccacgccaggctaatttttgtatttttagtagagatggggtttcaccatgtctcaaactcctgacctcaggcgatccacccacctcagcgtcccaaagtgctgggattataggcgtgagccaccgcacctggcctatgagtggtcttttaattaggaacaaatctaatggaaaggagagttgactgaagttggcccacaggattgtgagctgggcagtgccttcatgaaggcttgccaccttgggacgccccagtttactggggtgtcttgcggagtgcagaaggctttctggcagctgcctgggtttggccagaccctgcctcccctcccgccggccaacccctagtccccttcctgtctccacttgcattcaggggtggctgctgttctgagaacattagaactgggaagagagatggagtcacatggatttttggtgggcattattctaaactttcgtatccaagttagtcccccttattccactgtggcattgccgttctaagcagttacctgatgcctgctgctgaagagctgctcacaggaggcggcggcggccctggcactgccccttgcattaggtcttgtgtttgatgtgttcttgtgaatttactttgtcagaacaaaatatttacgcgttgggttcaggaatttcttttagctccccatctggctgtgaaattcaggaaacctcccgttgcctagtaatcaccccatgtaggtgtacattgtgacaaagtgcatctgaccactaaggggcccccttggtgaccccagcacattcacagcagtgttaaaatggcctgcattttggagatgctggctggcctttcagtgcctcccaggaagacacatggcctttccctcttcagatgcctgaagggagtgctttgaggcaggtgatgtgctgggagtgtgggcggcctccctctggccccggggccctctgtggaccttggctccctccgtggacctgggcttcgtggtgagcactgcagcctccctgggcattccctccagcgccagcaccactgcaacatatagacctgagtgctattgtattttggcttggtgtgtatgctcttcattgtgtaaaattgctgttcttttgacaatttaagtgattgttttgtttactgtaagtttgaaaataaaaatgaagaaaaaaattccaatgactgtgctgtggttggagactttatttaccaagatgtttactcttcctttccccttccattttgaggagctgtgtcactcctcctcccccccagtgctttgtagtctctcctatgtcataataaagctacattttctctgagaa

SEQ ID NO: 33530 - DNA, 5237 bp, Homo sapiens
  source 1..5237: mol_type = unassigned DNA
agcgcaggcggtccgcagcagccgcagctcgggggcggtgcctgccttgcagcctcccctcggcgatcgcgcagccccatctttgtccggcctccgcgctttgttctcggcgcccgggccttggccagcctggccagccgccgagcagcccccacgccgcgctggcgtcgtcctcgcctccctcgccgccgccccccgcgcgcggccgggccttgccccccatggtgtcccggccagagcccgagggcgaggccatggacgccgagctggcggtagcgccgccgggctgctcgcacctgggcagcttcaaggtggacaactggaagcagaacctgcgggccatctaccagtgcttcgtgtggagcggcacggctgaggcccgcaagcgcaaggccaagtcctgtatctgccatgtctgtggcgtccacctcaacaggctgcattcctgcctctactgtgtcttcttcggctgtttcacaaagaagcatattcacgagcatgcgaaggcgaagcggcacaacctggccattgatctgatgtacggaggcatctactgttttctgtgccaggactacatctatgacaaagacatggaaataatcgccaaggaggagcagcgaaaagcttggaaaatgcaaggcgttggagagaagttttcaacttgggaaccaaccaaacgggagcttgaactgctgaagcacaacccgaaaaggagaaagatcacctcgaactgcaccataggtctgcgtgggctgatcaaccttgggaacacatgcttcatgaactgcatcgtgcaggccctgacccacacgccacttctgcgggacttcttcctgtctgacaggcaccgctgtgagatgcagagccccagctcctgtctggtctgtgagatgtcctcactgtttcaggagttttactctggacaccggtcccctcacatcccgtataagttgctgcacctggtgtggacccacgcgaggcacctagcaggctacgagcagcaggacgcccacgagttcctcatcgcggccctggacgtgctccaccgacactgcaaaggtgatgacaatgggaagaaggccaacaaccccaaccactgcaactgcatcatagaccagatcttcacaggcgggttgcagtcagacgtcacctgccaagtctgccatggagtctccaccaccatcgaccccttctgggacatcagcttggatctccccggctcttccaccccattctggcccctgagcccagggagcgagggcaacgtggtaaacggggaaagccacgtgtcgggaaccaccacgctcacggactgcctgcgacgattcaccagaccagagcacttgggcagcagcgccaagatcaagtgcagcggttgccatagctaccaggagtccacaaagcagctcactatgaagaaactgcccatcgtagcctgttttcatctcaaacgatttgaacactcagccaagctgcggcggaagatcaccacgtatgtgtccttccccctggagctggacatgacccctttcatggcctccagcaaagagagcaggatgaatggacagtaccagcagcccacggacagtctcaacaatgacaacaagtattccctgtttgctgttgttaaccatcaagggaccttggagagtggccactacaccagctttatccggcagcacaaagaccagtggttcaagtgtgacgatgccatcatcaccaaggccagcatcaaggacgtcctggacagcgaagggtacttgctgttctatcacaaacagttcctggaatacgagtagccttatctgcagctggtcagaaaaacaaaggcaatgcattggcaagcctcacaaagtgatcctccctggcccccccctcccccaagtctcccgccgcctccccggcctggtgacaccacctcccatgcagatgtggcccctctgcacctgggacccatcgggtcgggatggaccacacggacggggaggctcctggagctgctttgaagatggatgagatgaggggtgtgctctgggtgggaggagcagcgtacacccgtcaccagaacatctcttgtgtcatgacatgggggtgcaacgggggcctcacagcacagagtgaccgctgcctggcgttccccagcactcggtgtggaaaggcccctacctgctgtaagattatgggtccatgaaagcagtaagctggacacagaggtgtagtgtgcgggacagagggccttgcagatgcctttctgttggtgttttagtgttaaaatacggagagtatggaactcttcacctccattttctcagcggctgtgaagcagcctcctagcttcggaagtacggacactacgtcgcgttttcaagcgtgtctgttctgcaggtaacagcatcaagctgcacgtggaagcatctcgcggttttctagaaacaggcattttcttatccctctcccgctcctttttccacaaaggtgaatttcataaatgtaatactagtaaagtgaatgaattactgagtttatacagaaatttaggtaacttctcctttagtctcaagagcgagtcttgctttttaatgggtgccgtttatgttgctgcccgccctgtgtgcctggctcctctgggtgccttggtgtctgctggtggctggcagtgggcgcagcggaggagagttgtgctgcagctcatacggtgtgtctgtcatctcagtctggagtaaatgcagtgtctgccggtgtctgatgggttctgtccctcgtattttctttgccttctatcccattgcctggctaccgctgcctggcagccaagggtgttggtcgcgaagctggagtggcctctggtggagcctgcatcttgtctcgtctgcctctgctttacatttggtgtactttcgggcgtggtggcagtaaaatgacaccgtgattgagcttgtcagcagagctgaaagagaaagtagaaggatgtgcattgtttcttgtaagatatcttgcatgtatctgtgtattcaaattcaaacagagatggtttgtccatttgtccactgagaaattagaaactagggacaagggggaggaaaagtactgaaatacagtttatgaagcaagtgtgtctcgggctgtgcttgtcccaggagccccagcagcatctgaactgaggcttcttcagtcctgcaggaacaggatcatctgtctcagcggtgggcagatgttttcatagacagccagggagtaaacactgttggctctgtgggctgtatggtctctgccataaatagtacagagatgtggctgtgtctagtacaacttttagacacagaaatctgaatgacatatattgttctgtgtcaagaaacttagattttttttttaactatttaaaaacgtgaaacctattcttagctcacaggccatggagaagctggtggggaccagacccagctccttagctggctgggctggggagggggtagtgacagtggcagctgctactcactgctcagtgtggaaaacacaggacttggcaatcacagcccgcagaaccatcatgtgtggcagaagcctgagggatgcggtttcttgcccacgtgctctgttcattttctgttgtttttctgcacttaaagaattcacatggaagcatgttttataaaatgaattaccagagaaacagagatgggccgagattttcagaaatggtcccatgtgaccaagttctgctgtttgggtgacagtgctttgaagatctcctttgaggatgtgcagtctttttttttttttttttgagatggagtttgttgcccaggctggagtgagtggcacagtctcggctcactgcaacctccacctcctgggttcaagcagttctcgtgccgcagcctcccaagtagctgggactacaggcatgcaccaccacgccaggctaatttttgtatttttagtagagatggggtttcaccatgtctcaaactcctgacctcaggcgatccacccacctcagcgtcccaaagtgctgggattataggcgtgagccaccgcacctggcctatgagtggtcttttaattaggaacaaatctaatggaaaggagagttgactgaagttggcccacaggattgtgagctgggcagtgccttcatgaaggcttgccaccttgggacgccccagtttactggggtgtcttgcggagtgcagaaggctttctggcagctgcctgggtttggccagaccctgcctcccctcccgccggccaacccctagtccccttcctgtctccacttgcattcaggggtggctgctgttctgagaacattagaactgggaagagagatggagtcacatggatttttggtgggcattattctaaactttcgtatccaagttagtcccccttattccactgtggcattgccgttctaagcagttacctgatgcctgctgctgaagagctgctcacaggaggcggcggcggccctggcactgccccttgcattaggtcttgtgtttgatgtgttcttgtgaatttactttgtcagaacaaaatatttacgcgttgggttcaggaatttcttttagctccccatctggctgtgaaattcaggaaacctcccgttgcctagtaatcaccccatgtaggtgtacattgtgacaaagtgcatctgaccactaaggggcccccttggtgaccccagcacattcacagcagtgttaaaatggcctgcattttggagatgctggctggcctttcagtgcctcccaggaagacacatggcctttccctcttcagatgcctgaagggagtgctttgaggcaggtgatgtgctgggagtgtgggcggcctccctctggccccggggccctctgtggaccttggctccctccgtggacctgggcttcgtggtgagcactgcagcctccctgggcattccctccagcgccagcaccactgcaacatatagacctgagtgctattgtattttggcttggtgtgtatgctcttcattgtgtaaaattgctgttcttttgacaatttaagtgattgttttgtttactgtaagtttgaaaataaaaatgaagaaaaaaattccaatgactgtgctgtggttggagactttatttaccaagatgtttactcttcctttccccttccattttgaggagctgtgtcactcctcctcccccccagtgctttgtagtctctcctatgtcataataaagctacattttctctgagaa

SEQ ID NO: 33531 - DNA, 4980 bp, Homo sapiens
  source 1..4980: mol_type = unassigned DNA
atggcgccgggttggccctcactatcagcgggctcccgacaggaggcgccccagcttgcggccgggggcagcgcctaccaggcagttggcaggcagttccagccccgggccacggcactgcagggcccgagccaggccaagtcctgtatctgccatgtctgtggcgtccacctcaacaggctgcattcctgcctctactgtgtcttcttcggctgtttcacaaagaagcatattcacgagcatgcgaaggcgaagcggcacaacctggccattgatctgatgtacggaggcatctactgttttctgtgccaggactacatctatgacaaagacatggaaataatcgccaaggaggagcagcgaaaagcttggaaaatgcaaggcgttggagagaagttttcaacttgggaaccaaccaaacgggagcttgaactgctgaagcacaacccgaaaaggagaaagatcacctcgaactgcaccataggtctgcgtgggctgatcaaccttgggaacacatgcttcatgaactgcatcgtgcaggccctgacccacacgccacttctgcgggacttcttcctgtctgacaggcaccgctgtgagatgcagagccccagctcctgtctggtctgtgagatgtcctcactgtttcaggagttttactctggacaccggtcccctcacatcccgtataagttgctgcacctggtgtggacccacgcgaggcacctagcaggctacgagcagcaggacgcccacgagttcctcatcgcggccctggacgtgctccaccgacactgcaaaggtgatgacaatgggaagaaggccaacaaccccaaccactgcaactgcatcatagaccagatcttcacaggcgggttgcagtcagacgtcacctgccaagtctgccatggagtctccaccaccatcgaccccttctgggacatcagcttggatctccccggctcttccaccccattctggcccctgagcccagggagcgagggcaacgtggtaaacggggaaagccacgtgtcgggaaccaccacgctcacggactgcctgcgacgattcaccagaccagagcacttgggcagcagcgccaagatcaagtgcagcggttgccatagctaccaggagtccacaaagcagctcactatgaagaaactgcccatcgtagcctgttttcatctcaaacgatttgaacactcagccaagctgcggcggaagatcaccacgtatgtgtccttccccctggagctggacatgacccctttcatggcctccagcaaagagagcaggatgaatggacagtaccagcagcccacggacagtctcaacaatgacaacaagtattccctgtttgctgttgttaaccatcaagggaccttggagagtggccactacaccagctttatccggcagcacaaagaccagtggttcaagtgtgacgatgccatcatcaccaaggccagcatcaaggacgtcctggacagcgaagggtacttgctgttctatcacaaacagttcctggaatacgagtagccttatctgcagctggtcagaaaaacaaaggcaatgcattggcaagcctcacaaagtgatcctccctggcccccccctcccccaagtctcccgccgcctccccggcctggtgacaccacctcccatgcagatgtggcccctctgcacctgggacccatcgggtcgggatggaccacacggacggggaggctcctggagctgctttgaagatggatgagatgaggggtgtgctctgggtgggaggagcagcgtacacccgtcaccagaacatctcttgtgtcatgacatgggggtgcaacgggggcctcacagcacagagtgaccgctgcctggcgttccccagcactcggtgtggaaaggcccctacctgctgtaagattatgggtccatgaaagcagtaagctggacacagaggtgtagtgtgcgggacagagggccttgcagatgcctttctgttggtgttttagtgttaaaatacggagagtatggaactcttcacctccattttctcagcggctgtgaagcagcctcctagcttcggaagtacggacactacgtcgcgttttcaagcgtgtctgttctgcaggtaacagcatcaagctgcacgtggaagcatctcgcggttttctagaaacaggcattttcttatccctctcccgctcctttttccacaaaggtgaatttcataaatgtaatactagtaaagtgaatgaattactgagtttatacagaaatttaggtaacttctcctttagtctcaagagcgagtcttgctttttaatgggtgccgtttatgttgctgcccgccctgtgtgcctggctcctctgggtgccttggtgtctgctggtggctggcagtgggcgcagcggaggagagttgtgctgcagctcatacggtgtgtctgtcatctcagtctggagtaaatgcagtgtctgccggtgtctgatgggttctgtccctcgtattttctttgccttctatcccattgcctggctaccgctgcctggcagccaagggtgttggtcgcgaagctggagtggcctctggtggagcctgcatcttgtctcgtctgcctctgctttacatttggtgtactttcgggcgtggtggcagtaaaatgacaccgtgattgagcttgtcagcagagctgaaagagaaagtagaaggatgtgcattgtttcttgtaagatatcttgcatgtatctgtgtattcaaattcaaacagagatggtttgtccatttgtccactgagaaattagaaactagggacaagggggaggaaaagtactgaaatacagtttatgaagcaagtgtgtctcgggctgtgcttgtcccaggagccccagcagcatctgaactgaggcttcttcagtcctgcaggaacaggatcatctgtctcagcggtgggcagatgttttcatagacagccagggagtaaacactgttggctctgtgggctgtatggtctctgccataaatagtacagagatgtggctgtgtctagtacaacttttagacacagaaatctgaatgacatatattgttctgtgtcaagaaacttagattttttttttaactatttaaaaacgtgaaacctattcttagctcacaggccatggagaagctggtggggaccagacccagctccttagctggctgggctggggagggggtagtgacagtggcagctgctactcactgctcagtgtggaaaacacaggacttggcaatcacagcccgcagaaccatcatgtgtggcagaagcctgagggatgcggtttcttgcccacgtgctctgttcattttctgttgtttttctgcacttaaagaattcacatggaagcatgttttataaaatgaattaccagagaaacagagatgggccgagattttcagaaatggtcccatgtgaccaagttctgctgtttgggtgacagtgctttgaagatctcctttgaggatgtgcagtctttttttttttttttttgagatggagtttgttgcccaggctggagtgagtggcacagtctcggctcactgcaacctccacctcctgggttcaagcagttctcgtgccgcagcctcccaagtagctgggactacaggcatgcaccaccacgccaggctaatttttgtatttttagtagagatggggtttcaccatgtctcaaactcctgacctcaggcgatccacccacctcagcgtcccaaagtgctgggattataggcgtgagccaccgcacctggcctatgagtggtcttttaattaggaacaaatctaatggaaaggagagttgactgaagttggcccacaggattgtgagctgggcagtgccttcatgaaggcttgccaccttgggacgccccagtttactggggtgtcttgcggagtgcagaaggctttctggcagctgcctgggtttggccagaccctgcctcccctcccgccggccaacccctagtccccttcctgtctccacttgcattcaggggtggctgctgttctgagaacattagaactgggaagagagatggagtcacatggatttttggtgggcattattctaaactttcgtatccaagttagtcccccttattccactgtggcattgccgttctaagcagttacctgatgcctgctgctgaagagctgctcacaggaggcggcggcggccctggcactgccccttgcattaggtcttgtgtttgatgtgttcttgtgaatttactttgtcagaacaaaatatttacgcgttgggttcaggaatttcttttagctccccatctggctgtgaaattcaggaaacctcccgttgcctagtaatcaccccatgtaggtgtacattgtgacaaagtgcatctgaccactaaggggcccccttggtgaccccagcacattcacagcagtgttaaaatggcctgcattttggagatgctggctggcctttcagtgcctcccaggaagacacatggcctttccctcttcagatgcctgaagggagtgctttgaggcaggtgatgtgctgggagtgtgggcggcctccctctggccccggggccctctgtggaccttggctccctccgtggacctgggcttcgtggtgagcactgcagcctccctgggcattccctccagcgccagcaccactgcaacatatagacctgagtgctattgtattttggcttggtgtgtatgctcttcattgtgtaaaattgctgttcttttgacaatttaagtgattgttttgtttactgtaagtttgaaaataaaaatgaagaaaaaaattccaatgactgtgctgtggttggagactttatttaccaagatgtttactcttcctttccccttccattttgaggagctgtgtcactcctcctcccccccagtgctttgtagtctctcctatgtcataataaagctacattttctctgagaa

SEQ ID NO: 33532 - DNA, 10802 bp, Homo sapiens
  source 1..10802: mol_type = unassigned DNA
ggaggaggccaacatggcggcgcgcagggctgggccgggccgcagccgcgcctgagcgcctcaccgcactagctcggctcgcaggacccaagcccgcacccagcctggcccggctgctgcggagcacccggggcaggaacgcaggggccaacctgggcgcggaggcggcgcggagggtgcgccgcgcggcccgccaggcccgggacccgtagcttcgccgtgcgctggccggggcggccaggaggcccaagccatggaatcggaggaggagcagcacatgaccacgctgctgtgcatgggcttctcagaccccgccaccatccgcaaggccctgcgcctggccaagaacgacattaacgaggccgtggcactgctcaccaacgagcggccgggcctcgactacggcggctacgagcccatggacagcggcggtggccccagccccgggcccggcgggggcccgcggggcgacggcggaggtgacggcggcggcggcggcccctcccgcggcgggagcaccggaggcgggggcggcttcgaccccccgcccgcctaccacgaggtggtggacgcggagaagaatgatgagaatggaaactgctcaggggaaggaattgaattccctacaacaaatttatatgaactggaaagccgtgttttgactgatcattggtccatcccttacaagcgagaagaatcactaggcaaatgcctgttggcatctacctacctagcaagacttggtctttccgagtctgatgagaattgtagaaggtttatggacaggtgtatgcctgaagcatttaaaaagctcctgacatcaagtgctgttcacaagtggggtactgaaattcatgaaggaatttacaacatgttgatgctattaatagaactggtcgcagagagaataaaacaagatccaattcccactggtctcctgggtgtgcttacaatggctttcaatcctgataatgaataccattttaaaaacagaatgaaagtgtctcaaaggaattgggcagaagtgtttggagagggaaatatgtttgctgtttcacctgtatcgactttccaaaaggagcctcatggatgggttgtggatttggtaaataagtttggagaattaggtggatttgcagcaatccaagccaagctccattcagaagatatagaacttggggctgtctcagcactgattcagcccttaggagtgtgtgcagagtacctcaattcctccgtggtacagcccatgctagacccagtcattcttactacaatccaggatgtacggagtgtagaagagaaagacctcaaagacaagagattggttagcatccctgagctcttgtctgccgttaagttactttgcatgcgcttccaaccggatctggtgacaattgtggatgaccttcgactagatattctattgcgcatgctgaaatcaccacatttcagtgctaagatgaattctctcaaagaagtaaccaaactaatagaagatagcactttatccaaatctgtgaagaatgctatagatacagacagattattagattggctagttgaaaactcagttctgtcgattgcactggaaggcaacatagaccaagcacaatactgtgaccgtataaagggaattattgaactcttgggtagtaaattgtcgttagatgaactcactaaaatttggaagatacagtcaggacaatcatctactgtgattgagaacattcatactattattgctgcagcggctgtgaaatttaattcagatcagcttaatcatttgtttgttctcattcagaagagctgggagactgagagtgatagagtaagacagaagcttttgagcctgattggacgaataggccgggaagctcgctttgagaccacttctggaaaggttttagacgtactctgggaactggctcaccttccaaccctgcccagtagccttattcagcaggccttggaggagcacctgacaatccttagtgatgcatatgcagtgaaagaagcaatcaagaggagctacatcatcaagtgcatagaagatattaagaggcctggagaatggtcaggtttggaaaaaaacaagaaggatggattcaagtcatctcagcttaataatccccagtttgtatgggtggtaccagctttgcgtcagctccatgaaattactcgctcattcataaaacaaacctatcaaaagcaagacaagagcattattcaagacttgaagaagaattttgaaatagtgaaattggtaacgggaagtttgatcgcttgtcatcggcttgcagctgctgtggccgggcctggaggcttaagtggctcgacactagtggatggccggtacacttaccgggagtatttagaggcacatctaaaatttctagcgtttttcttgcaagaagctactctgtatctgggctggaatcgtgccaaggagatctgggagtgtcttgtaactggccaggatgtttgtgaattagatagagagatgtgttttgaatggtttacaaaaggacagcatgatcttgagagtgatgttcagcagcagctcttcaaggagaaaattcttaaattggagtcatatgaaatcactatgaatggttttaacttatttaaaactttttttgaaaatgtgaatctttgtgatcatcgattgaaaagacaaggagctcagttgtatgtagaaaagctggaattgataggaatggatttcatttggaaaatagccatggaatcacctgatgaagaaattgctaatgaagctattcagctaatcataaactatagttacattaatctaaatcctagattaaagaaggattcagtatctttacataagaaattcattgctgattgctacacaagattagaagcagccagttcagcacttggtggccccactctaacacatgctgtgaccagagcaacaaaaatgcttacagcaactgccatgccaactgtagcaacctcagttcagtctccttatagatctactaaacttgtaataattgagagattgctgcttctggcagagcgctatgtgatcactatagaggatttttactctgttccacgaactattctacctcatggtgcctcatttcatggacatcttttaacccttaatgttacctatgagtctaccaaagataccttcactgtcgaggctcacagtaatgaaaccatagggagtgtccggtggaaaatagccaagcagttgtgctctcctgtggataatatacagatatttacaaatgatagcctgctgacagtgaataaagatcaaaagctactccaccaactgggcttttctgatgaacaaatccttacagtgaagacttctggcagtgggaccccatctgggagttcagcagattcttcaaccagctccagcagcagcagcagtggggtttttagttcttcatatgccatggagcaggagaaatccctccctggtgtagtgatggctctcgtatgtaacgtatttgacatgctttatcagctcgccaatctggaagagccaaggataactctacgagtacggaagcttctgctcttgatacccactgatccagccattcaggaagcccttgatcaacttgattctttaggaagaaagaaaacattgctgtctgaatcaagttctcagtcctcaaaatctccatccctgtcatcaaagcaacagcaccagccaagtgccagttcaattttagaaagtctgtttcgatcttttgccccgggaatgtctaccttcagagtgctctacaacttagaagttctaagctccaaactcatgccaacagctgatgatgacatggccagaagctgtgccaaatccttctgtgaaaacttcctcaaagctggcggtttgagtttggttgtaaatgtcatgcagagagactccatcccatcagaagtagactatgaaacaaggcagggtgtttattccatctgtctacagcttgcaagatttttacttgtcggacaaacaatgcccacgttattagatgaagacctcaccaaagatggtatagaagcactttcttcccgcccattccgaaatgtcagccggcagacaagcagacagatgtccttatgtggtaccccagaaaagtcatcctaccgacagttgtccgtgtctgataggtcttctattagggttgaggaaatcatccctgctgctcgagttgcaatacaaacaatggaagtaagtgatttcacttctactgtggcttgcttcatgagattgtcatgggctgcggctgcaggacggcttgatcttgttgggagtagccagccaattaaagaaagtaattccctgtgtcctgctggaattcgaaacagactcagcagttcaggaagcaattgcagctctggaagtgaaggagaaccagtagccctgcatgcgggaatctgtgttcgacaacagtctgtatccaccaaagactcgctgattgcgggagaggctttgtctcttcttgttacgtgcctacagcttcggagccagcaactggcatctttctataacttgccctgtgttgctgatttcatcattgatattctgctcggatcaccaagtgctgagattcgccgggttgcctgtgatcagctgtacactcttagtcagacagacacatcagcgcatccagatgtgcagaagccaaatcagtttcttctaggcgtaatcctcacggctcagctgcctctctggtctccaactagtattatgagaggagtcaatcagagactgttatctcagtgtatggagtattttgatttgagatgccagttattagatgatctgacaacttcagaaatggagcagttaaggatcagcccagctacgatgcttgaagatgagattacttggctggataactttgaacctaatcgtacagctgaatgtgagaccagtgaagcggacaacatcttactggcagggcacttacgcctcatcaagacccttctttcactctgtggggcagaaaaggaaatgcttggttcatcactcattaaaccattgttagatgacttccttttccgagcttctagaattattttaaatagtcattctccagctggcagtgccgccatcagtcaacaggactttcatccaaagtgtagtacagcgaatagccgattggcagcctatgaagtccttgtgatgttggctgatagttcaccttcaaatcttcaaattattataaaagaactgctttctatgcatcaccagcctgaccctgctcttaccaaggagtttgattaccttcccccagtggatagcaggtccagttcagggtttgtggggctgagaaatggtggtgcaacttgttatatgaatgcagtcttccagcagctgtatatgcaacctgggctccctgagtcattactttcagtggatgatgacacagacaatccagatgatagcgtgttttaccaagtgcagtctctctttggacatttaatggaaagcaagctgcagtactatgtacctgagaatttttggaagattttcaagatgtggaataaagaactttatgtgagagaacagcaggatgcatatgaattctttactagtctcattgatcagatggatgaatacctcaagaaaatggggagagaccaaatttttaagaatacatttcagggcatctactctgatcagaagatctgtaaagactgtcctcacagatatgagcgtgaagaagctttcatggctctcaatctaggagtgacttcttgtcagagtttggaaatttctttggaccaatttgttagaggagaagttctagaaggaagtaatgcgtactactgtgaaaagtgtaaagaaaagagaataacagtgaaaaggacctgtattaaatctttacctagcgtcttggtaattcacctaatgagatttgggtttgactgggaaagcggacgctccattaaatatgatgaacaaataaggtttccctggatgctaaacatggagccttacacagtttcaggaatggctcgccaagattcttcttctgaagttggggaaaatgggcgaagtgtggatcagggcggtggaggatccccacgaaaaaaggttgccctcacagaaaactatgaacttgtcggtgtcatcgtacacagtgggcaggcacacgcaggccactactattccttcattaaggacaggcgagggtgtggaaaaggaaagtggtataaatttaatgacacagttatagaagaatttgacctaaatgacgagaccctggagtatgaatgctttggaggagaatatagaccaaaagtttatgatcaaacaaacccatacactgatgtgcgccgaagatactggaatgcctatatgcttttctaccaaagggtgtctgatcagaactccccagtattaccaaagaaaagtcgagtcagcgttgtacggcaggaagctgaggatctctctctgtcagctccatcttcaccagaaatttcacctcagtcatcccctcggccccataggccgaacaatgaccggctgtctattcttaccaagctggttaaaaaaggcgagaagaaaggactgtttgtggagaaaatgcctgctcgaatataccagatggtgagagatgagaacctcaagtttatgaagaatagagatgtatacagtagtgattatttcagttttgttttgtctttagcttcattgaatgctactaaattaaagcatccatattatccttgcatggcaaaggtgagcttacagcttgctattcaattcctttttcaaacttatctacggacaaagaagaaactcagggttgatactgaagaatggattgctaccattgaagcattgctttcaaaaagttttgatgcttgtcagtggttagttgaatattttattagttctgaaggacgagaattgataaagattttcttactggagtgcaatgtgagagaagtacgagttgctgtggccaccattctggagaaaaccctagacagtgccttgttttatcaggataagttaaaaagccttcatcagttactggaggtactacttgctctgttggacaaagacgtcccagaaaattgtaaaaactgtgctcagtactttttcctgttcaacacttttgtacaaaagcaaggaattagggctggagatcttcttctgaggcattcagctctgcggcacatgatcagcttcctcctaggggccagtcggcaaaacaatcagatacgtcgatggagttcagcacaagcacgagaatttgggaatcttcacaatacagtggcgttacttgttttgcattcagatgtctcatcccaaaggaatgttgctcctggcatatttaagcaacgaccacccattagcattgctccctcaagccctctgttgcccctccatgaggaggtagaagccttgttgttcatgtctgaagggaaaccttacctgttagaggtaatgtttgctttgcgggagctgacaggctcgctcttggcactcattgagatggtagtgtactgctgtttctgtaatgagcatttttccttcacaatgctgcatttcattaagaaccaactagaaacggctccacctcatgagttaaagaatacgttccaactacttcatgaaatattggttattgaagatcctatacaagtagagcgagtcaaatttgtgtttgagacagaaaatggattactagctttgatgcaccacagtaatcatgtggacagtagtcgctgctaccagtgtgtcaaatttcttgtcactcttgctcaaaagtgtcctgcagctaaggagtacttcaaggagaattcccaccactggagctgggctgtgcagtggctacagaagaagatgtcagaacattactggacaccacagagtaatgtctctaatgaaacatcaactggaaaaacctttcagcgaaccatttcagctcaggacacgttagcgtatgccacagctttgttgaatgaaaaagagcaatcaggaagcagtaatgggtcggagagtagtcctgccaatgagaacggagacaggcatctacagcagggttcagaatctcccatgatgattggtgagttgagaagtgaccttgatgatgttgatccctagaggaacatgcccagcctgagaggagtcaagacacaatactggatgctcagcaccttcttggaatcagaatctcgaaccctttggaagagcctggagattggactgggaaagctgctgtgacttgggcggatcgtgtatttctcaaggaaagcatttttaagccactagaaggtttgggagctgtttggcagtgggagaactccggcatgtggatcagctgtcccgggagcgtggtctatatgtggattcacatttctgtggagattttcggaaatagagccagtggcagacttttttgttacacgaacatacaagagtgagcataaagctgttgctttctctacgatgctacaaaagaaattcctttggtttttatattttaagaaaaagcaagctgcttttagatatgtgggggcaaatttttaatcttgcagtaatattaaacaggaatatccaatttaaaatgatgtaaagatgtaataaaattccttttcattgtaaaatagtaattaagtcaatttacacagacctttgtatttaatatgtctccctatttgtatagaatttcagatgggtctagatgagaaccctatgcataagcttggatcttgatgaaaggttaccaggatcaggatcaaaaattgggaaatactaagctcttgaagatatttttctgatataattagattgaaaagagcaattttgaaaatgctgtgttctccagaagtacagggtgcattatttgacatcaattacttaaagaagttatgagttgttccccaaacagattttaaaaacagcaaaataaaagcactttaagatataattttactgagtttaacttcacagaattatctttttaatgcttggagacatattgaataaactgtagtcttaaatcatgtgatctgcaatcgtttgcttttgcttaaaacataattactgaaacccttggtattggttgtatatgaagttaactatttgagttggtacacactgcttgtgagtttcatagttattgtaatgcagagaaggaatttgagaatttgtttctcctcaacatgactaattaacactgaaaagtcagtcaaggtttaagatttattttcccagaaataaatataaagcaattgaataaccatccatttagtcgtatttccaaagtatagcaccattcactcatttataccagctcccttttatggtgtgggggagaggtttacacccacatatttcatatatattttgtacattttgtattttgaattgctcacattttcggccctgttttgcctttagttacaggtcctgccttattttcatctcaccatgcacagaactagggagccttaggaagtgccaggttttcactgtcagatttgccaagtcacagaggcgcagccagccctgaagtgcctgtctggctgctgtggcattgtgtgggcatgtggccaggcagatggcatctcattactgtgctctcgccatggcccagtcttttcattctctggcagtgagggtttctgtgctgtcagacttcattgttattctgtgacttgctggaggttggcagtggcctttgtcaaacacactgagaagatggaagggccagcacttaagagcagaactgtacccttagagaaacggacagaggcgagtggcaaacttcagacggttccaatggtcttgcagtttgaaatgtgatgttctaccattggttttgagtacgtgaatacttcctgtcctactgtttcccctaccctattctcaccttctctccgcccacatcctcaccaagagattgtgtgggacatgaccttgaaatgctggcgatgatccacactgggatatcatcgctggcgactgcactctcaggagcccaaaatcaggagtgaaattgccacttctagtccccttatttcctatggaaacaacgccttccgcacccctagcacctgccgtcctcactgtaaagcttcatcaggatcgtccaccgtgtatattatacgcttcagatcatgttgcttatattgttgctgcaatgaccatcgttttcactttgctggtaaccacttgattgctgacagctacagtcaatgaacctgctgatgactttttttaatgtagtacaacagtgacagttatgacaggcttaccttggaagagttgtcatttttactgccaattttttggatgaagatgtttttataaacctttcaaaatggtctgcaaacagagcaggaattgcacaattaactcaataatgctgtgtgttctcaagaagctcccttagtgaggccgatcttaagatggccgattctgcccgttgaaggcatcctgggaaagaaaacaagcatcccagcgggcatctcaccacgacttctcctggagtcctcacacggtcactgacaactacagtcagttttaggaactagagtgccgtatcatcagacttaccctgtcctgccccaccttccctgctaacatcgaggtgtgtgcagttaccttctgagcttggaacaagcagactggaattttcctctgctacctcttgtgtataaaatcttgtttataaaatttcaaaaggaagtagatacactagggaagaaccttaattctaaatttggttcatgtgtggcaaagttcttagcttctaagagtataaaataaatttttcaaaaacaga

SEQ ID NO: 33533 - DNA, 10060 bp, Homo sapiens
  source 1..10060: mol_type = unassigned DNA
atgaccacgctgctgtgcatgggcttctcagaccccgccaccatccgcaaggccctgcgcctggccaagaacgacattaacgaggccgtggcactgctcaccaacgagcggccgggcctcgactacggcggctacgagcccatggacagcggcggtctttccgagtctgatgagaattgtagaaggtttatggacaggtgtatgcctgaagcatttaaaaagctcctgacatcaagtgctgttcacaagtggggtactgaaattcatgaaggaatttacaacatgttgatgctattaatagaactggtcgcagagagaataaaacaagatccaattcccactggtctcctgggtgtgcttacaatggctttcaatcctgataatgaataccattttaaaaacagaatgaaagtgtctcaaaggaattgggcagaagtgtttggagagggaaatatgtttgctgtttcacctgtatcgactttccaaaaggagcctcatggatgggttgtggatttggtaaataagtttggagaattaggtggatttgcagcaatccaagccaagctccattcagaagatatagaacttggggctgtctcagcactgattcagcccttaggagtgtgtgcagagtacctcaattcctccgtggtacagcccatgctagacccagtcattcttactacaatccaggatgtacggagtgtagaagagaaagacctcaaagacaagagattggttagcatccctgagctcttgtctgccgttaagttactttgcatgcgcttccaaccggatctggtgacaattgtggatgaccttcgactagatattctattgcgcatgctgaaatcaccacatttcagtgctaagatgaattctctcaaagaagtaaccaaactaatagaagatagcactttatccaaatctgtgaagaatgctatagatacagacagattattagattggctagttgaaaactcagttctgtcgattgcactggaaggcaacatagaccaagcacaatactgtgaccgtataaagggaattattgaactcttgggtagtaaattgtcgttagatgaactcactaaaatttggaagatacagtcaggacaatcatctactgtgattgagaacattcatactattattgctgcagcggctgtgaaatttaattcagatcagcttaatcatttgtttgttctcattcagaaggttttagacgtactctgggaactggctcaccttccaaccctgcccagtagccttattcagcaggccttggaggagcacctgacaatccttagtgatgcatatgcagtgaaagaagcaatcaagaggagctacatcatcaagtgcatagaagatattaagaggtcatctcagcttaataatccccagtttgtatgggtggtaccagctttgcgtcagctccatgaaattactcgctcattcataaaacaaacctatcaaaagcaagacaagagcattattcaagacttgaagaagaattttgaaatagtgaaattggtaacgggaagtttgatcgcttgtcatcggcttgcagctgctgtggccgggcctggaggcttaagtggctcgacactagtggatggccggtacacttaccgggagtatttagaggcacatctaaaatttctagcgtttttcttgcaagaagctactctgtatctgggctggaatcgtgccaaggagatctgggagtgtcttgtaactggccaggatgtttgtgaattagatagagagatgtgttttgaatggtttacaaaaggacagcatgatcttgagagtgatgttcagcagcagctcttcaaggagaaaattcttaaattggagtcatatgaaatcactatgaatggttttaacttatttaaaactttttttgaaaatgtgaatctttgtgatcatcgattgaaaagacaaggagctcagttgtatgtagaaaagctggaattgataggaatggatttcatttggaaaatagccatggaatcacctgatgaagaaattgctaatgaagctattcagctaatcataaactatagttacattaatctaaatcctagattaaagaaggattcagtatctttacataagaaattcattgctgattgctacacaagattagaagcagccagttcagcacttggtggccccactctaacacatgctgtgaccagagcaacaaaaatgcttacagcaactgccatgccaactgtagcaacctcagttcagtctccttatagatctactaaacttgtaataattgagagattgctgcttctggcagagcgctatgtgatcactatagaggatttttactctgttccacgaactattctacctcatggtgcctcatttcatggacatcttttaacccttaatgttacctatgagtctaccaaagataccttcactgtcgaggctcacagtaatgaaaccatagggagtgtccggtggaaaatagccaagcagttgtgctctcctgtggataatatacagatatttacaaatgatagcctgctgacagtgaataaagatcaaaagctactccaccaactgggcttttctgatgaacaaatccttacagtgaagacttctggcagtgggaccccatctgggagttcagcagattcttcaaccagctccagcagcagcagcagtggggtttttagttcttcatatgccatggagcaggagaaatccctccctggtgtagtgatggctctcgtatgtaacgtatttgacatgctttatcagctcgccaatctggaagagccaaggataactctacgagtacggaagcttctgctcttgatacccactgatccagccattcaggaagcccttgatcaacttgattctttaggaagaaagaaaacattgctgtctgaatcaagttctcagtcctcaaaatctccatccctgtcatcaaagcaacagcaccagccaagtgccagttcaattttagaaagtctgtttcgatcttttgccccgggaatgtctaccttcagagtgctctacaacttagaagttctaagctccaaactcatgccaacagctgatgatgacatggccagaagctgtgccaaatccttctgtgaaaacttcctcaaagctggcggtttgagtttggttgtaaatgtcatgcagagagactccatcccatcagaagtagactatgaaacaaggcagggtgtttattccatctgtctacagcttgcaagatttttacttgtcggacaaacaatgcccacgttattagatgaagacctcaccaaagatggtatagaagcactttcttcccgcccattccgaaatgtcagccggcagacaagcagacagatgtccttatgtggtaccccagaaaagtcatcctaccgacagttgtccgtgtctgataggtcttctattagggttgaggaaatcatccctgctgctcgagttgcaatacaaacaatggaagtaagtgatttcacttctactgtggcttgcttcatgagattgtcatgggctgcggctgcaggacggcttgatcttgttgggagtagccagccaattaaagaaagtaattccctgtgtcctgctggaattcgaaacagactcagcagttcaggaagcaattgcagctctggaagtgaaggagaaccagtagccctgcatgcgggaatctgtgttcgacaacagtctgtatccaccaaagactcgctgattgcgggagaggctttgtctcttcttgttacgtgcctacagcttcggagccagcaactggcatctttctataacttgccctgtgttgctgatttcatcattgatattctgctcggatcaccaagtgctgagattcgccgggttgcctgtgatcagctgtacactcttagtcagacagacacatcagcgcatccagatgtgcagaagccaaatcagtttcttctaggcgtaatcctcacggctcagctgcctctctggtctccaactagtattatgagaggagtcaatcagagactgttatctcagtgtatggagtattttgatttgagatgccagttattagatgatctgacaacttcagaaatggagcagttaaggatcagcccagctacgatgcttgaagatgagattacttggctggataactttgaacctaatcgtacagctgaatgtgagaccagtgaagcggacaacatcttactggcagggcacttacgcctcatcaagacccttctttcactctgtggggcagaaaaggaaatgcttggttcatcactcattaaaccattgttagatgacttccttttccgagcttctagaattattttaaatagtcattctccagctggcagtgccgccatcagtcaacaggactttcatccaaagtgtagtacagcgaatagccgattggcagcctatgaagtccttgtgatgttggctgatagttcaccttcaaatcttcaaattattataaaagaactgctttctatgcatcaccagcctgaccctgctcttaccaaggagtttgattaccttcccccagtggatagcaggtccagttcagggtttgtggggctgagaaatggtggtgcaacttgttatatgaatgcagtcttccagcagctgtatatgcaacctgggctccctgagtcattactttcagtggatgatgacacagacaatccagatgatagcgtgttttaccaagtgcagtctctctttggacatttaatggaaagcaagctgcagtactatgtacctgagaatttttggaagattttcaagatgtggaataaagaactttatgtgagagaacagcaggatgcatatgaattctttactagtctcattgatcagatggatgaatacctcaagaaaatggggagagaccaaatttttaagaatacatttcagggcatctactctgatcagaagatctgtaaagactgtcctcacagatatgagcgtgaagaagctttcatggctctcaatctaggagtgacttcttgtcagagtttggaaatttctttggaccaatttgttagaggagaagttctagaaggaagtaatgcgtactactgtgaaaagtgtaaagaaaagagaataacagtgaaaaggacctgtattaaatctttacctagcgtcttggtaattcacctaatgagatttgggtttgactgggaaagcggacgctccattaaatatgatgaacaaataaggtttccctggatgctaaacatggagccttacacagtttcaggaatggctcgccaagattcttcttctgaagttggggaaaatgggcgaagtgtggatcagggcggtggaggatccccacgaaaaaaggttgccctcacagaaaactatgaacttgtcggtgtcatcgtacacagtgggcaggcacacgcaggccactactattccttcattaaggacaggcgagggtgtggaaaaggaaagtggtataaatttaatgacacagttatagaagaatttgacctaaatgacgagaccctggagtatgaatgctttggaggagaatatagaccaaaagtttatgatcaaacaaacccatacactgatgtgcgccgaagatactggaatgcctatatgcttttctaccaaagggtgtctgatcagaactccccagtattaccaaagaaaagtcgagtcagcgttgtacggcaggaagctgaggatctctctctgtcagctccatcttcaccagaaatttcacctcagtcatcccctcggccccataggccgaacaatgaccggctgtctattcttaccaagctggttaaaaaaggcgagaagaaaggactgtttgtggagaaaatgcctgctcgaatataccagatggtgagagatgagaacctcaagtttatgaagaatagagatgtatacagtagtgattatttcagttttgttttgtctttagcttcattgaatgctactaaattaaagcatccatattatccttgcatggcaaaggtgagcttacagcttgctattcaattcctttttcaaacttatctacggacaaagaagaaactcagggttgatactgaagaatggattgctaccattgaagcattgctttcaaaaagttttgatgcttgtcagtggttagttgaatattttattagttctgaaggacgagaattgataaagattttcttactggagtgcaatgtgagagaagtacgagttgctgtggccaccattctggagaaaaccctagacagtgccttgttttatcaggataagttaaaaagccttcatcagttactggaggtactacttgctctgttggacaaagacgtcccagaaaattgtaaaaactgtgctcagtactttttcctgttcaacacttttgtacaaaagcaaggaattagggctggagatcttcttctgaggcattcagctctgcggcacatgatcagcttcctcctaggggccagtcggcaaaacaatcagatacgtcgatggagttcagcacaagcacgagaatttgggaatcttcacaatacagtggcgttacttgttttgcattcagatgtctcatcccaaaggaatgttgctcctggcatatttaagcaacgaccacccattagcattgctccctcaagccctctgttgcccctccatgaggaggtagaagccttgttgttcatgtctgaagggaaaccttacctgttagaggtaatgtttgctttgcgggagctgacaggctcgctcttggcactcattgagatggtagtgtactgctgtttctgtaatgagcatttttccttcacaatgctgcatttcattaagaaccaactagaaacggctccacctcatgagttaaagaatacgttccaactacttcatgaaatattggttattgaagatcctatacaagtagagcgagtcaaatttgtgtttgagacagaaaatggattactagctttgatgcaccacagtaatcatgtggacagtagtcgctgctaccagtgtgtcaaatttcttgtcactcttgctcaaaagtgtcctgcagctaaggagtacttcaaggagaattcccaccactggagctgggctgtgcagtggctacagaagaagatgtcagaacattactggacaccacagagtaatgtctctaatgaaacatcaactggaaaaacctttcagcgaaccatttcagctcaggacacgttagcgtatgccacagctttgttgaatgaaaaagagcaatcaggaagcagtaatgggtcggagagtagtcctgccaatgagaacggagacaggcatctacagcagggttcagaatctcccatgatgattggtgagttgagaagtgaccttgatgatgttgatccctagaggaacatgcccagcctgagaggagtcaagacacaatactggatgctcagcaccttcttggaatcagaatctcgaaccctttggaagagcctggagattggactgggaaagctgctgtgacttgggcggatcgtgtatttctcaaggaaagcatttttaagccactagaaggtttgggagctgtttggcagtgggagaactccggcatgtggatcagctgtcccgggagcgtggtctatatgtggattcacatttctgtggagattttcggaaatagagccagtggcagacttttttgttacacgaacatacaagagtgagcataaagctgttgctttctctacgatgctacaaaagaaattcctttggtttttatattttaagaaaaagcaagctgcttttagatatgtgggggcaaatttttaatcttgcagtaatattaaacaggaatatccaatttaaaatgatgtaaagatgtaataaaattccttttcattgtaaaatagtaattaagtcaatttacacagacctttgtatttaatatgtctccctatttgtatagaatttcagatgggtctagatgagaaccctatgcataagcttggatcttgatgaaaggttaccaggatcaggatcaaaaattgggaaatactaagctcttgaagatatttttctgatataattagattgaaaagagcaattttgaaaatgctgtgttctccagaagtacagggtgcattatttgacatcaattacttaaagaagttatgagttgttccccaaacagattttaaaaacagcaaaataaaagcactttaagatataattttactgagtttaacttcacagaattatctttttaatgcttggagacatattgaataaactgtagtcttaaatcatgtgatctgcaatcgtttgcttttgcttaaaacataattactgaaacccttggtattggttgtatatgaagttaactatttgagttggtacacactgcttgtgagtttcatagttattgtaatgcagagaaggaatttgagaatttgtttctcctcaacatgactaattaacactgaaaagtcagtcaaggtttaagatttattttcccagaaataaatataaagcaattgaataaccatccatttagtcgtatttccaaagtatagcaccattcactcatttataccagctcccttttatggtgtgggggagaggtttacacccacatatttcatatatattttgtacattttgtattttgaattgctcacattttcggccctgttttgcctttagttacaggtcctgccttattttcatctcaccatgcacagaactagggagccttaggaagtgccaggttttcactgtcagatttgccaagtcacagaggcgcagccagccctgaagtgcctgtctggctgctgtggcattgtgtgggcatgtggccaggcagatggcatctcattactgtgctctcgccatggcccagtcttttcattctctggcagtgagggtttctgtgctgtcagacttcattgttattctgtgacttgctggaggttggcagtggcctttgtcaaacacactgagaagatggaagggccagcacttaagagcagaactgtacccttagagaaacggacagaggcgagtggcaaacttcagacggttccaatggtcttgcagtttgaaatgtgatgttctaccattggttttgagtacgtgaatacttcctgtcctactgtttcccctaccctattctcaccttctctccgcccacatcctcaccaagagattgtgtgggacatgaccttgaaatgctggcgatgatccacactgggatatcatcgctggcgactgcactctcaggagcccaaaatcaggagtgaaattgccacttctagtccccttatttcctatggaaacaacgccttccgcacccctagcacctgccgtcctcactgtaaagcttcatcaggatcgtccaccgtgtatattatacgcttcagatcatgttgcttatattgttgctgcaatgaccatcgttttcactttgctggtaaccacttgattgctgacagctacagtcaatgaacctgctgatgactttttttaatgtagtacaacagtgacagttatgacaggcttaccttggaagagttgtcatttttactgccaattttttggatgaagatgtttttataaacctttcaaaatggtctgcaaacagagcaggaattgcacaattaactcaataatgctgtgtgttctcaagaagctcccttagtgaggccgatcttaagatggccgattctgcccgttgaaggcatcctgggaaagaaaacaagcatcccagcgggcatctcaccacgacttctcctggagtcctcacacggtcactgacaactacagtcagttttaggaactagagtgccgtatcatcagacttaccctgtcctgccccaccttccctgctaacatcgaggtgtgtgcagttaccttctgagcttggaacaagcagactggaattttcctctgctacctcttgtgtataaaatcttgtttataaaatttcaaaaggaagtagatacactagggaagaaccttaattctaaatttggttcatgtgtggcaaagttcttagcttctaagagtataaaataaatttttc

SEQ ID NO: 33534 - DNA, 3642 bp, Homo sapiens
  source 1..3642: mol_type = unassigned DNA
cttcaagattatcaataatcggagatacgtatattttatttgtaaagaaaacatggctgccctattcctacgtggttttgtccaaatagggaactgcaagactgggatatctaagtcaaaagaagcattcattgaagcagtggaaagaaagaagaaagatagactggtgctgtatttcaaaagtggaaaatatagcacttttcggctaagtgataatattcaaaatgtagtccttaaatcctatagaggaaaccaaaatcacctgcatttaactttacaaaataataatggcttgtttattgaaggattatcctccacagatgctgaacaattgaagatattcttggacagagttcatcaaaacgaggttcagccacctgtgagacctggtaagggtgggagtgtcttttctagcacaacacagaaggaaatcaacaaaacttcattccacaaagttgatgagaaatcaagtagcaaatcttttgagatagcaaaaggaagtgggacaggtgtccttcagaggatgcctttgcttacatcaaaattgacacttacttgcggagagttatcagaaaatcagcacaagaagaggaaaagaatgctctcatctagctcagagatgaatgaggaattcttgaaagaaaataattctgtagaatacaagaaatccaaggcagattgttcgaggtgtgtaagctataatcgagagaaacaattgaagttaaaagagttagaagagaataagaaattggaatgtgaatcttcatgcatcatgaacgccactggaaatccttacctagatgacattggtcttctccaagctctcactgagaaaatggttttggtatttctgttacaacaagggtatagtgacggttacacaaagtgggataaattaaaactattttttgaattatttccagagaaaatatgccacggcctccccaatttgggaaacacctgttatatgaatgcagtgttacagtctctactttcaatcccatcgtttgctgatgatttacttaatcagagtttcccatggggtaaaattccccttaatgctcttaccatgtgcttggcacggctacttttttttaaagatacctataatatagaaatcaaggagatgttactcttgaatcttaaaaaggccatttcagcagctgcagagatattccatggcaatgcacagaacgatgctcatgagtttttagctcactgtttagatcaactgaaagataacatggaaaaactcaacacaatttggaagcctaaaagtgaatttggggaagataattttcctaaacaggtttttgctgatgatcctgacaccagtgggttttcttgccctgtcattactaattttgagttagagttgttgcactccattgcttgtaaagcttgtggtcaggttattctcaagacagaactgaataattacctctccatcaaccttccccaaagaataaaagcacatccttcatctattcagtctacttttgatcttttttttggagcagaagagcttgagtataaatgtgcaaaatgtgagcacaagacttccgttggagtgcactcattcagtaggctacctagaatccttattgttcacctcaaacgctatagcttgaatgagttttgtgcattaaagaagaatgaccaggaagtcatcatttccaaatatttaaaggtgtcttctcattgcaatgaaggcaccagaccacctcttcccttgagtgaggatggagaaattacagatttccaattattaaaagttattcgaaagatgacttctggaaacatcagtgtatcatggcctgcaacaaaggaatccaaagatatcctggctccacacattggatcagataaggagtctgaacaaaaaaaaggccagacagtctttaaaggggcaagcagaagacagcagcaaaagtaccttggaaaaaattctaaaccaaatgagctagaatctgtatactcaggagatcgagcattcattgaaaaagaaccgttagctcacttaatgacgtatctggaagatacctcactttgtcagttccacaaagctggaggtaaacctgccagcagcccaggcacacctctctcaaaagttgactttcaaacagtgcccgaaaatccaaaacgaaagaaatatgtgaaaaccagtaagtttgtagcttttgataggattatcaatcctactaaagatttgtatgaagataaaaatatcagaattccagaaagattccaaaaagtgtctgaacagactcagcagtgtgacggtatgagaatctgtgaacaagcccctcagcaggcactgcctcaaagctttccaaagccaggcacccaggggcacacaaagaacctcctaagacctacaaaattaaatctacagaagtctaacaggaattccctacttgcactgggttccaataagaatccaagaaacaaagacattttagataagataaaatctaaagccaaggaaacaaaaagaaatgatgataagggagatcatacctaccggctcattagtgttgtcagccatcttgggaagactctaaagtcaggccattatatctgtgatgcctatgactttgagaaacagatctggttcacttacgatgatatgcgggtgttaggtatccaggaggcccagatgcaggaggataggcgttgcactgggtacatcttcttttacatgcataatgagatctttgaagagatgttgaaaagagaagagaatgcccagcttaatagcaaggaggtagaggagacccttcagaaggaataagaggaacgtactcctccttgtacagatctgcctgactgtctcactcgataccacttcctccatggaaggaaaactgtgaactttatccagagatgaaaatgcaattagtctaggaccaaaggtcaaacagaaacacttaatggggagatctgcattctaatcctgacacagacacctcaatcccatagctctggctgatgagcatccttctctcctacaagactgaaattgtgtttttcatgttcttcttcattttaatatagtcagggtcttgctctgtcatcctggctagagtgcagtccttcaataataactcactgcagcctcaaactcctggcatcaagcgattctctctcagcctcctgaaaagagagggacttatcttcttgcttgagatgggactatagatgtgtgccaccaggcctagctatttttttttttttttttgctttttgcagagacagggtctcactatgctgcccaggttggacttgaactcctggcctcaagcaatcttcctgcctctttccatgttctaatacagtggtttaaaaagtatgctccttaaactagcagcaccaggagcatgggggtagtcatttgaaatgcaaaatcttgggttccactgtagacctactgattcagaaacttggggtaagggatagcaatctgatggagaccgtgatgcttgatacagtttgagaaccactactgtactacatacactaccttggttgtatatttaaattgcttattttgtaaaaggttttgattacatttttgtgtttttcatattaatgtatgccttgcctttgtgaacttattaaaagccaaactcacaaaaatca

SEQ ID NO: 33535 - DNA, 3342 bp, Homo sapiens
  source 1..3342: mol_type = unassigned DNA
caacagattccctgtttctgctttaacctgggctgcttgctaagtgcttgcctctcaggatccttgtggagctgaacttgcaaaacagattggaacttcaagattatcaataatcggagatacgtatattttatttgtaaagaaaacatggctgccctattcctacgtggttttgtccaaatagggaactgcaagactgggatatctaagtcaaaagaagcattcattgaagcagtggaaagaaagaagaaagatagactggtgctgtatttcaaaagtggaaaatatagcacttttcggctaagtgataatattcaaaatgtagtccttaaatcctatagaggaaaccaaaatcacctgcatttaactttacaaaataataatggcttgtttattgaaggattatcctccacagatgctgaacaattgaagatattcttggacagagttcatcaaaacgaggttcagccacctgtgagacctggtaagggtgggagtgtcttttctagcacaacacagaaggaaatcaacaaaacttcattccacaaagttgatgagaaatcaagtagcaaatcttttgagatagcaaaaggaagtgggacaggtgtccttcagaggatgcctttgcttacatcaaaattgacacttacttgcggagagttatcagaaaatcagcacaagaagaggaaaagaatgctctcatctagctcagagatgaatgaggaattcttgaaagaaaataattctgtagaatacaagaaatccaaggcagattgttcgaggtgtgtaagctataatcgagagaaacaattgaagttaaaagagttagaagagaataagaaattggaatgtgaatcttcatgcatcatgaacgccactggaaatccttacctagatgacattggtcttctccaagctctcactgagaaaatggttttggtatttctgttacaacaagggtatagtgacggttacacaaagtgggataaattaaaactattttttgaattatttccagagaaaatatgccacggcctccccaatttgggaaacacctgttatatgaatgcagtgttacagtctctactttcaatcccatcgtttgctgatgatttacttaatcagagtttcccatggggtaaaattccccttaatgctcttaccatgtgcttggcacggctacttttttttaaagatacctataatatagaaatcaaggagatgttactcttgaatcttaaaaaggccatttcagcagctgcagagatattccatggcaatgcacagaacgatgctcatgagtttttagctcactgtttagatcaactgaaagataacatggaaaaactcaacacaatttggaagcctaaaagtgaatttggggaagataattttcctaaacaggtttttgctgatgatcctgacaccagtgggttttcttgccctgtcattactaattttgagttagagttgttgcactccattgcttgtaaagcttgtggtcaggttattctcaagacagaactgaataattacctctccatcaaccttccccaaagaataaaagcacatccttcatctattcagtctacttttgatcttttttttggagcagaagagcttgagtataaatgtgcaaaatgtgagcacaagacttccgttggagtgcactcattcagtaggctacctagaatccttattgttcacctcaaacgctatagcttgaatgagttttgtgcattaaagaagaatgaccaggaagtcatcatttccaaatatttaaaggtgtcttctcattgcaatgaaggcaccagaccacctcttcccttgagtgaggatggagaaattacagatttccaattattaaaagttattcgaaagatgacttctggaaacatcagtgtatcatggcctgcaacaaaggaatccaaagatatcctggctccacacattggatcagataaggagtctgaacaaaaaaaaggccagacagtctttaaaggggcaagcagaagacagcagcaaaagtaccttggaaaaaattctaaaccaaatgagctagaatctgtatactcaggagatcgagcattcattgaaaaagaaccgttagctcacttaatgacgtatctggaagatacctcactttgtcagttccacaaagctggaggtaaacctgccagcagcccaggcacacctctctcaaaagttgactttcaaacagtgcccgaaaatccaaaacgaaagaaatatgtgaaaaccagtaagtttgtagcttttgataggattatcaatcctactaaagatttgtatgaagataaaaatatcagaattccagaaagattccaaaaagtgtctgaacagactcagcagtgtgacggtatgagaatctgtgaacaagcccctcagcaggcactgcctcaaagctttccaaagccaggcacccaggggcacacaaagaacctcctaagacctacaaaattaaatctacagaagtctaacaggaattccctacttgcactgggttccaataagaatccaagaaacaaagacattttagataagataaaatctaaagccaaggaaacaaaaagaaatgatgataagggagatcatacctaccggctcattagtgttgtcagccatcttgggaagactctaaagtcaggccattatatctgtgatgcctatgactttgagaaacagatctggttcacttacgatgatatgcgggtgttaggtatccaggaggcccagatgcaggaggataggcgttgcactgggtacatcttcttttacatgcataatgagatctttgaagagatgttgaaaagagaagagaatgcccagcttaatagcaaggaggtagaggagacccttcagaaggaataagaggaacgtactcctccttgtacagatctgcctgactgtctcactcgataccacttcctccatggaaggaaaactgtgaactttatccagagatgaaaatgcaattagtctaggaccaaaggtcaaacagaaacacttaatggggagatctgcattctaatcctgacacagacacctcaatcccatagctctggctgatgagcatccttctctcctacaagactgaaattgtgtttttcatgttcttcttcattttaatatagtcagggtcttgctctgtcatcctggctagagtgcagtccttcaataataactcactgcagcctcaaactcctggcatcaagcgattctctctcagcctcctgaaaagagagggacttatcttcttgcttgagatgggactatagatgtgtgccaccaggcctagctatttttttttttttttttgctttt

SEQ ID NO: 33536 - DNA, 4669 bp, Homo sapiens
  source 1..4669: mol_type = unassigned DNA
agtcctgagaggctgggccggcggcggctgcggcgggagaccggtgacccgcggctgggcgcctcggccatgactgcggagctgcagcaggacgacgcggccggcgcggcagacggccacggctcgagctgccaaatgctgttaaatcaactgagagaaatcacaggcattcaggacccttcctttctccatgaagctctgaaggccagtaatggtgacattactcaggcagtcagccttctcactgatgagagagttaaggagcccagtcaagacactgttgctacagaaccatctgaagtagaggggagtgctgccaacaaggaagtattagcaaaagttatagaccttactcatgataacaaagatgatcttcaggctgccattgctttgagtctactggagtctcccaaaattcaagctgatggaagagatcttaacaggatgcatgaagcaacctctgcagaaactaaacgctcaaagagaaaacgctgtgaagtctggggagaaaaccccaatcccaatgactggaggagagttgatggttggccagttgggctgaaaaatgttggcaatacatgttggtttagtgctgttattcagtctctctttcaattgcctgaatttcgaagacttgttctcagttatagtctgccacaaaatgtacttgaaaattgtcgaagtcatacagaaaagagaaatatcatgtttatgcaagagcttcagtatttgtttgctctaatgatgggatcaaatagaaaatttgtagacccgtctgcagccctggatctattaaagggagcattccgatcatctgaggaacagcagcaagatgtgagtgaattcacacacaagctcctggattggctagaggacgcattccagctagctgttaatgttaacagtcccaggaacaaatctgaaaatccaatggtgcagctgttctatggtactttcctgactgaaggggttcgtgaaggaaaacccttttgtaacaatgagaccttcggccagtatcctcttcaggtaaacggttatcgcaacttagacgagtgtttggaaggggccatggtggagggtgatgttgagcttcttccctccgatcactcggtgaagtatggacaagagcgttggtttacaaagctacctccagtgttgacctttgaactctcaagatttgagtttaatcagtcccttgggcagccagagaaaattcacaataagctggaatttcctcagattatttatatggacaggtacatgtacaggagcaaggagcttattcgaaataagagagagtgtattcgaaagttgaaggaggaaataaaaattctgcagcaaaaattggaaaggtatgtgaaatatggctcaggcccagctcggttcccgctcccggacatgctgaaatatgttattgaatttgctagtacaaaacctgcctcagaaagctgtccacctgaaagtgacacacatatgacattaccactttcttcagtgcactgctcggtttctgaccagacatccaaggaaagtacaagtacagaaagctcttctcaggatgttgaaagtaccttttcttctcctgaagattctttacccaagtctaaaccactgacatcttctcggtcttccatggaaatgccttcacagccagctccacgaacagtcacagatgaggagataaattttgttaagacctgtcttcagagatggaggagtgagattgaacaagatatacaagatttaaagacttgtattgcaagtactactcagactattgaacagatgtactgcgatcctctccttcgtcaggtgccttatcgcttgcatgcagttcttgttcatgaaggacaagcaaatgctggacactattgggcctatatctataatcaaccccgacagagctggctcaagtacaatgacatctctgttactgaatcttcctgggaagaagttgaaagagattcctatggaggcctgagaaatgttagtgcttactgtctgatgtacattaatgacaaactaccctacttcaatgcagaggcagccccaactgaatcagatcaaatgtcagaagtggaagccctatctgtggaactcaagcattacattcaggaggataactggcggtttgagcaggaagtagaggagtgggaagaagagcagtcttgcaaaatccctcaaatggagtcctccaccaactcctcatcacaggactactctacatcacaagagccttcagtagcctcttctcatggggttcgctgcttgtcgtctgagcatgctgtgattgtaaaggagcaaactgcccaggctattgcaaacacagcccgtgcctatgagaagagcggtgtagaagcggcactgagtgaggtgatgctgagccctgccatgcaaggggtcatcctggccatagctaaagcccgtcagacctttgaccgagatgggtctgaagcagggctgattaaggcattccatgaagaatactccaggctctatcagcttgccaaagagacccccacctctcacagtgatcctcgacttcagcatgtccttgtctactttttccaaaatgaagcacccaaaagggtagtagaacgaacccttctggaacagtttgcagataaaaatcttagctatgatgaaagatcaatcagcattatgaaggtggctcaagcgaaactgaaggaaattggtccagatgacatgaatatggaagagtacaagaagtggcatgaagattatagtttgttccgaaaagtgtctgtgtatctcctaacaggcctagaactctatcaaaaaggaaagtaccaagaggcactttcctacctggtatatgcctaccagagcaatgctgccctgctgatgaaggggccccgccggggggtcaaagaatccgtgattgctttataccgaagaaaatgccttctggagctgaatgccaaagcagcttctctttttgaaacaaatgatgatcactccgtaactgagggcattaatgtgatgaatgaactgatcatcccctgcattcaccttatcattaataatgacatttccaaggatgatctggatgccattgaggtcatgagaaaccattggtgctcttaccttgggcaagatattgcagaaaatctgcagctgtgcctaggggagtttctacccagacttctagatccttctgcagaaatcatcgtcttgaaagagcctccaacaattcgacccaattctccctatgacctatgtagccgatttgcagctgtcatggagtcaattcagggagtttcaactgtgacagtgaaataagctcccacatgttcaaggcccattctggttcctggctgcctgcctcttgcacagaagttcgttgtcatagtgctcaccttgggaaaaggattaggtgggcacataagattccgatcagaccccaaccatgctgcatgtgtaaagaaggattgaaaataaaattgcactttttaggtacaaaatcataaaagctgtttcactagaaaaggcagaaagcagtgtattaaggtgttgaattacgccagaagacctgaaatgccttgtacctacaacaatgcttaggcttttctaagcctcttgccacttttaaaattatccttcaggcataaatatttttgacagcagaatagaagaatgattcatgagaacctgaaccagatgaacagctactagttattttatcaaatacagatgacatttaaaaattcttaactacaagagattagaaatataaaccttgcctggctcttgccaggagataacaaaatgggttgctgatgaactgcacccttttacatgtgggtagaatataagctcacatggcagtgagatgttgaaaagtcaaaagagacctgtctctctcctttcttttctatctttaaaccagaaaacctcatactcagtcctcagtgaaagaaagtaaagtattaaggactttagacagaagagcattgtgtaacttgactgaagatcatccattaatagttattaggcatttaggtaaaattttctaatacctaaaaattgtcaaaaacagtcaatagggctactgctggcccaaagaccatttaggtccacctcctcttttttgctctttttttttttctgtgacagtttcactgtgtcgcccaggctggcgttcagtggtgcaatctcagctcactgcaaactctgtctcctgggctcaagtgattctcgtgcctcagcctcccgaatagctggaattacgggcatgcaccaccacacctggctaatttttgtatttttaatagagatggggtttcaccatattggccaggctgatctctaactcctggcctcaagtgatctatctgcctccctcagcctcccaaagtctgggattgcagacaagtcatcgtacccggccttcttttttgcccttaaaagtaagggatgtgggtttgtacaaaaaaaaaaaaaaaaaaaaaaaaaccagcatacatatgcaaaactatatatatatgtatatgtagagaaaaatacttcccattgatcatttttaaaaggcttctgattggatattgtgttttaaccaaattttaaagattaatggaatcatgaaagggaaaaaaattgatacaactatgcagattttataaatgtgcaataaaagtatttgttttac

SEQ ID NO: 33537 - DNA, 4535 bp, Homo sapiens
  source 1..4535: mol_type = unassigned DNA
gagaccggtgacccgcggctgggcgcctcggccatgactgcggagctgcagcaggacgacgcggccggcgcggcagacggccacggctcgagctgccaaatgctgttaaatcaactgagagaaatcacaggcattcaggacccttcctttctccatgaagctctgaaggccagtaatggtgacattactcaggcagtcagccttctcactgatgagagagttaaggagcccagtcaagacactgttgctacagaaccatctgaagtagaggggagtgctgccaacaaggaagtattagcaaaagttatagaccttactcatgataacaaagatgatcttcaggctgccattgctttgagtctactggagtctcccaaaattcaagctgatggaagagatcttaacaggatgcatgaagcaacctctgcagaaactaaacgctcaaagagaaaacgctgtgaagtctggggagaaaaccccaatcccaatgactggaggagagttgatggttggccagttgggctgaaaaatgttggcaatacatgttggtttagtgctgttattcagtctctctttcaattgcctgaatttcgaagacttgttctcagttatagtctgccacaaaatgtacttgaaaattgtcgaagtcatacagaaaagagaaatatcatgtttatgcaagagcttcagtatttgtttgctctaatgatgggatcaaatagaaaatttgtagacccgtctgcagccctggatctattaaagggagcattccgatcatctgaggaacagcagcaagatgtgagtgaattcacacacaagctcctggattggctagaggacgcattccagctagctgttaatgttaacagtcccaggaacaaatctgaaaatccaatggtgcagctgttctatggtactttcctgactgaaggggttcgtgaaggaaaacccttttgtaacaatgagaccttcggccagtatcctcttcaggtaaacggttatcgcaacttagacgagtgtttggaaggggccatggtggagggtgatgttgagcttcttccctccgatcactcggtgaagtatggacaagagcgttggtttacaaagctacctccagtgttgacctttgaactctcaagatttgagtttaatcagtcccttgggcagccagagaaaattcacaataagctggaatttcctcagattatttatatggacaggtacatgtacaggagcaaggagcttattcgaaataagagagagtgtattcgaaagttgaaggaggaaataaaaattctgcagcaaaaattggaaaggtatgtgaaatatggctcaggcccagctcggttcccgctcccggacatgctgaaatatgttattgaatttgctagtacaaaacctgcctcagaaagctgtccacctgaaagtgacacacatatgacattaccactttcttcagtgcactgctcggtttctgaccagacatccaaggaaagtacaagtacagaaagctcttctcaggatgttgaaagtaccttttcttctcctgaagattctttacccaagtctaaaccactgacatcttctcggtcttccatggaaatgccttcacagccagctccacgaacagtcacagatgaggagataaattttgttaagacctgtcttcagagatggaggagtgagattgaacaagatatacaagatttaaagacttgtattgcaagtactactcagactattgaacagatgtactgcgatcctctccttcgtcaggtgccttatcgcttgcatgcagttcttgttcatgaaggacaagcaaatgctggacactattgggcctatatctataatcaaccccgacagagctggctcaagtacaatgacatctctgttactgaatcttcctgggaagaagttgaaagagattcctatggaggcctgagaaatgttagtgcttactgtctgatgtacattaatgacaaactaccctacttcaatgcagaggcagccccaactgaatcagatcaaatgtcagaagtggaagccctatctgtggaactcaagcattacattcaggaggataactggcggtttgagcaggaagtagaggagtgggaagaagagcagtcttgcaaaatccctcaaatggagtcctccaccaactcctcatcacaggactactctacatcacaagagccttcagtagcctcttctcatggggttcgctgcttgtcgtctgagcatgctgtgattgtaaaggagcaaactgcccaggctattgcaaacacagcccgtgcctatgagaagagcggtgtagaagcggcactgagtgaggcattccatgaagaatactccaggctctatcagcttgccaaagagacccccacctctcacagtgatcctcgacttcagcatgtccttgtctactttttccaaaatgaagcacccaaaagggtagtagaacgaacccttctggaacagtttgcagataaaaatcttagctatgatgaaagatcaatcagcattatgaaggtggctcaagcgaaactgaaggaaattggtccagatgacatgaatatggaagagtacaagaagtggcatgaagattatagtttgttccgaaaagtgtctgtgtatctcctaacaggcctagaactctatcaaaaaggaaagtaccaagaggcactttcctacctggtatatgcctaccagagcaatgctgccctgctgatgaaggggccccgccggggggtcaaagaatccgtgattgctttataccgaagaaaatgccttctggagctgaatgccaaagcagcttctctttttgaaacaaatgatgatcactccgtaactgagggcattaatgtgatgaatgaactgatcatcccctgcattcaccttatcattaataatgacatttccaaggatgatctggatgccattgaggtcatgagaaaccattggtgctcttaccttgggcaagatattgcagaaaatctgcagctgtgcctaggggagtttctacccagacttctagatccttctgcagaaatcatcgtcttgaaagagcctccaacaattcgacccaattctccctatgacctatgtagccgatttgcagctgtcatggagtcaattcagggagtttcaactgtgacagtgaaataagctcccacatgttcaaggcccattctggttcctggctgcctgcctcttgcacagaagttcgttgtcatagtgctcaccttgggaaaaggattaggtgggcacataagattccgatcagaccccaaccatgctgcatgtgtaaagaaggattgaaaataaaattgcactttttaggtacaaaatcataaaagctgtttcactagaaaaggcagaaagcagtgtattaaggtgttgaattacgccagaagacctgaaatgccttgtacctacaacaatgcttaggcttttctaagcctcttgccacttttaaaattatccttcaggcataaatatttttgacagcagaatagaagaatgattcatgagaacctgaaccagatgaacagctactagttattttatcaaatacagatgacatttaaaaattcttaactacaagagattagaaatataaaccttgcctggctcttgccaggagataacaaaatgggttgctgatgaactgcacccttttacatgtgggtagaatataagctcacatggcagtgagatgttgaaaagtcaaaagagacctgtctctctcctttcttttctatctttaaaccagaaaacctcatactcagtcctcagtgaaagaaagtaaagtattaaggactttagacagaagagcattgtgtaacttgactgaagatcatccattaatagttattaggcatttaggtaaaattttctaatacctaaaaattgtcaaaaacagtcaatagggctactgctggcccaaagaccatttaggtccacctcctcttttttgctctttttttttttctgtgacagtttcactgtgtcgcccaggctggcgttcagtggtgcaatctcagctcactgcaaactctgtctcctgggctcaagtgattctcgtgcctcagcctcccgaatagctggaattacgggcatgcaccaccacacctggctaatttttgtatttttaatagagatggggtttcaccatattggccaggctgatctctaactcctggcctcaagtgatctatctgcctccctcagcctcccaaagtctgggattgcagacaagtcatcgtacccggccttcttttttgcccttaaaagtaagggatgtgggtttgtacaaaaaaaaaaaaaaaaaaaaaaaaaccagcatacatatgcaaaactatatatatatgtatatgtagagaaaaatacttcccattgatcatttttaaaaggcttctgattggatattgtgttttaaccaaattttaaagattaatggaatcatgaaagggaaaaaaattgatacaactatgcagattttataaatgtgcaataaaagtatttgtttt

SEQ ID NO: 33538 - DNA, 2439 bp, Homo sapiens
  source 1..2439: mol_type = unassigned DNA
gagcgcccggctagaagcgacaccagacggagcctccggagttcctccgcccccacctcgccgggtcctggagccgcagtcctcccagctgccctcctcgtggccatggagtgtccacacctgagctccagcgtctgcattgctccggactcagccaagttccccaacggctccccgtcgtcctggtgctgcagcgccttcaaatgtttatctggtgtgactgtattatgccctcagagagtactgtatgttgcccaggctggcctcgaactctaggctcaagtgattcttctgcctcagcctcccaagtagctgggactacagatgcaatcaccaccacacttggcagtgtgccggtccaacaaaagcccttgggtctgtttgacttgttcaagtgtccactgtggaaggtatgtgaatggccatgcaaaaaaacattatgaagatgcacaagtacctttaaccaaccataagaaatcagaaaagcaagataaagttcagcacacagtatgtatggattgcagtagctacagtacatactgttatcgctgtgatgattttgtggttaatgacaccaagctgggactggtacagaaagtcagagaacacttacagaacttggaaaactcagctttcacagctgacaggcataagaaaagaaaacttttggaaaactcaacactaaacagcaagttattaaaagtaaatggaagcaccactgccatttgtgccacaggccttcggaatttggggaacacatgtttcatgaatgccatccttcagtcactcagtaacattgagcagttttgctgttatttcaaagaactgcccgccgtggagttaaggaatgggaaaacagcaggaaggcggacataccacaccaggagccaaggggataacaatgtgtctttggtagaagagtttagaaagacactctgtgctttatggcaaggcagccagactgcatttagcccagagtccttattttatgttgtttggaagattatgccaaactttaggggctatcaacagcaggacgcccatgaattcatgcgctaccttttggaccacctacacttggaacttcagggcggtttcaacggtgtttcccgctcagcaattctgcaggagaattctactctgtctgcaagtaacaagtgttgcataaatggagcatctactgttgtcacggctatattcggaggcattctccaaaatgaggttaactgcctcatatgtgggacagaatctagaaagtttgatccattcctagacctttcattagatattccaagtcagttcagaagtaagcgctctaagaatcaagaaaatggaccagtttgttcgttacgagattgtcttcgcagttttaccgacttagaagaacttgatgagacagagttatatatgtgccataaatgcaaaaagaaacaaaagtccacaaaaaagttttggattcaaaaactacccaaggtgctatgcttacatttgaaaagatttcattggacagcatatttaagaaataaagttgatacatacgtagaatttccactgagaggcctagacatgaaatgctacttactagagcctgagaacagtggcccggagagctgcctgtatgacctcgccgctgtggtggtgcaccatggttccggggttggttctggacattacacagcatacgcaactcacgaaggccgctggttccacttcaatgacagtactgtaacactgactgacgaggagactgtggtgaaggcgaaggcctacatccttttctacgtggaacaccaggccaaagctggatcggataaactttaatacctcctccaaatcatcattcaccaaccataccagagaaacatttccagttttccacaaatacttgatacaagatttaatttcattatgcacttttcaatttcctattttggatttagttttgtcaatggtagtgacttactgaacatgggcaccaactaattttgttgttgttctaccagaaaacctcagcagatgttttgatttgctgctttagttgtaataattcaatttttataggtagttgtaagaacttagtcttatttgacttttttattttatgttaatgttttcagttctcactttgaggcacatttacatcaatgcttttgttcctctcacatgctgaaagcaagatgtgttccttattgtgaagagcgacacaactgcctgctgcctttccacagctataatggacatcaggttgactctaaatcaaggatcatgtgtgcacaatacttgtggcccacaaaatttcacaatgactgctgaggaatcattctttttgcctgtaaaatataacaaagggcatcattaagtagaccaggtaattactgcttgtctctcaaggctgctgtctttatcagcactaactaaataaatttgttggttcagttg

SEQ ID NO: 33539 - DNA, 2333 bp, Homo sapiens
  source 1..2333: mol_type = unassigned DNA
ctcgagacgcagccgccgtcggccgagcgcccggctagaagcgacaccagacggagcctccggagttcctccgcccccacctcgccgggtcctggagccgcagtcctcccagctgccctcctcgtggccatggagtgtccacacctgagctccagcgtctgcattgctccggactcagccaagttccccaacggctccccgtcgtcctggtgctgcagcgtgtgccggtccaacaaaagcccttgggtctgtttgacttgttcaagtgtccactgtggaaggtatgtgaatggccatgcaaaaaaacattatgaagatgcacaagtacctttaaccaaccataagaaatcagaaaagcaagataaagttcagcacacagtatgtatggattgcagtagctacagtacatactgttatcgctgtgatgattttgtggttaatgacaccaagctgggactggtacagaaagtcagagaacacttacagaacttggaaaactcagctttcacagctgacaggcataagaaaagaaaacttttggaaaactcaacactaaacagcaagttattaaaagtaaatggaagcaccactgccatttgtgccacaggccttcggaatttggggaacacatgtttcatgaatgccatccttcagtcactcagtaacattgagcagttttgctgttatttcaaagaactgcccgccgtggagttaaggaatgggaaaacagcaggaaggcggacataccacaccaggagccaaggggataacaatgtgtctttggtagaagagtttagaaagacactctgtgctttatggcaaggcagccagactgcatttagcccagagtccttattttatgttgtttggaagattatgccaaactttaggggctatcaacagcaggacgcccatgaattcatgcgctaccttttggaccacctacacttggaacttcagggcggtttcaacggtgtttcccgctcagcaattctgcaggagaattctactctgtctgcaagtaacaagtgttgcataaatggagcatctactgttgtcacggctatattcggaggcattctccaaaatgaggttaactgcctcatatgtgggacagaatctagaaagtttgatccattcctagacctttcattagatattccaagtcagttcagaagtaagcgctctaagaatcaagaaaatggaccagtttgttcgttacgagattgtcttcgcagttttaccgacttagaagaacttgatgagacagagttatatatgtgccataaatgcaaaaagaaacaaaagtccacaaaaaagttttggattcaaaaactacccaaggtgctatgcttacatttgaaaagatttcattggacagcatatttaagaaataaagttgatacatacgtagaatttccactgagaggcctagacatgaaatgctacttactagagcctgagaacagtggcccggagagctgcctgtatgacctcgccgctgtggtggtgcaccatggttccggggttggttctggacattacacagcatacgcaactcacgaaggccgctggttccacttcaatgacagtactgtaacactgactgacgaggagactgtggtgaaggcgaaggcctacatccttttctacgtggaacaccaggccaaagctggatcggataaactttaatacctcctccaaatcatcattcaccaaccataccagagaaacatttccagttttccacaaatacttgatacaagatttaatttcattatgcacttttcaatttcctattttggatttagttttgtcaatggtagtgacttactgaacatgggcaccaactaattttgttgttgttctaccagaaaacctcagcagatgttttgatttgctgctttagttgtaataattcaatttttataggtagttgtaagaacttagtcttatttgacttttttattttatgttaatgttttcagttctcactttgaggcacatttacatcaatgcttttgttcctctcacatgctgaaagcaagatgtgttccttattgtgaagagcgacacaactgcctgctgcctttccacagctataatggacatcaggttgactctaaatcaaggatcatgtgtgcacaatacttgtggcccacaaaatttcacaatgactgctgaggaatcattctttttgcctgtaaaatataacaaagggcatcattaagtagaccaggtaattactgcttgtctctcaaggctgctgtctttatcagcactaactaaataaatttgttggttcagttgtacttgtcctgcaaatacaagaa

SEQ ID NO: 33540 - DNA, 961 bp, Homo sapiens
  source 1..961: mol_type = unassigned DNA
accagacggagcctccggagttcctccgcccccacctcgccgggtcctggagccgcagtcctcccagctgccctcctcgtggccatggagtgtccacacctgagctccagcgtctgcattgctccggactcagccaagttccccaacggctccccgtcgtcctggtgctgcagcgtgtgccggtccaacaaaagcccttgggtctgtttgacttgttcaagtgtccactgtggaaggtatgtgaatggccatgcaaaaaaacattatgaagatgcacaagtacctttaaccaaccataagaaatcagaaaagcaagataaagttcagcacacagtatgtatggattgcagtagctacagtacatactgttatcgctgtgatgattttgtggttaatgacaccaagctgggactggtacagaaagtcagagaacacttacagaacttggaaaactcagctttcacagctgacaggcataagaaaagaaaacttttggaaaactcaacactaaacagcaagttattaaaagtaaatgtctttggtagaagagtttagaaagacactctgtgctttatggcaaggcagccagactgcatttagcccagagtccttattttatgttgtttggaagattatgccaaactttaggggctatcaacagcaggacgcccatgaattcatgcgctaccttttggaccacctacacttggaacttcagggcggtttcaacggtgtttcccgctcagcaattctgcaggagaattctactctgtctgcaagtaacaagtgttgcataaatggagcatctactgttgtcacggctatattcggaggcattctccaaaatgaggttaactgcctcatatgtgggacagaatctagaaagtttgatccattcctagacctttcattagatattccaagtcagttcagaagtaagcgctctaagaatcaagaaaat

SEQ ID NO: 33541 - DNA, 2014 bp, Homo sapiens
  source 1..2014: mol_type = unassigned DNA
aagatgcacaagtacctttaaccaaccataagaaatcagaaaagcaagataaagttcagcacacagtatgtatggattgcagtagctacagtacatactgttatcgctgtgatgattttgtggttaatgacaccaagctgggactggtacagaaagtcagagaacacttacagaacttggaaaactcagctttcacagctgacaggcataagaaaagaaaacttttggaaaactcaacactaaacagcaagttattaaaagtaaatggaagcaccactgccatttgtgccacaggccttcggaatttggggaacacatgtttcatgaatgccatccttcagtcactcagtaacattgagcagttttgctgttatttcaaagaactgcccgccgtggagttaaggaatgggaaaacagcaggaaggcggacataccacaccaggagccaaggggataacaatgtgtctttggtagaagagtttagaaagacactctgtgctttatggcaaggcagccagactgcatttagcccagagtccttattttatgttgtttggaagattatgccaaactttaggggctatcaacagcaggacgcccatgaattcatgcgctaccttttggaccacctacacttggaacttcagggcggtttcaacggtgtttcccgctcagcaattctgcaggagaattctactctgtctgcaagtaacaagtgttgcataaatggagcatctactgttgtcacggctatattcggaggcattctccaaaatgaggttaactgcctcatatgtgggacagaatctagaaagtttgatccattcctagacctttcattagatattccaagtcagttcagaagtaagcgctctaagaatcaagaaaatggaccagtttgttcgttacgagattgtcttcgcagttttaccgacttagaagaacttgatgagacagagttatatatgtgccataaatgcaaaaagaaacaaaagtccacaaaaaagttttggattcaaaaactacccaaggtgctatgcttacatttgaaaagatttcattggacagcatatttaagaaataaagttgatacatacgtagaatttccactgagaggcctagacatgaaatgctactactagagcctgagaacagtggcccggagagctgcctgtatgacctcgccgctgtggtggtgcaccatggttccggggttggttctggacattacacagcatacgcaactcacgaaggccgctggttccacttcaatgacagtactgtaacactgactgacgaggagactgtggtgaaggcgaaggcctacatccttttctacgtggaacaccaggccaaagctggatcggataaactttaatacctcctccaaatcatcattcaccaaccataccagagaaacatttccagttttccacaaatacttgatacaagatttaatttcattatgcacttttcaatttcctattttggatttagttttgtcaatggtagtgacttactgaacatgggcaccaactaattttgttgttgttctaccagaaaacctcagcagatgttttgatttgctgctttagttgtaataattcaatttttataggtagttgtaagaacttagtcttatttgacttttttattttatgttaatgttttcagttctcactttgaggcacatttacatcaatgcttttgttcctctcacatgctgaaagcaagatgtgttccttattgtgaagagcgacacaactgcctgctgcctttccacagctataatggacatcaggttgactctaaatcaaggatcatgtgtgcacaatacttgtggcccacaaaatttcacaatgactgctgaggaatcattctttttgcctgtaaaatataacaaagggcatcattaagtagaccaggtaattactgcttgtctctcaaggctgctgtctttatcagcactaactaaataaatttgttggttcagttgtacttgtcctgcaaatac

SEQ ID NO: 33542 - DNA, 1502 bp, Homo sapiens
  source 1..1502: mol_type = unassigned DNA
accagacggagcctccggagttcctccgcccccacctcgccgggtcctggagccgcagtcctcccagctgccctcctcgtggccatggagtgtccacacctgagctccagcgtctgcattgctccggactcagccaagttccccaacggctccccgtcgtcctggtgctgcagcggtctttggtagaagagtttagaaagacactctgtgctttatggcaaggcagccagactgcatttagcccagagtccttattttatgttgtttggaagattatgccaaactttaggggctatcaacagcaggacgcccatgaattcatgcgctaccttttggaccacctacacttggaacttcagggcggtttcaacggtgtttcccgctcagcaattctgcaggagaattctactctgtctgcaagtaacaagtgttgcataaatggagcatctactgttgtcacggctatattcggaggcattctccaaaatgaggttaactgcctcatatgtgggacagaatctagaaagtttgatccattcctagacctttcattagatattccaagtcagttcagaagtaagcgctctaagaatcaagaaaatggaccagtttgttcgttacgagattgtcttcgcagttttaccgacttagaagaacttgatgagacagagttatatatgtgccataaatgcaaaaagaaacaaaagtccacaaaaaagttttggattcaaaaactacccaaggtgctatgcttacatttgaaaagatttcattggacagcatatttaagaaataaagttgatacatacgtagaatttccactgagaggcctagacatgaaatgctacttactagagcctgagaacagtggcccggagagctgcctgtatgacctcgccgctgtggtggtgcaccatggttccggggttggttctggacattacacagcatacgcaactcacgaaggccgctggttccacttcaatgacagtactgtaacactgactgacgaggagactgtggtgaaggcgaaggcctacatccttttctacgtggaacaccaggccaaagctggatcggataaactttaatacctcctccaaatcatcattcaccaaccataccagagaaacatttccagttttccacaaatacttgatacaagatttaatttcattatgcacttttcaatttcctattttggatttagttttgtcaatggtagtgacttactgaacatgggcaccaactaattttgttgttgttctaccagaaaacctcagcagatgttttgatttgctgctttagttgtaataattcaatttttataggtagttgtaagaacttagtcttatttgacttttttattttatgttaatgttttcagttctcactttgaggcacatttacatcaatgcttttgttcctctcacatgctgaaagcaagatgtgttccttattgtgaagagcgacacaactgcctgctgcctttccacagctat

SEQ ID NO: 33543 - DNA, 1972 bp, Homo sapiens
  source 1..1972: mol_type = unassigned DNA
ttctttgacgcaagggctcgagacgcagccgccgtcggccgagcgcccggctagaagcgacaccagacggagcctccggagttcctccgcccccacctcgccgggtcctggagccgcagtcctcccagctgccctcctcgtggccatggagtgtccacacctgagctccagcgtctgcattgctccggactcagccaagttccccaacggctccccgtcgtcctggtgctgcagcgtgtgccggtccaacaaaagcccttgggtctgtttgacttgttcaagtgtccactgtggaagttatcgctgtgatgattttgtggttaatgacaccaagctgggactggtacagaaagtcagagaacacttacagaacttggaaaactcagctttcacagctgacaggcataagaaaagaaaacttttggaaaactcaacactaaacagcaagttattaaaagtaaatggaagcaccactgccatttgtgccacaggccttcggaatttggggaacacatgtttcatgaatgccatccttcagtcactcagtaacattgagcagttttgctgttatttcaaagaactgcccgccgtggagttaaggaatgggaaaacagcaggaaggcggacataccacaccaggagccaaggggataacaatgtgtctttggtagaagagtttagaaagacactctgtgctttatggcaaggcagccagactgcatttagcccagagtccttattttatgttgtttggaagattatgccaaactttaggggctatcaacagcaggacgcccatgaattcatgcgctaccttttggaccacctacacttggaacttcagggcggtttcaacggtgtttcccgctcagcaattctgcaggagaattctactctgtctgcaagtaacaagtgttgcataaatggagcatctactgttgtcacggctatattcggaggcattctccaaaatgaggttaactgcctcatatgtgggacagaatctagaaagtttgatccattcctagacctttcattagatattccaagtcagttcagaagtaagcgctctaagaatcaagaaaatggaccagtttgttcgttacgagattgtcttcgcagttttaccgacttagaagaacttgatgagacagagttatatatgtgccataaatgcaaaaagaaacaaaagtccacaaaaaagttttggattcaaaaactacccaaggtgctatgcttacatttgaaaagatttcattggacagcatatttaagaaataaagttgatacatacgtagaatttccactgagaggcctagacatgaaatgctacttactagagcctgagaacagtggcccggagagctgcctgtatgacctcgccgctgtggtggtgcaccatggttccggggttggttctggacattacacagcatacgcaactcacgaaggccgctggttccacttcaatgacagtactgtaacactgactgacgaggagactgtggtgaaggcgaaggcctacatccttttctacgtggaacaccaggccaaagctggatcggataaactttaatacctcctccaaatcatcattcaccaaccataccagagaaacatttccagttttccacaaatacttgatacaagatttaatttcattatgcacttttcaatttcctattttggatttagttttgtcaatggtagtgacttactgaacatgggcaccaactaattttgttgttgttctaccagaaaacctcagcagatgttttgatttgctgctttagttgtaataattcaatttttataggtagttgtaagaacttagtcttatttgacttttttattttatgttaatgttttcagttctcactttgaggcacatttacatcaatgcttttgttcctctcacatgctgaaagcaagatgtgttccttattgtgaagagcgacacaactgcctgctg

SEQ ID NO: 33544 - DNA, 5499 bp, Homo sapiens
  source 1..5499: mol_type = unassigned DNA
gtggccatggagtgtccacacctgagctccagcgtctgcattgctccggactcagccaagttccccaacggctccccgtcgtcctggtgctgcagcgtgtgccggtccaacaaaagcccttgggtctgtttgacttgttcaagtgtccactgtggaaggatttggggaacctgaaaatactttgtacagataacttttttttaaaaaagaagaaaagtagaagcacttaaattctgcagttgaagagacagattcctctcctagattttgagaggtatgtgaatggccatgcaaaaaaacattatgaagatgcacaagtacctttaaccaaccataagaaatcagaaaagcaagataaagttcagcacacagtatgtatggattgcagtagctacagtacatactgttatcgctgtgatgattttgtggttaatgacaccaagctgggactggtacagaaagtcagagaacacttacagaacttggaaaactcagctttcacagctgacaggcataagaaaagaaaacttttggaaaactcaacactaaacagcaagttattaaaagtaaatggaagcaccactgccatttgtgccacaggccttcggaatttggggaacacatgtttcatgaatgccatccttcagtcactcagtaacattgagcagttttgctgttatttcaaagaactgcccgccgtggagttaaggaatgggaaaacagcaggaaggcggacataccacaccaggagccaaggggataacaatgtgtctttggtagaagagtttagaaagacactctgtgctttatggcaaggcagccagactgcatttagcccagagtccttattttatgttgtttggaagattatgccaaactttaggggctatcaacagcaggacgcccatgaattcatgcgctaccttttggaccacctacacttggaacttcagggcggtttcaacggtgtttcccgctcagcaattctgcaggagaattctactctgtctgcaagtaacaagtgttgcataaatggagcatctactgttgtcacggctatattcggaggcattctccaaaatgaggttaactgcctcatatgtgggacagaatctagaaagtttgatccattcctagacctttcattagatattccaagtcagttcagaagtaagcgctctaagaatcaagaaaatggaccagtttgttcgttacgagattgtcttcgcagttttaccgacttagaagaacttgatgagacagagttatatatgtgccataaatgcaaaaagaaacaaaagtccacaaaaaagttttggattcaaaaactacccaaggtgctatgcttacatttgaaaagatttcattggacagcatatttaagaaataaagttgatacatacgtagaatttccactgagaggcctagacatgaaatgctacttactagagcctgagaacagtggcccggagagctgcctgtatgacctcgccgctgtggtggtgcaccatggttccggggttggttctggacattacacagcatacgcaactcacgaaggccgctggttccacttcaatgacagtactgtaacactgactgacgaggagactgtggtgaaggcgaaggcctacatccttttctacgtggaacaccaggccaaagctggatcggataaactttaatacctcctccaaatcatcattcaccaaccataccagagaaacatttccagttttccacaaatacttgatacaagatttaatttcattatgcacttttcaatttcctattttggatttagttttgtcaatggtagtgacttactgaacatgggcaccaactaattttgttgttgttctaccagaaaacctcagcagatgttttgatttgctgctttagttgtaataattcaatttttataggtagttgtaagaacttagtcttatttgacttttttattttatgttaatgttttcagttctcactttgaggcacatttacatcaatgcttttgttcctctcacatgctgaaagcaagatgtgttccttattgtgaagagcgacacaactgcctgctgcctttccacagctataatggacatcaggttgactctaaatcaaggatcatgtgtgcacaatacttgtggcccacaaaatttcacaatgactgctgaggaatcattctttttgcctgtaaaatataacaaagggcatcattaagtagaccaggtaattactgcttgtctctcaaggctgctgtctttatcagcactaactaaataaatttgttggttcagttgtacttgtcctgcaaatacaagaattactctctttgttggtttttttggttttggggcatacttgtttgcggggaggtaagatgggagtaaagaccaaatacatgtaatgtttaaaaaaaatgctgtgactcactgacatggtataggtgttaccagtgaggtaaagccatggcgtctgcctccttttgaatcagtatctcattcccccttagttgtaccactggaagtcacgacatgtccattatagacttacttactgcttgtgtttggcatctgagtctgaggtgtgaccctctgggatttacttggatcatcacccgcacttcagtttatcactggggggtgtgcttccacaggaggaaatttagaatcttcgctgctctgggttttaacacctctctctggcctatcctgattgataggacaagttgaaaatactgttggagtaagtaagtggagttttcgttttgttttttgggggtttttggagacaagagtctctctctgttgcccaggctggagtgcagtggcacgatctcagctcattgcaacctcggcctcccgagtagcaattctcctgcctcaacctcctgagtagctgggattacaggtgcccaccactacacctggctaattttttttttgtatttttagtaaagacgggggtttaccatgttggctagggtggtctcaacctccctcctgacctcaggtgatccgcctgcctcagcctcccaaagtgctgagattacaggcgtgagccatcacgcccagacagttttgtttttaaaaaacagatttaactcaaagattcaaatttggaaccagaatcccatttaaagaaagcagttgtggtttctacaagtgttctaagacagtcctgtggtggttttttttttttcttttttttggttgggggcggtgggggttggtagacatagcctaccaattctccacaagggacaaaatgtatcttgtgttaagccaacgagactttctggcaattttttttttttttttttaatggagtcttactctgtccctcaggctggagtgcagtgtggcatgatcacagctcactgtagcctcaacctcccaggctcaagcgatcctcccacttcagcctcgaagtagctggcaccaccacacccagctaatttttaatatttttactagagatggggtttcaccacgttgcccaggctggtcttgcactcctgggctcaagtgatccacccaccttggcttcccaaggtgctagcattacaggcatgagccaccacgcccagcctgttctattaaaaacatcttgacctttttttttttttaagtttatgatataaaaacagtctggtggctttccctcaggttggatatctgaagttgtgggagcagatgtagctccatttccattttaatattaactggataaatcccacatcttcccagaacacatctgctaaacactttaacatgacaaggagcaaattacaattatgtgtaaacttatatcatccagtacaatggcccctagccacatgtgactgaaatttaaattagaaactcagtgccttcagtcacactagccacatttcaagtgctcagcacccacatacggcgtaggacaatgctggtctaaattttcactccaaagaataaaactttgccatcatgtttaggtcttacaactttgagtcctaaaagataatagggagatgtgtgcttaaattaatttacaatgctaaattatattaggttaaactgtatgaaaccctgctatttgatgagttctgatctacaaaaatgacagctccacctgatctgatgtatcacacattaacatcacatctaattcaacctgaaatgtgagtctcctttgatcttgcaaagtatctcctatgaatccgggctcttttgcttagaaggtagacagctgtaacctctaacattgatacttcgatcttcagtctctctgaatgggcagctgttaaacagtaaaggcctgggcagagttgatggtgaaaaaaagctgtatttttataccaaatggaacttcagcaacacgttggactactttgtcgggcagagtggtcttcagacaggtgatgctgttggcttaagagatgaacacgtcttctctctgaatttgtttttattggttggttttacttgaacagaaacgtttgaatggtgtgaagattctttagaaaagtgattggatccatctcaattgtgcacttgaacagcagtgatgtaaatgtgcttatttgtgttttcatttttaactgtgcagccttaccacacctattttgaaagctgatcttttgtcctcttcagggcttttcccttgtgccatgttgtctccagcaatatatgtggcttctggctcagagcttctgctgaggcagggcctcgcgctgagtcacatggctccttggaacaagaaaactttctcagaagtccccacacgggtgggtgacagaaacagtttgtggcaacacaaatctctctccatggtggagaaacctttgcttatccactgtattctactcagtgtatagtgatgacagatgtactagaattaaaccagtcaagtgtactggcccggggtgagtgttaaatgtgtatctcgcctgtggaacctactcagcagcttggtttctggggttgggggcatatttatttcttaaagccaaacctctccttcattggtttagtgtacataagtctatttagatacacttatcccactttaatctccaccagcccctaaactctctcctgtaccctctgttgctgaagtggcctcttcacctgggccctggaaaagccgatggaaaaagtctgttcctgcagccaaggcctgggtcccaggtgactaggagtagccataggaaggtgaggaaggagaagtgggcatgtggtgtcatctgtagtccaaggtctctgcgtctcgtcagtgggtgcagtgccttccccctcaggtgtgagcgtgatggactctagactgccttccatgagtgttggtcatgctatgatgtcatcatttgccattaaaacccagtttgtatgatgccaagaggattaattgtgcaagtgactgattcatttaaattgtaatcacatcccttttctgcttcaccaacctgaactgtttttaaaaatatcattaaaagtctgttctctttccttttga

SEQ ID NO: 33545 - DNA, 3742 bp, Homo sapiens
  source 1..3742: mol_type = unassigned DNA
gttccgctgtctcgggaaccgtcgtatccctcggtccggcggcggcggcggcggtagcggaggagacggtttcaggcctccggtgcggctgcaatgctgagctcccgggccgaggcggcgatgaccgcggccgacagggccatccagcgcttcctgcggaccggggcggccgtcagatataaagtcatgaagaactggggagttataggtggaattgctgctgctcttgcagcaggaatatatgttatttggggtcccattacagaaagaaagaagcgtagaaaagggcttgtgcctggccttgttaatttagggaacacctgcttcatgaactccctgctacaaggcctgtctgcctgtcctgctttcatcaggtggctggaagagttcacctcccagtactccagggatcagaaggagcccccctcacaccagtatttatccttaacactcttgcaccttctgaaagccttgtcctgccaagaagttactgatgatgaggtcttagatgcaagctgcttgttggatgtcttaagaatgtacagatggcagatctcatcatttgaagaacaggatgctcacgaattattccatgtcattacctcgtcattggaagatgagcgagaccgccagcctcgggtcacacatttgtttgatgtgcattccctggagcagcagtcagaaataactcccaaacaaattacctgccgcacaagagggtcacctcaccctacatccaatcactggaagtctcaacatccttttcatggaagactcactagtaatatggtctgcaaacactgtgaacaccagagtcctgttcgatttgatacctttgatagcctttcactaagtattccagccgccacatggggtcacccattgaccctggaccactgccttcaccacttcatctcatcagaatcagtgcgggatgttgtgtgtgacaactgtacaaagattgaagccaagggaacgttgaacggggaaaaggtggaacaccagaggaccacttttgttaaacagttaaaactagggaagctccctcagtgtctctgcatccacctacagcggctgagctggtccagccacggcacgcctctgaagcggcatgagcacgtgcagttcaatgagttcctgatgatggacatttacaagtaccacctccttggacataaacctagtcaacacaaccctaaactgaacaagaacccagggcctacactggagctgcaggatgggccgggagcccccacaccagttctgaatcagccaggggcccccaaaacacagatttttatgaatggcgcctgctccccatctttattgccaacgctgtcagcgccgatgcccttccctctcccagttgttcccgactacagctcctccacatacctcttccggctgatggcagttgtcgtccaccatggagacatgcactctggacactttgtcacttaccgacggtccccaccttctgccaggaaccctctctcaactagcaatcagtggctgtgggtctccgatgacactgtccgcaaggccagcctgcaggaggtcctgtcctccagcgcctacctgctgttctacgagcgcgtcctttccaggatgcagcaccagagccaggagtgcaagtctgaagaatgactgtgccctcctgcaaggctagagctgatggcactgtctgcactgtccaggaaaaaagtaaaactgtactgttgcgtgtgcaagcggccccactagagccttccagccttctggtgtgttctaagagcaggctccacctgggagccagccccagttcacaccaaaccaggctccctgaacagtcctgttcatgtgtgtaggtggttctgttgtgttaagaaagcattcattatgtccggagtgtctttttactcatctgatacaggtaattaaaagaactcagattcttgaagccaccgttttcatattgtaatgttaggtgttctcagaggggaggtacctttgtctaatcaacgtttccacttagatcttttatttttaataagcaggcccataaaaattgttgacaagaattaatgaaattattaaaggcaacaatttagaagaaaaagtgcctttcactttcgattgcttttgtagcacgtccattgtgaaatattccttccaggctactcaaaggatagcaagagaacaggtaaatgatgcctaaagaacaccttcctttttctatgccttttctaatctttcaattctttctatggagtaaaggctcatctgccaaatctgccccctggggaaactctttcactactttgtcagttataagtgaagagcttacttgttgcttttatcttttgtatattggactgagatgtaattacactgtattataaaactctgtgaatagccagaactgagctggatctttgcaacacctgattcctctgctctgtggaaaactttttcttacacaaggatccactgtggacggttactttcatctgtttatttattgcccatgcagagctcttaaggtttacaggtgggagcttggggctgtataaaaaaataatccctgccctgagttgacacctggcttaggaaggaagggctgactatggggctgcagtctctctgaacctcagtttcctcatttgtgaagtgaagggttagatttgatgaccaccaaagttcagcccttttcacgaaaaggagaaagcagcttttgactttttaaaaaacatataactacagctggcatctagtattgtcatgttgctctaggtccatattctgaatttattcatttccaatagcctaatacaaaaagtatatattgagcactttcttcccttttcaggtaagtctctgaatgcagcccagggccaaaggaattttgatgacacagtagtacctatgttttaagctatatttttaatttagaaaaatggataccaaattcaaaccgactcatcagaggtaagatttggaatcagacctttccaaaaggtcatctgaggtaaggctaagaccgcacttcctctgctgggggtgagctggcagacacaccaaacagtgccttggcagcagctcacagtgcaggaagcccaggtgatcactcttctgctgggcccaggctgcaccctgaggactcagtaactcactctcaacagaatattctgtgcaggctctccaggctctgggcgtcagggtgcaaggggcagcttgaactgtacggtccgtcctgcactcacccgatgcagaccttgactttgatgttgaaatgaacacacttgttttacccaagtctggtggaacaaatgcccaatcatgtgaccttaaagtgtactgcaaagctgtagctttaagtaattgctgttctgccactgcttactctgaaatctaccatcaaagaaagatagagaaaaggggctgagccttggaatatatggttataagcagatctttctttggtcagagaccagggtttgagccaaggctgtaaatgtgaacaatagctgtgcaaagccttttaacctgacttcttcattttgtaaattattatgcattaagtagcagcccaataatctgatttctagttttattttcaaagtaagtagcttcttttgggaaaaacctaagttaaactagtagttttgccataataactgctgatttatgtatttgctaaaggtacttttgtatctgctgtgtattatagcaataaaataatcattttgttagaaaaaaatca

SEQ ID NO: 33546 - DNA, 7026 bp, Homo sapiens
  source 1..7026: mol_type = unassigned DNA
aagagggcgtgaggagggaaggagagggaggagagagaggagagagaagggcggagtaggaggcaggggaagggggcggggcggaagagtcacgtgatccggcatggaggcggtggcggcgaccgggaggagccgccggggcagaagccgcacttgttagtgtggggggaggtgggggcgggggacgccgacaccgtcaccgtcacccagggacgccgaggagaaggcgggaggggggtgggggcgagatcaggctccgaccccccgccgaggggatgaggggagcatgggtgccaaggagtcacggatcggattcctcagctacgaggaggcgctgaggagagttacagatgtagagctaaaacgactgaaggatgctttcaagaggacctgtggactctcatattacatgggccagcactgcttcatccgggaagtgcttggggatggagtgcctccaaaggttgctgaggtgatttactgttcttttggtggaacatccaaagggctgcacttcaataatttaatagttggacttgtcctccttacaagaggcaaagatgaagagaaagcaaaatacatttttagtcttttttcaagtgaatctgggaactatgttatacgggaagaaatggaaagaatgctccacgtggtggatggtaaagtcccagatacactcaggaagtgtttctcagagggtgaaaaggtaaactatgaaaagtttagaaattggctttttctaaacaaagatgcttttactttctctcgatggcttctatctggaggtgtgtatgttaccctcactgatgatagtgatactcctactttctaccaaactctggctggagtcacacatttggaggaatcagacatcattgatcttgagaaacgctattggttattgaaggctcaatcccggactggacgatttgatttagagacatttggcccattggtttcaccacctattcgtccatctctaagtgaaggtttgtttaatgcttttgatgaaaatcgtgacaatcacatagattttaaggagatatcctgtgggttatcagcctgttgcaggggacccctggctgaaagacaaaaattttgcttcaaggtatttgatgttgaccgtgatggagttctctccagggttgaactgagagacatggtggttgcacttttagaagtctggaaggacaaccgcactgatgatattcctgaattacatatggatctctctgatattgtagaaggcatactgaatgcacatgacaccacaaagatgggtcatcttactctggaagactatcagatctggagtgtgaaaaatgttcttgccaatgagtttttgaacctccttttccaggtgtgtcacatagttctggggttaagaccagctactccggaagaagaaggacaaattattagaggatggttagaacgagagagcaggtatggtctgcaagcaggacacaactggtttatcatctccatgcagtggtggcaacagtggaaagaatatgtcaaatacgatgccaaccctgtggtaattgagccatcatctgttttgaatggaggaaaatactcatttggaactgcagcccatcctatggagcaggtcgaagatagaattggaagcagcctcagttacgtgaatactacagaagagaaattttcagacaacatttctactgcatctgaagcctcagaaactgctggcagcggctttctgtattctgccacaccaggggcagatgtttgctttgctcgacaacataacacttctgacaataacaaccagtgtttgctgggagccaatgggaatattttgttgcaccttaaccctcagaaaccaggggctattgataatcagccattagtaactcaagaaccagtaaaggctacatcattaacactagaaggaggacgattaaaacgaactccacagctgattcatggaagagactatgaaatggtcccagaacctgtgtggagagcactttatcactggtatggagcaaacctggccttacctagaccagttatcaagaacagcaagacagacatcccagagctggaattatttccccgctatcttctcttcctgagacagcagcctgccactcggacacagcagtctaacatctgggtgaatatgggaaatgtaccttctccgaatgcacctttaaagcgggtattagcctatacaggctgttttagtcgaatgcagaccatcaaggaaattcacgaatatctatctcaaaggctgcgcattaaagaggaagatatgcgcctgtggctatacaacagtgagaactaccttactcttctggatgatgaggatcataaattggaatatttgaaaatccaggatgaacaacacctggtaattgaagttcgcaacaaagatatgagttggcctgaggagatgtcttttatagcaaatagtagtaaaatagatagacacaaggttcccacagaaaagggagccacaggtctaagcaatctgggaaacacatgcttcatgaactcaagcatccagtgtgttagtaacacacagccactgacacagtattttatctcagggagacatctttatgaactcaacaggacaaatcccattggtatgaaggggcatatggctaaatgctatggtgatttagtgcaggaactttggagtggaactcagaagaatgttgccccattaaagcttcggtggaccatagcaaaatatgctcccaggtttaatgggtttcagcaacaggactcccaagaacttctggcttttctcttggatggtcttcatgaagatcttaatcgagtccatgaaaagccatatgtggaactgaaggacagtgatgggcgaccagactgggaagtagctgcagaggcctgggacaaccatctaagaagaaatagatcaattgttgtggatttgttccatgggcagctaagatctcaagtaaaatgcaagacatgtgggcatataagtgtccgatttgaccctttcaattttttgtctttgccactaccaatggacagttatatgcacttagaaataacagtgattaagttagatggtactacccctgtacggtatggactaagactgaatatggatgaaaagtacacaggtttaaaaaaacagctgagtgatctctgtggacttaattcagaacaaatccttctagcagaagtacatggttccaacataaagaactttcctcaggacaaccaaaaagtacgactctcagtgagtggatttttgtgtgcatttgaaattcctgtccctgtgtctccaatttcagcttctagtccaacacagacagatttctcctcttcgccatctacaaatgaaatgttcaccctaactaccaatggggacctaccccgaccaatattcatccccaatggaatgccaaacactgttgtgccatgtggaactgagaagaacttcacaaatggaatggttaatggtcacatgccatctcttcctgacagcccctttacaggttacatcattgcagtccaccgaaaaatgatgaggacagaactgtatttcctgtcatctcagaagaatcgccccagcctctttggaatgccattgattgttccatgtactgtgcatacccggaagaaagacctatatgatgcggtttggattcaagtatcccggttagcgagcccactcccacctcaggaagctagtaatcatgcccaggattgtgacgacagtatgggctatcaatatccattcactctacgagttgtgcagaaagatgggaactcctgtgcttggtgcccatggtatagattttgcagaggctgtaaaattgattgtggggaagacagagctttcattggaaatgcctatatcgctgtggattgggatcccacagcccttcaccttcgctatcaaacatcccaggaaagggttgtagatgagcatgagagtgtggagcagagtcggcgagcgcaagccgagcccatcaacctggacagctgtctccgtgctttcaccagtgaggaagagctaggggaaaatgagatgtactactgttccaagtgtaagacccactgcttagcaacaaagaagctggatctctggaggcttccacccatcctgattattcaccttaagcgatttcaatttgtaaatggtcggtggataaaatcacagaaaattgtcaaatttcctcgggaaagttttgatccaagtgcttttttggtaccaagagacccggctctctgccagcataaaccactcacaccccagggggatgagctctctgagcccaggattctggcaagggaggtgaagaaagtggatgcgcagagttcggctggggaagaggacgtgctcctgagcaaaagcccatcctcactcagcgctaacatcatcagcagcccgaaaggttctccttcttcatcaagaaaaagtggaaccagctgtccctccagcaaaaacagcagccctaatagcagcccacggactttggggaggagcaaagggaggctccggctgccccagattggcagcaaaaataaactgtcaagtagtaaagagaacttggatgccagcaaagaaaatggggctgggcagatatgtgagctggctgacgccttgagtcgagggcatgtgctggggggcagccaaccagagttggtcactcctcaggaccatgaggtagctttggccaatggattcctttatgagcatgaagcatgtggcaatggctacagcaatggtcagcttggaaaccacagtgaagaagacagcactgatgaccaaagagaagatactcgtattaagcctatttataatctatatgcaatttcgtgccattcaggaattctgggtgggggccattacgtcacttatgccaaaaacccaaactgcaagtggtactgttacaatgacagcagctgtaaggaacttcacccggatgaaattgacaccgactctgcctacattcttttctatgagcagcaggggatagactatgcacaatttctgccaaagactgatggcaaaaagatggcagacacaagcagtatggatgaagactttgagtctgattacaaaaagtactgtgtgttacagtaaagctaccactctggctgctagacagcttggcggtgagggagatgactccttgtagctgacatttggcaaaagcgtcactgaaaggcaagctaaatgtagttattttatcctgtggccctgaagcacaaaataaaaattctaattaaaatagttaactttaagagtagtaatcattttattttgaagtctcatacaagctctccgatagagaactttcaggcagatcccaccattagcctgtaaacaaaaggtttggcaccagccacctgggaccaaataagaattcaattgtgcttgtccagatatgaacaaatatgtagtgagtatagagtttaccataatcataacaaatattaaagatttccttggagtcagagtaaaaaacaaacaattataatgttgtctagggacgacatgatatgctacctcctttttcctgaagttttattccattatattgacaagatggagaaagcaagatcacgaaggtgtgcaaatgattcttaaggcatggacgaggatttttcaatttattttttaaactgtttccataccctttctttgtctttcttgctttttgtttttgccgttgtatttatgtttgagacacaaccagtcattggtggcaggggcatatagtggtcagtctgaaagggaggctctcttaagagctgtgtgccttccacccagagccttgtgggagacccagtagaaagaaacagcatcctgggaaatccagctaccatggccctcccagtggaggcatcttacatttaggatacttcaagtatcctcagaaatgtattctgcacccccggccccacccatgctgagggaaggggagcagttgccaatatttgcaccatcttcacatgcacctgttgcaacaagagcttctgggaaggtaagtggcattggagctagatcacgtttcacaattagtggttgttcttttctgtgtttgtcttgcactttaaaaaagagagaacacatgcaaatgaacttgcttgtgtgtatttgatggctctaagggctataaattacaaacaaaacacatcccagacattaggagttcataagtgtatttaatgaaattggtggttttaggaagtcaactttagttttgctttgtttgcatgtccactaatttttttattttgatatttgtcttttttttaaattttacagtagtcatcgaaagttatgtttctttgcttacttcatttttttctctaatcaagactggaacaaaagtataaatattatttatttcaggtagcatttttttcgtgtagttttttaatatatacttgaaggaaatgtttcaccttatttttggtctttgtttattcatttagaccctgcaagttgattctcattaattgtcagattccactaccctttcttcctcatagatagtaattaccaatgtaactaagtatttgtgttctgatatctgaggccagtaactattaatatctagttctcagagcatttggaaaggttatcttaaatggctacctaaattgaaatccttttcagaaaaaatataattgcaagtaggtaggactggcctaaattgtctaatgtaataaagtcagacaaaatgcatactttatagtttcaagattttcagtatataaaatctgtccattcccattaaaaagtggaagattttaaataatttctttacagatgttttatttaagcaggtagctcaatctactaatgttgtttgatctgtgtttgttatactggttgtaattaatttttttaattcatgaactagcagaaaatttattaaattaactattaactacattcaccttgtaaattactgtataaaacttgttgacaatgcactgactttagaaagatgttaatgtacataaatagagtgtaaataaaatagtgttgatgtaccg

SEQ ID NO: 33547 - DNA, 1843 bp, Homo sapiens
  source 1..1843: mol_type = unassigned DNA
caggctccgaccccccgccgaggggatgaggggagcatgggtgccaaggagtcacggatcggattcctcagctacgaggaggcgctgaggagagttacagatgtagagctaaaacgactgaaggatgctttcaagaggacctgtggactctcatattacatgggccagcactgcttcatccgggaagtgcttggggatggagtgcctccaaaggttgctgaggtgatttactgttcttttggtggaacatccaaagggctgcacttcaataatttaatagttggacttgtcctccttacaagaggcaaagatgaagagaaagcaaaatacatttttagtcttttttcaagtgaatctgggaactatgttatacgggaagaaatggaaagaatgctccacgtggtggatggtaaagtcccagatacactcaggaagtgtttctcagagggtgaaaaggtaaactatgaaaagtttagaaattggctttttctaaacaaagatgcttttactttctctcgatggcttctatctggaggtgtgtatgttaccctcactgatgatagtgatactcctactttctaccaaactctggctggagtcacacatttggaggaatcagacatcattgatcttgagaaacgctattggttattgaaggctcaatcccggactggacgatttgatttagagacatttggcccattggtttcaccacctattcgtccatctctaagtgaaggtttgtttaatgcttttgatgaaaatcgtgacaatcacatagattttaaggagatatcctgtgggttatcagcctgttgcaggggacccctggctgaaagacaaaaattttgcttcaaggtatttgatgttgaccgtgatggagttctctccagggttgaactgagagacatggtggttgcacttttagaagtctggaaggacaaccgcactgatgatattcctgaattacatatggatctctctgatattgtagaaggcatactgaatgcacatgacaccacaaagatgggtcatcttactctggaagactatcagatctggagtgtgaaaaatgttcttgccaatgagtttttgaacctccttttccaggtgtgtcacatagttctggggttaagaccagctactccggaagaagaaggacaaattattaggactctggaaactgaccaaatatatacaagaaattgagaagcatttattcaagaactactaatccttggtgagaacaatggaagtgtgtggtaatttaaccaggagcagctttcatttcctcccatccagcaagtctgcatgggctgtcagtctgattcatgatttgaaggagagcaggaataaatgcctgtccaaggataataaaataaatacataccatcatggtggtaaacagtgagggaaaactgacatcaccagcttggggataaaatactggttaggggaagcagcagactaacaacagaccagtcaaatttttaacagggaacaggatcaccatagtgagccttagcaagctttctcatgtccccagtgatctgtagactgcttgtacaaggctatacacaaactcaggagaaaccaaagtgggctttagcactttattcttccctagttgaaggtgaagccttgcatgtgcagaaagtaaaagccagggtaggcttgtaacctgcccaaactttaaatgcattccccaaaccatgtacagatccatcaggaaaagggtgtgaatgttactggctaaacacaaccagtaaactgctgagagcacaacctctcagcagtcattggctgaccagtaagttaggctcaccccaagaaggccaagctt

SEQ ID NO: 33548 - DNA, 5234 bp, Homo sapiens
  source 1..5234: mol_type = unassigned DNA
agcgcagcgcgaacgctgggtgcggcgcctttaagcgtcgcggtgacacgtgtgtgaggcgccggaggcccggatggtgcgcgtgctgggccgcgggccgaaggagtcgccagggctgcgtaggcttgtggcgcgcccgcggagaggccggggctctgacgcccgctctgcggcttcggtgtttgaacaggccacagtccaggagcgcttacattcaggagctccgcgtagcacctgcccaaccaaactcagccctccgttaagatcctggttccatgccgcagtaggacagcaggcccaagtctgcacatcccagtgatgcaccatgccaatagtggataagttgaaggaggccctgaaacccggccgcaaggactcggctgatgatggagaactggggaagcttcttgcctcctctgccaagaaggtccttttacagaaaatcgagttcgagccagccagcaagagcttctcctaccagctggaggccttaaagagcaaatatgtgttgctcaaccccaaaacagagggagctagtcgccacaagagtggagatgacccaccggccaggagacagggcagtgagcacacgtatgagagctgtggtgacggagtcccagccccgcagaaagtgcttttccccacggagcgactgtctctgaggtgggagcgggtcttccgcgtgggcgcaggactccacaaccttggcaacacctgctttctcaatgccaccatccagtgcttgacctacacaccacctctagccaactacctgctctccaaggagcatgctcgcagctgccaccagggaagcttctgcatgctgtgtgtcatgcagaaccacattgtccaggccttcgccaacagcggcaacgccatcaagcccgtctccttcatccgagacctgaaaaagatcgcccgacacttccgctttgggaaccaggaggacgcgcatgagttcctgcggtacaccatcgacgccatgcagaaagcctgcctgaatggctgtgccaagttggatcgtcaaacgcaggctactaccttggtccatcaaatttttggagggtatctcagatcacgcgtgaagtgctccgtgtgcaagagcgtctcggacacctacgacccctacttggacgtcgcgctggagatccggcaagctgcgaatattgtgcgtgctctggaactttttgtgaaagcagatgtcctgagtggagagaatgcctacatgtgtgctaaatgcaagaagaaggttccagccagcaagcgcttcaccatccacagaacatccaacgtcttaaccctttccctcaagcgctttgccaacttcagcggggggaagatcaccaaggatgtaggctatccggaattcctcaacatacgtccgtatatgtcccagaataatggtgatcctgtcatgtatggactctatgctgtcctggtgcactcgggctacagctgccatgccgggcactattactgctacgtgaaggcaagcaatggacagtggtaccagatgaatgattccttggtccattccagcaacgtcaaggtggttctgaaccagcaggcctacgtgctgttctatctgcgaattccaggctctaagaaaagtcccgagggcctcatctccaggacaggctcctcctcccttcccggccgcccgagtgtgattccagatcactccaagaagaacatcggcaatgggattatttcctccccactgactggaaagcgacaagactctgggacgatgaagaagccgcacaccactgaagagattggtgtgcccatatccaggaatggctccaccctgggcctgaagtcccagaacggctgcattcctccaaagctgccctcggggtccccttcccccaaactctcccagacacccacacacatgccaaccatcctagacgaccctggaaagaaggtgaagaagccagctcctccacagcacttttcccccagaactgctcaggggctgcctgggaccagcaactcgaatagcagcagatctgggagccaaaggcagggctcctgggacagcagggatgttgtcctctctacctcacctaagctcctggctacagccactgccaacgggcatgggctgaaggggaacgacgagagcgctggcctcgacaggaggggctccagcagctccagcccagagcactcggccagcagcgactccaccaaggccccccagacccccaggagtggagcggcccatctctgcgattctcaggaaacgaactgttccaccgctggccactccaaaacgccgccaagtggagcagattctaagacggtgaagctgaagtcccctgtcctgagcaacaccaccactgagcctgcaagcaccatgtctcctccaccagccaaaaaactggccctttctgccaagaaggccagcaccctgtggagggcgaccggcaatgacctccgtccacctcccccctcaccatcctccgacctcacccaccccatgaaaacctctcaccccgtcgttgcctccacttggcccgtccatagagccagggctgtgtcacctgctccccaatcatccagccgcctgcaaccccccttcagcccccaccccacattgctgtccagtacccccaagcccccagggacgtcagaaccacggagctgctcctccatctcgacggcgctgcctcaggtcaacgaggaccttgtgtctcttccacaccagttgccagaggccagtgagcccccccagagcccctctgagaagaggaaaaagacctttgtgggagagccgcagaggctgggctcagagacgcgcctcccacagcacatcagggaggccactgcggctccccacgggaagaggaagaggaagaagaagaagcgcccggaggacacagctgccagcgccctgcaggaggggcagacacagagacagcctgggagccccatgtacaggagggagggccaggcacagctgcccgctgtcagacggcaggaagatggcacacagccacaggtgaatggccagcaggtgggatgtgttacggacggccaccacgcgagcagcaggaagcggaggaggaaaggagcagaaggtcttggtgaagaaggcggcctgcaccaggacccacttcggcacagctgctctcccatgggtgatggtgatccagaggccatggaagagtctccaaggaaaaagaaaaagaaaaaaagaaagcaggagacacagcgggcagtagaagaggatgggcatctcaaatgcccaaggagtgccaagccccaagatgctgttgtccccgagtccagcagctgcgcaccatccgcgaatggctggtgtcctggggaccgcatggggctgagccaggcccctcctgtgtcttggaatggagagcgggagtctgatgtggtccaggaactgctcaaatactcatctgataaagcttacgggagaaaagttctgacctgggatggcaagatgtcggcggtcagtcaggatgctattgaagacagcagacaggcccggactgagaccgtggttgatgactgggacgaagagtttgaccgagggaaggaaaagaaaattaaaaaatttaagagagagaagaggagaaacttcaacgccttccagaaacttcagactcgacggaacttctggtctgtgactcacccagcaaaggctgccagcctcagctatcgccgctgactgtgcccctgtggaaggaggtcggttccgagggggtgggtgtaagggtgaggtgggggtgtgtgtgccgtgtatgtgtgtaggggtgtggtggggtgtggcgtgtgtgtatgatgtatgtgggctgtgtatctggcacatgtgtgttgggtggtgtgtgtggtgtgggcgcgtctgtggtgtgtgtcctagtcacttggagaagggtgtgtgtgggatgcgtgtgtataagggggtgtgtgtgggatgcgtgtgtataagggggtgtgtgtagtgtgtgttgggtgtggggtgtgtacacctggcatctgtggcatgtgttctggtcacttggagaagggcatgtgtggggtgtgtgtgggatgtgggttgtgtgtatatctggcatgtgtcccagtcacttgcagaagggtgacttcttgccagccgcatcgagatgccatgcattgggttcctaggttggactcatacccgagggtggcagtgggaagattcgggtctcgtttctctctgtcaggactaccgtggtttgttctgcagcctcctggagacaaggcgtcccttcccgggagctgtcggtctggatctgagggagctctctgtgtgggctctgctgcgctgggagcctgtcacggtaggagctctcccggtaccagtgtccacagaccgcccaacacagaggctttgaggcttctctagatcggaacctctttggtgacattcccgaccagccctgcaagagaaacgacagtgtgtgtgtgagcagaggtggccgcacacctgctggacatctttgccaggctgtgccttctcatgtttcatagacagtggtctgtgctggcagaggctgctgcccctggttggggctatcaggagagtgggggatggtggccacatgtcccccaggtggtctcccggtgcatagctggtggctctgggcaagccatcccttgcttctcggggctgacgccaccgttgtgtccgagcccgccctcccctgcttcctcagcgggaccccttcatctgttggccttacctgtcctcagaaaggaagaggtgaccccacccagccacctctcccttttatggaactcgagagggtggccctactgtgcaccccttccttgtgagtagctctcaactgtcctggagagcagaggctatttggggtcggaggagccctcgatacctgcgaatacatctgctttccaggctgctgtttattctgagacgactgtgctgtagcttcccttgcagctgcaataacccgcaggtcttcactgaggtggaggctttggggtagaattctccatttattttactacttaatacaaaacatttatttttgaccagtcctgtggcttccattagcaatatgtttcctttcccaaatatgcaaatagtggctttgtttgctcaattttgtgagtgctttggaatttaaatgattgtataactcaagaagattacttttctatgttgctcaagctgtgcctgccaacttgtaacttaataaatacaggaaatcctcagagaa

SEQ ID NO: 33549 - DNA, 1647 bp, Homo sapiens
  source 1..1647: mol_type = unassigned DNA
atgccaatagtggataagttgaaggaggccctgaaacccggccgcaaggactcggctgatgatggagaactggggaagcttcttgcctcctctgccaagaaggtccttttacagaaaatcgagttcgagccagccagcaagagcttctcctaccagctggaggccttaaagagcaaatatgtgttgctcaaccccaaaacagagggagctagtcgccacaagagtggagatgacccaccggccaggagacagggcagtgagcacacgtatgagagctgtggtgacggagtcccagccccgcagaaagtgcttttccccacggagcgactgtctctgaggtgggagcgggtcttccgcgtgggcgcaggactccacaaccttggcaacacctgctttctcaatgccaccatccagtgcttgacctacacaccacctctagccaactacctgctctccaaggagcatgctcgcagctgccaccagggaagcttctgcatgctgtgtgtcatgcagaaccacattgtccaggccttcgccaacagcggcaacgccatcaagcccgtctccttcatccgagacctgaaaaagatcgcccgacacttccgctttgggaaccaggaggacgcgcatgagttcctgcggtacaccatcgacgccatgcagaaagcctgcctgaatggctgtgccaagttggatcgtcaaacgcaggctactaccttggtccatcaaatttttggagggtatctcagatcacgcgtgaagtgctccgtgtgcaagagcgtctcggacacctacgacccctacttggacgtcgcgctggagatccggcaagctgcgaatattgtgcgtgctctggaactttttgtgaaagcagatgtcctgagtggagagaatgcctacatgtgtgctaaatgcaagaagaaggttccagccagcaagcgcttcaccatccacagaacatccaacgtcttaaccctttccctcaagcgctttgccaacttcagcggggggaagatcaccaaggatgtaggctatccggaattcctcaacatacgtccgtatatgtcccagaataatggtgatcctgtcatgtatggactctatgctgtcctggtgcactcgggctacagctgccatgccgggcactattactgctacgtgaaggcaagcaatggacagtggtaccagatgaatgattccttggtccattccagcaacgtcaaggtggttctgaaccagcaggcctacgtgctgttctatctgcgaattccaggctctaagaaaagtcccgagggcctcatctccaggacaggctcctcctcccttcccggccgcccgagtgtgattccagatcactccaagaagaacatcggcaatgggattatttcctccccactgactggaaagcgacaagactctgggacgatgaagaagccgcacaccactgaagagattggtgtgcccatatccaggaatggctccaccctgggcctgaagtcccagaacggctgcattcctccaaagctgccctcggggtccccttcccccaaactctcccagacacccacacacatgccaaccatcctagacgaccctggaaagaaggtgaagaagccagctcctccactgccaacgggcatgggctga

SEQ ID NO: 33550 - DNA, 4656 bp, Homo sapiens
  source 1..4656: mol_type = unassigned DNA
gtcacttttgaagaatggtgggacagtagatggtggcagttgatttttcattttctaactttgcagaataaaaattgaatgatcctgtattggtcccccaagtatttcagagctcccggagtctgggaagtgccatggtaaatagtcacacaggccagatgagagactgaggtgtgcatgttctgtgggaggggaagtgtagcctgcgggtgtggaatggtctgggtggccgtgggaaacgtggagagagccctggaaacagccccgctttgtgccagtgaggagtcggggaagcagctggggagacggggctggagagcctggggagaggggaagctcttctggagggagtgggtgcaccggcgcactgcgcagcctcctagtaaagggcctgcagacccagctggcctcatgcctggaggccttaggcgactctgaggaaggcagttccagagcagtgagtcaggaccagatgcagtgggttgcaagtagaaccaggagcagagactggatgtggtgtattgtttcagaaccttccagcgtgagtagctaccatatggatacgtaggcgtgggaggcgccaggcagccccgggtccgggtgagaagaggccccagagctcagagtgcctcagatcccagttagtgagcggtgcgggggacatgaatgagggcagggctcctgaccccgaagcccacgtctgactccgctgtcctctctgagacgggtgcagagccggggagatttggtcctgtttgtgcctttgttcccacccccacccctcttcccagattggggaccagctgtctgtgaccagcagagaagtggaagggtgggctgggtgggcgccctagctcagggggatgtttggcctcccgcctcactctagatttgggtacttactttttattgagaccaaaaagaaaaggcaacactgggtgaggatacacgtacatttctcggggcttttattttctgtgaagtgggtggcagtgggcattgtgaaggtttgaaatggctactgtgggtagtggggccctgaggaggtcagagctctgcagagagactgccaggcagcgtgggctgaggatggaggttaagggtctgtggtgactcgggtggggggtggagtttcccagcctcacgctgagcttgtgactggtgggcatggggctgctgggatggggccatccctcgtgtcatcttgctgagcccttcccttaaaggctggggtctccttttcaggttggatcgtcaaacgcaggctactaccttggtccatcaaatttttggagggtatctcagatcacgcgtgaagtgctccgtgtgcaagagcgtctcggacacctacgacccctacttggacgtcgcgctggagatccggcaagctgcgaatattgtgcgtgctctggaactttttgtgaaagcagatgtcctgagtggagagaatgcctacatgtgtgctaaatgcaagaagaaggttccagccagcaagcgcttcaccatccacagaacatccaacgtcttaaccctttccctcaagcgctttgccaacttcagcggggggaagatcaccaaggatgtaggctatccggaattcctcaacatacgtccgtatatgtcccagaataatggtgatcctgtcatgtatggactctatgctgtcctggtgcactcgggctacagctgccatgccgggcactattactgctacgtgaaggcaagcaatggacagtggtaccagatgaatgattccttggtccattccagcaacgtcaaggtggttctgaaccagcaggcctacgtgctgttctatctgcgaattccaggctctaagaaaagtcccgagggcctcatctccaggacaggctcctcctcccttcccggccgcccgagtgtgattccagatcactccaagaagaacatcggcaatgggattatttcctccccactgactggaaagcgacaagactctgggacgatgaagaagccgcacaccactgaagagattggtgtgcccatatccaggaatggctccaccctgggcctgaagtcccagaacggctgcattcctccaaagctgccctcggggtccccttcccccaaactctcccagacacccacacacatgccaaccatcctagacgaccctggaaagaaggtgaagaagccagctcctccacagcacttttcccccagaactgctcaggggctgcctgggaccagcaactcgaatagcagcagatctgggagccaaaggcagggctcctgggacagcagggatgttgtcctctctacctcacctaagctcctggctacagccactgccaacgggcatgggctgaaggggaacgacgagagcgctggcctcgacaggaggggctccagcagctccagcccagagcactcggccagcagcgactccaccaaggccccccagacccccaggagtggagcggcccatctctgcgattctcaggaaacgaactgttccaccgctggccactccaaaacgccgccaagtggagcagattctaagacggtgaagctgaagtcccctgtcctgagcaacaccaccactgagcctgcaagcaccatgtctcctccaccagccaaaaaactggccctttctgccaagaaggccagcaccctgtggagggcgaccggcaatgacctccgtccacctcccccctcaccatcctccgacctcacccaccccatgaaaacctctcaccccgtcgttgcctccacttggcccgtccatagagccagggctgtgtcacctgctccccaatcatccagccgcctgcaaccccccttcagcccccaccccacagctgccagcgccctgcaggaggggcagacacagagacagcctgggagccccatgtacaggagggagggccaggcacagctgcccgctgtcagacggcaggaagatggcacacagccacaggtgaatggccagcaggtgggatgtgttacggacggccaccacgcgagcagcaggaagcggaggaggaaaggagcagaaggtcttggtgaagaaggcggcctgcaccaggacccacttcggcacagctgctctcccatgggtgatggtgatccagaggccatggaagagtctccaaggaaaaagaaaaagaaaaaaagaaagcaggagacacagcgggcagtagaagaggatgggcatctcaaatgcccaaggagtgccaagccccaagatgctgttgtccccgagtccagcagctgcgcaccatccgcgaatggctggtgtcctggggaccgcatggggctgagccaggcccctcctgtgtcttggaatggagagcgggagtctgatgtggtccaggaactgctcaaatactcatctgataaagcttacgggagaaaagttctgacctgggatggcaagatgtcggcggtcagtcaggatgctattgaagacagcagacaggcccggactgagaccgtggttgatgactgggacgaagagtttgaccgagggaaggaaaagaaaattaaaaaatttaagagagagaagaggagaaacttcaacgccttccagaaacttcagactcgacggaacttctggtctgtgactcacccagcaaaggctgccagcctcagctatcgccgctgactgtgcccctgtggaaggagcctcctggagacaaggcgtcccttcccgggagctgtcggtctggatctgagggagctctctgtgtgggctctgctgcgctgggagcctgtcacggtaggagctctcccggtaccagtgtccacagaccgcccaacacagaggctttgaggcttctctagatcggaacctctttggtgacattcccgaccagccctgcaagagaaacgacagtgtgtgtgtgagcagaggtggccgcacacctgctggacatctttgccaggctgtgccttctcatgtttcatagacagtggtctgtgctggcagaggctgctgcccctggttggggctatcaggagagtgggggatggtggccacatgtcccccaggtggtctcccggtgcatagctggtggctctgggcaagccatcccttgcttctcggggctgacgccaccgttgtgtccgagcccgccctcccctgcttcctcagcgggaccccttcatctgttggccttacctgtcctcagaaaggaagaggtgaccccacccagccacctctcccttttatggaactcgagagggtggccctactgtgcaccccttccttgtgagtagctctcaactgtcctggagagcagaggctatttggggtcggaggagccctcgatacctgcgaatacatctgctttccaggctgctgtttattctgagacgactgtgctgtagcttcccttgcagctgcaataacccgcaggtcttcactgaggtggaggctttggggtagaattctccatttattttactacttaatacaaaacatttatttttgaccagtcctgtggcttccattagcaatatgtttcctttcccaaatatgcaaatagtggctttgtttgctcaattttgtgagtgctttggaatttaaatgattgtataactcaagaagattacttttctatgttgctcaagctgtgcctgccaacttgtaacttaataaatacaggaaatcctcag

SEQ ID NO: 33551 - DNA, 4504 bp, Homo sapiens
  source 1..4504: mol_type = unassigned DNA
gggtattcccgaggagggtccggggccgggctgtcctcgccggtctccgccgtcccccgggctccgggccggtgatgggggtcgccggggcccgctgtctgtgcaggattcaggtcaacttcggagaggctctgacgcccgctctgcggcttcggtgtttgaacaggccacagtccaggagcgcttacattcaggagctccgcgtagcacctgcccaaccaaactcagccctccgttaagatcctggttccatgccgcagtaggacagcaggcccaagtctgcacatcccagtgatgcaccatgccaatagtggataagttgaaggaggccctgaaacccggccgcaaggactcggctgatgatggagaactggggaagcttcttgcctcctctgccaagaaggtccttttacagaaaatcgagttcgagccagccagcaagagcttctcctaccagctggaggccttaaagagcaaatatgtgttgctcaaccccaaaacagagggagctagtcgccacaagagtggagatgacccaccggccaggagacagggcagtgagcacacgtatgagagctgtggtgacggagtcccagccccgcagaaagtgcttttccccacggagcgactgtctctgaggtgggagcgggtcttccgcgtgggcgcaggactccacaaccttggcaacacctgctttctcaatgccaccatccagtgcttgacctacacaccacctctagccaactacctgctctccaaggagcatgctcgcagctgccaccagggaagcttctgcatgctgtgtgtcatgcagaaccacattgtccaggccttcgccaacagcggcaacgccatcaagcccgtctccttcatccgagacctgaaaaagatcgcccgacacttccgctttgggaaccaggaggacgcgcatgagttcctgcggtacaccatcgacgccatgcagaaagcctgcctgaatggctgtgccaagttggatcgtcaaacgcaggctactaccttggtccatcaaatttttggagggtatctcagatcacgcgtgaagtgctccgtgtgcaagagcgtctcggacacctacgacccctacttggacgtcgcgctggagatccggcaagctgcgaatattgtgcgtgctctggaactttttgtgaaagcagatgtcctgagtggagagaatgcctacatgtgtgctaaatgcaagaagaaggttccagccagcaagcgcttcaccatccacagaacatccaacgtcttaaccctttccctcaagcgctttgccaacttcagcggggggaagatcaccaaggatgtaggctatccggaattcctcaacatacgtccgtatatgtcccagaataatggtgatcctgtcatgtatggactctatgctgtcctggtgcactcgggctacagctgccatgccgggcactattactgctacgtgaaggcaagcaatggacagtggtaccagatgaatgattccttggtccattccagcaacgtcaaggtggttctgaaccagcaggcctacgtgctgttctatctgcgaattccaggctctaagaaaagtcccgagggcctcatctccaggacaggctcctcctcccttcccggccgcccgagtgtgattccagatcactccaagaagaacatcggcaatgggattatttcctccccactgactggaaagcgacaagactctgggacgatgaagaagccgcacaccactgaagagattggtgtgcccatatccaggaatggctccaccctgggcctgaagtcccagaacggctgcattcctccaaagctgccctcggggtccccttcccccaaactctcccagacacccacacacatgccaaccatcctagacgaccctggaaagaaggtgaagaagccagctcctccacagcacttttcccccagaactgctcaggggctgcctgggaccagcaactcgaatagcagcagatctgggagccaaaggcagggctcctgggacagcagggatgttgtcctctctacctcacctaagctcctggctacagccactgccaacgggcatgggctgaaggggaacgacgagagcgctggcctcgacaggaggggctccagcagctccagcccagagcactcggccagcagcgactccaccaaggccccccagacccccaggagtggagcggcccatctctgcgattctcaggaaacgaactgttccaccgctggccactccaaaacgccgccaagtggagcagattctaagacggtgaagctgaagtcccctgtcctgagcaacaccaccactgagcctgcaagcaccatgtctcctccaccagccaaaaaactggccctttctgccaagaaggccagcaccctgtggagggcgaccggcaatgacctccgtccacctcccccctcaccatcctccgacctcacccaccccatgaaaacctctcaccccgtcgttgcctccacttggcccgtccatagagccagggctgtgtcacctgctccccaatcatccagccgcctgcaaccccccttcagcccccaccccacattgctgtccagtacccccaagcccccagggacgtcagaaccacggagctgctcctccatctcgacggcgctgcctcaggtcaacgaggaccttgtgtctcttccacaccagttgccagaggccagtgagcccccccagagcccctctgagaagaggaaaaagacctttgtgggagagccgcagaggctgggctcagagacgcgcctcccacagcacatcagggaggccactgcggctccccacgggaagaggaagaggaagaagaagaagcgcccggaggacacagctgccagcgccctgcaggaggggcagacacagagacagcctgggagccccatgtacaggagggagggccaggcacagctgcccgctgtcagacggcaggaagatggcacacagccacaggtgaatggccagcaggtgggatgtgttacggacggccaccacgcgagcagcaggaagcggaggaggaaaggagcagaaggtcttggtgaagaaggcggcctgcaccaggacccacttcggcacagctgctctcccatgggtgatggtgatccagaggccatggaagagtctccaaggaaaaagaaaaagaaaaaaagaaagcaggagacacagcgggcagtagaagaggatgggcatctcaaatgcccaaggagtgccaagccccaagatgctgttgtccccgagtccagcagctgcgcaccatccgcgaatggctggtgtcctggggaccgcatggggctgagccaggcccctcctgtgtcttggaatggagagcgggagtctgatgtggtccaggaactgctcaaatactcatctgataaagcttacgggagaaaagttctgacctgggatggcaagatgtcggcggtcagtcaggatgctattgaagacagcagacaggcccggactgagaccgtggttgatgactgggacgaagagtttgaccgagggaaggaaaagaaaattaaaaaatttaagagagagaagaggagaaacttcaacgccttccagaaacttcagactcgacggaacttctggtctgtgactcacccagcaaaggctgccagcctcagctatcgccgctgactgtgcccctgtggaaggagcctcctggagacaaggcgtcccttcccgggagctgtcggtctggatctgagggagctctctgtgtgggctctgctgcgctgggagcctgtcacggtaggagctctcccggtaccagtgtccacagaccgcccaacacagaggctttgaggcttctctagatcggaacctctttggtgacattcccgaccagccctgcaagagaaacgacagtgtgtgtgtgagcagaggtggccgcacacctgctggacatctttgccaggctgtgccttctcatgtttcatagacagtggtctgtgctggcagaggctgctgcccctggttggggctatcaggagagtgggggatggtggccacatgtcccccaggtggtctcccggtgcatagctggtggctctgggcaagccatcccttgcttctcggggctgacgccaccgttgtgtccgagcccgccctcccctgcttcctcagcgggaccccttcatctgttggccttacctgtcctcagaaaggaagaggtgaccccacccagccacctctcccttttatggaactcgagagggtggccctactgtgcaccccttccttgtgagtagctctcaactgtcctggagagcagaggctatttggggtcggaggagccctcgatacctgcgaatacatctgctttccaggctgctgtttattctgagacgactgtgctgtagcttcccttgcagctgcaataacccgcaggtcttcactgaggtggaggctttggggtagaattctccatttattttactacttaatacaaaacatttatttttgacc

SEQ ID NO: 33552 - DNA, 2177 bp, Homo sapiens
  source 1..2177: mol_type = unassigned DNA
ggtagtggagatgtccggccggtctaagcgggagtctcgcggttccactcgcgggaagcgagagtctgagtcgcggggcagctccggtcgcgtcaagcgggagcgagatcgggagcgggagcctgaggcggcgagctcccggggcagccctgtgcgcgtgaagcgggagttcgagccggcgagcgcgcgcgaggccccggcttctgttgtcccgtttgtgcgggtgaagcgggagcgcgaggtcgatgaggactcggagcctgagcgggaggtgcgagcaaagaatggccgagtggattctgaggaccggaggagccgccactgcccgtacctggacaccattaacaggagtgtgctggactttgactttgagaaactgtgttctatctccctctcacacatcaatgcttatgcctgtctggtgtgtggcaagtactttcaaggccggggtttgaagtctcacgcctacattcacagtgtccagtttagccaccatgttttcctcaacctccacaccctcaagttttactgccttccagacaactatgagatcatcgattcctcattggaggatatcacgtatgtgttgaagcccactttcacaaagcagcaaattgcaaacttggacaagcaagccaaattgtcccgggcatatgatggtaccacttacctgccgggtattgtgggactgaataacataaaggccaatgattatgccaacgctgtccttcaggctctatctaatgttcctcctctccggaactactttctggaagaagacaattataagaacatcaaacgtcctccaggggatatcatgttcttgttggtccagcgttttggagagctgatgagaaagctctggaaccctcgaaatttcaaggcacatgtgtctccccatgagatgcttcaggcagttgtactttgcagtaagaagacttttcagatcaccaaacaaggagatggcgttgactttctgtcttggtttctgaatgctctgcactcagctctggggggcacaaagaagaaaaagaagactattgtgactgatgttttccaggggtccatgaggatcttcactaaaaagcttccccatcctgatctgccagcagaagaaaaagagcagttgctccataatgacgagtaccaggagacaatggtggagtccacttttatgtacctgacgctggaccttcctactgcccccctctacaaggacgagaaggagcagctcatcattccccaagtgccactcttcaacatcctggctaagttcaatggcatcactgagaaggaatataagacttacaaggagaactttctgaagcgcttccagcttaccaagttgcctccatatctaatcttttgtatcaagagattcactaagaacaacttctttgttgagaagaatccaactattgtcaatttccctattacaaatgtggatctgagagaatacttgtctgaagaagtacaagcagtacacaagaataccacctatgacctcattgccaacatcgtgcatgacggcaagccctccgagggctcctaccggatccacgtgcttcatcatgggacaggcaaatggtatgaattacaagacctccaggtgactgacatccttccccagatgatcacactgtcagaggcttacattcagatttggaagaggcgagataatgatgaaaccaaccagcagggggcttgaaggaggcgtctagggctttgctcccaagggctgtggctgatgatggtaaataagaacacagaagctgtagctgaacacaggctggctggtgggcttcctaggccagcccagcttgtatgggttctggctacaccagagcaccaagagcccacttgcctgggatggccccacactgtcactcagctgttctttgatcatttttttctagattgatgctcctttctcccatgcattgagctcccatctagcttcagcagggcagaacccttctccagatgtgtgtaacttatgtcttgagtatctgggagtagttgaagaacagataattccttccaaacatcaagccttgggattcttggagcaagcagaaagccagtaacttcgctctgttagaggtggaggattttcctatggttccccccatttcctgatttgtatttttagatggattaaatagtctcctgttttt

SEQ ID NO: 33553 - DNA, 2034 bp, Homo sapiens
  source 1..2034: mol_type = unassigned DNA
cgctggacgactcggccggtagtggagatgtccggccggtctaagcgggagtctcgcggttccactcgcgggaagcgagagtctgagtcgcggggcagctccggtcgcgtcaagcgggagcgagatcgggagcgggagcctgaggcggcgagctcccggggcagccctgtgcgcgtgaagcgggagttcgagccggcgagcgcgcgcgaggccccggcttctgttgtcccgtttgtgcgggtgaagcgggagcgcgaggtcgatgaggactcggagcctgagcgggaggtgcgagcaaagaatggccgagtggattctgaggaccggaggagccgccactgcccgtacctggacaccattaacaggagtgtgctggactttgactttgagaaactgtgttctatctccctctcacacatcaatgcttatgcctgtctggtgtgtggcaagtactttcaaggccggggtttgaagtctcacgcctacattcacagtgtccagtttagccaccatgttttcctcaacctccacaccctcaagttttactgccttccagacaactatgagatcatcgattcctcattggaggatatcacgtatgtgttgaagcccactttcacaaagcagcaaattgcaaacttggacaagcaagccaaattgtcccgggcatatgatggtaccacttacctgccgggtattgtgggactgaataacataaaggccaatgattatgccaacgctgtccttcaggctctatctaatgttcctcctctccggaactactttctggaagaagacaattataagaacatcaaacgtcctccaggggatatcatgttcttgttggtccagcgttttggagagctgatgagaaagctctggaaccctcgaaatttcaaggcacatgtgtctccccatgagatgcttcaggcagttgtactttgcagtaagaagacttttcagatcaccaaacaaggagatggcgttgactttctgtcttggtttctgaatgctctgcactcagctctggggggcacaaagaagaaaaagaagactattgtgactgatgttttccaggggtccatgaggatcttcactaaaaagcttccccatcctgatctgccagcagaagaaaaagagcagttgctccataatgacgagtaccaggagacaatggtggagtccacttttatgtacctgacgctggaccttcctactgcccccctctacaaggacgagaaggagcagctcatcattccccaagtgccactcttcaacatcctggctaagttcaatggcatcactgagaaggaatataagacttacaaggagaactttctgaagcgcttccagcttaccaagttgcctccatatctaatcttttgtatcaagagattcactaagaacaacttctttgttgagaagaatccaactattgtcaatttccctattacaaatgtggatctgagagaatacttgtctgaagaagtacaagcagtacacaagaataccacctatgacctcattgccaacatcgtgcatgacggcaagccctccgagggctcctaccggatccacgtgcttcatcatgggacaggcaaatggtatgaattacaagacctccaggtgactgacatccttccccagatgatcacactgtcagaggcttacattcagatttggaagaggcgagataatgatgaaaccaaccagcagggggcttgaaggaggcgtctagggctttgctcccaagggctgtggctgatgatgattgatgctcctttctcccatgcattgagctcccatctagcttcagcagggcagaacccttctccagatgtgtgtaacttatgtcttgagtatctgggagtagttgaagaacagataattccttccaaacatcaagccttgggattcttggagcaagcagaaagccagtaacttcgctctgttagaggtggaggattttcctatggttccccccatttcctgatttgtatttttagatggattaaatagtctcctgtttttaaa

SEQ ID NO: 33554 - DNA, 2026 bp, Homo sapiens
  source 1..2026: mol_type = unassigned DNA
gaggccccggcctggccaagcgatgcagcgcacggagttttcgggtctggtcgggtcgggtggagtagggtatgcttgacttccaccccccggacggagggcttttgtttttgtttttttttgtttgttttttcgtaacatatcaataggaaacaaggacttcggcttacagctgataccagaaccttcagaaaaatgcaaatcatctataacacaactcgatgcttacggcggtgccttcccatcttttttctgcaaagaatggccgagtggattctgaggaccggaggagccgccactgcccgtacctggacaccattaacagcttttcacccttccctacaggccggggtttgaagtctcacgcctacattcacagtgtccagtttagccaccatgttttcctcaacctccacaccctcaagttttactgccttccagacaactatgagatcatcgattcctcattggaggatatcacgtatgtgttgaagcccactttcacaaagcagcaaattgcaaacttggacaagcaagccaaattgtcccgggcatatgatggtaccacttacctgccgggtattgtgggactgaataacataaaggccaatgattatgccaacgctgtccttcaggctctatctaatgttcctcctctccggaactactttctggaagaagacaattataagaacatcaaacgtcctccaggggatatcatgttcttgttggtccagcgttttggagagctgatgagaaagctctggaaccctcgaaatttcaaggcacatgtgtctccccatgagatgcttcaggcagttgtactttgcagtaagaagacttttcagatcaccaaacaaggagatggcgttgactttctgtcttggtttctgaatgctctgcactcagctctggggggcacaaagaagaaaaagaagactattgtgactgatgttttccaggggtccatgaggatcttcactaaaaagcttccccatcctgatctgccagcagaagaaaaagagcagttgctccataatgacgagtaccaggagacaatggtggagtccacttttatgtacctgacgctggaccttcctactgcccccctctacaaggacgagaaggagcagctcatcattccccaagtgccactcttcaacatcctggctaagttcaatggcatcactgagaaggaatataagacttacaaggagaactttctgaagcgcttccagcttaccaagttgcctccatatctaatcttttgtatcaagagattcactaagaacaacttctttgttgagaagaatccaactattgtcaatttccctattacaaatgtggatctgagagaatacttgtctgaagaagtacaagcagtacacaagaataccacctatgacctcattgccaacatcgtgcatgacggcaagccctccgagggctcctaccggatccacgtgcttcatcatgggacaggcaaatggtatgaattacaagacctccaggtgactgacatccttccccagatgatcacactgtcagaggcttacattcagatttggaagaggcgagataatgatgaaaccaaccagcagggggcttgaaggaggcgtctagggctttgctcccaagggctgtggctgatgatggtaaataagaacacagaagctgtagctgaacacaggctggctggtgggcttcctaggccagcccagcttgtatgggttctggctacaccagagcaccaagagcccacttgcctgggatggccccacactgtcactcagctgttctttgatcatttttttctagattgatgctcctttctcccatgcattgagctcccatctagcttcagcagggcagaacccttctccagatgtgtgtaacttatgtcttgagtatctgggagtagttgaagaacagataattccttccaaacatcaagccttgggattcttggagcaagcagaaagccagtaacttcgctctgttagaggtggaggattttcctatggtt

SEQ ID NO: 33555 - DNA, 2033 bp, Homo sapiens
  source 1..2033: mol_type = unassigned DNA
agatgtccggccggtctaagcgggagtctcgcggttccactcgcgggaagcgagagtctgagtcgcggggcagctccggtcgcgtcaagcgggagcgagatcgggagcgggagcctgaggcggcgagctcccggggcagccctgtgcgcgtgaagcgggagttcgagccggcgagcgcgcgcgaggccccggcttctgttgtcccgtttgtgcgggtgaagcgggagcgcgaggtcgatgaggactcggagcctgagcgggaggtgcgagcaaagaatggccgagtggattctgaggaccggaggagccgccactgcccgtacctggacaccattaacaggagtgtgctggactttgactttgagaaactgtgttctatctccctctcacacatcaatgcttatgcctgtctggtgtgtggcaagtactttcaaggccggggtttgaagtctcacgcctacattcacagtgtccagtttagccaccatgttttcctcaacctccacaccctcaagttttactgccttccagacaactatgagatcatcgattcctcattggaggatatcacgtatgtgttgaagcccactttcacaaagcagcaaattgcaaacttggacaagcaagccaaattgtcccgggcatatgatggtaccacttacctgccgggtattgtgggactgaataacataaaggccaatgattatgccaacgctgtccttcaggctctatctaatgttcctcctctccggaactactttctggaagaagacaattataagaacatcaaacgtcctccaggggatatcatgttcttgttggtccagcgttttggagagctgatgagaaagctctggaaccctcgaaatttcaaggcacatgtgtctccccatgagatgcttcaggcagttgtactttgcagtaagaagacttttcagatcaccaaacaaggagatggcgttgactttctgtcttggtttctgaatgctctgcactcagctctggggggcacaaagaagaaaaagaagactattgtgactgatgttttccaggggtccatgaggatcttcactaaaaagcttccccatcctgatctgccagcagaagaaaaagagcagttgctccataatgacgagtaccaggagacaatggtggagtccacttttatgtacctgacgctggaccttcctactgcccccctctacaaggacgagaaggagcagctcatcattccccaagtgccactcttcaacatcctggctaagttcaatggcatcactgagaaggaatataagacttacaaggagaactttctgaagcgcttccagcttaccaagttgcctccatatctaatcttttgtatcaagagattcactaagaacaacttctttgttgagaagaatccaactattgtcaatttccctattacgggacaggcaaatggtatgaattacaagacctccaggtgactgacatccttccccagatgatcacactgtcagaggcttacattcagatttggaagaggcgagataatgatgaaaccaaccagcagggggcttgaaggaggcgtctagggctttgctcccaagggctgtggctgatgatggtaaataagaacacagaagctgtagctgaacacaggctggctggtgggcttcctaggccagcccagcttgtatgggttctggctacaccagagcaccaagagcccacttgcctgggatggccccacactgtcactcagctgttctttgatcatttttttctagattgatgctcctttctcccatgcattgagctcccatctagcttcagcagggcagaacccttctccagatgtgtgtaacttatgtcttgagtatctgggagtagttgaagaacagataattccttccaaacatcaagccttgggattcttggagcaagcagaaagccagtaacttcgctctgttagaggtggaggattttcctatggttccccccatttcctgatttgtatttttagatggattaaatagtctcctgttttt

SEQ ID NO: 33556 - DNA, 3126 bp, Homo sapiens
  source 1..3126: mol_type = unassigned DNA
cgcgcggggcggatgtccgggccggctgggccggggccgcggaggagatggcggaaggtggaggctgccgtgagcgaccggatgcggagactcagaagtccgagcttggacccttaatgaggaccacactccaacgcggggcgcagtggtatcttattgacagccggtggttcaagcagtggaagaagtatgtgggctttgacagctgggacatgtacaatgtgggtgaacataacctatttcctggcccaatagacaactctgggctattttcagatcctgagagtcagaccttgaaagaacacttaattgatgaattggactatgtattggtccctaccgaggcgtggaataaactactaaactggtacggctgtgtagaaggccagcaacccatcgtcagaaaagttgtggagcatggcctgtttgtcaagcactgcaaagtcgaggtgtatttgctggaactgaagctctgtgagaacagtgaccccaccaatgtgctgagttgccatttcagcaaggcagacaccattgcaaccatcgagaaagagatgcggaagctattcaacatccctgcggagcgtgaaacacggctctggaacaaatacatgagcaacacctacgagcagttgagcaagctagacaacactgtccaggatgctgggctataccagggtcaggtgctagtaattgagcctcaaaatgaagatggcacatggcccaggcagaccttgcagtcaaaatcaagcactgcgcctagcagaaattttactacctctccaaaatcatcagcaagtccctattcctcagtgtctgcctctctcattgcaaatggtgatagcactagcacctgtgggatgcacagttccggtgtcagcaggggtggatctggcttttctgcttcgtataattgtcaggagccaccatcctctcatatacaacctgggctctgtggacttggaaacctgggaaacacctgcttcatgaactccgctttgcagtgtttgagcaacactgcaccactgactgactactttctcaaagatgagtatgaagccgaaatcaacagagacaaccctctggggatgaaaggggaaattgcagaagcctatgctgaactcattaagcagatgtggtctggaagggacgcccatgtggcacctcgcatgttcaaaactcaagtaggacgttttgctcctcaattttctggctaccagcaacaagattctcaggagctgctggcctttcttctagatggattgcatgaagatctgaaccgggtaaagaaaaagccctacttggagctgaaggatgccaatgggcggccagatgcggtggtggcaaaggaagcctgggagaatcacaggttgaggaatgattctgtgattgtggatactttccatggcctcttcaaatctactttggtttgcccagaatgtgctaaggtttctgtgacctttgacccattttgctatctaacgctgccactgcccttgaagaaagatcgagttatggaggttttcctggttcctgctgaccctcactgcagacctactcagtaccgtgtgactgtgccgctgatgggggctgtgtccgacctgtgcgaggctctctccaggctgtctggcattgctgcagaaaatatggtggtcgcagatgtgtataatcaccgattccacaaaattttccaaatggatgaaggtttaaaccacatcatgcctcgggatgacattttcgtgtacgaggtctgcagcacttccgtggatggctcggaatgtgtcacgcttccagtctacttcagggagaggaagtccaggccatcaagcacttcctccgcatcagcgctatatgggcagccactattgctttctgtccccaagcacaagttaacccttgagtctttgtaccaggctgtttgtgatcgtatcagccgctatgtgaaacagcctttacctgatgagtttggcagctcacccttggagccaggggcctgcaatggctccaggaacagctgtgaaggagaagatgaggaagaaatggagcatcaggaagaaggcaaagagcagctttcagaaacagaaggcagtggggaagatgagccaggaaatgaccccagtgagaccacccaaaagaagatcaaaggccagccctgcccaaaaaggctttttaccttcagtcttgtgaactcctatggaacagctgacataaattcacttgcagctgatggaaaactacttaaactcaactctcgatctacactggccatggattgggacagtgaaactcggagactttactatgatgagcaagaatctgaggcctacgagaagcatgtgagcatgttgcagcctcagaagaagaagaagaccacagtggccctgagagactgcatcgagctcttcaccaccatggagacccttggggagcatgacccctggtactgtcccaactgtaagaagcatcaacaggccacaaaaaagtttgacctatggtccttgcccaagatcctggtggtccacctcaaacgtttctcctacaacagatactggagggataagctcgacacagtcgtagaattcccaatcagagggctgaacatgtccgagtttgtctgtaacctgtcagcaaggccttatgtgtacgacctcattgccgtgtccaatcattatggagccatgggggttggccactacactgcatatgcgaagaacaaactgaatggtaaatggtattactttgatgatagcaacgtgtccctggcctctgaggatcagatagtgactaaagcagcttatgtgctattttaccaacgtcgagatgatgaattttataagacaccttcacttagcagttctggttcctctgatggagggacacgaccaagcagctctcagcagggctttggggatgatgaggcttgcagcatggacaccaactaatgctgactccacgatcctgccaccctgtagcgccagtgtaatcccccaggagaacatctttgacactctgcagactgctagtgttctgtctaaaaaccagacaaggaaatacccttcttttatgagcagaaggaaacaaaaaaaaaaaaagaagaccgtttacctagaagaagctatgtcaagaggc

SEQ ID NO: 33557 - DNA, 3222 bp, Homo sapiens
  source 1..3222: mol_type = unassigned DNA
gcggaggagatggcggaaggtggaggctgccgtgagcgaccggatgcggagactcagaagtccgagcttggacccttaatgaggaccacactccaacgcggggcgcagtggtatcttattgacagccggtggttcaagcagtggaagaagtatgtgggctttgacagctgggacatgtacaatgtgggtgaacataacctatttcctggcccaatagacaactctgggctattttcagatcctgagagtcagaccttgaaagaacacttaattgatgaattggactatgtattggtccctaccgaggcgtggaataaactactaaactggtacggctgtgtagaaggccagcaacccatcgtcagaaaagttgtggagcatggcctgtttgtcaagcactgcaaagtcgaggtgtatttgctggaactgaagctctgtgagaacagtgaccccaccaatgtgctgagttgccatttcagcaaggcagacaccattgcaaccatcgagaaagagatgcggaagctattcaacatccctgcggagcgtgaaacacggctctggaacaaatacatgagcaacacctacgagcagttgagcaagctagacaacactgtccaggatgctgggctataccagggtcaggtgctagtaattgagcctcaaaatgaagatggcacatggcccaggcagaccttgcagtcaaatggatctggcttttctgcttcgtataattgtcaggagccaccatcctctcatatacaacctgggctctgtggacttggaaacctgggaaacacctgcttcatgaactccgctttgcagtgtttgagcaacactgcaccactgactgactactttctcaaagatgagtatgaagccgaaatcaacagagacaaccctctggggatgaaaggggaaattgcagaagcctatgctgaactcattaagcagatgtggtctggaagggacgcccatgtggcacctcgcatgttcaaaactcaagtaggacgttttgctcctcaattttctggctaccagcaacaagattctcaggagctgctggcctttcttctagatggattgcatgaagatctgaaccgggtaaagaaaaagccctacttggagctgaaggatgccaatgggcggccagatgcggtggtggcaaaggaagcctgggagaatcacaggttgaggaatgattctgtgattgtggatactttccatggcctcttcaaatctactttggtttgcccagaatgtgctaaggtttctgtgacctttgacccattttgctatctaacgctgccactgcccttgaagaaagatcgagttatggaggttttcctggttcctgctgaccctcactgcagacctactcagtaccgtgtgactgtgccgctgatgggggctgtgtccgacctgtgcgaggctctctccaggctgtctggcattgctgcagaaaatatggtggtcgcagatgtgtataatcaccgattccacaaaattttccaaatggatgaaggtttaaaccacatcatgcctcgggatgacattttcgtgtacgaggtctgcagcacttccgtggatggctcggaatgtgtcacgcttccagtctacttcagggagaggaagtccaggccatcaagcacttcctccgcatcagcgctatatgggcagccactattgctttctgtccccaagcacaagttaacccttgagtctttgtaccaggctgtttgtgatcgtatcagccgctatgtgaaacagcctttacctgatgagtttggcagctcacccttggagccaggggcctgcaatggctccaggaacagctgtgaaggagaagatgaggaagaaatggagcatcaggaagaaggcaaagagcagctttcagaaacagaaggcagtggggaagatgagccaggaaatgaccccagtgagaccacccaaaagaagatcaaaggccagccctgcccaaaaaggctttttaccttcagtcttgtgaactcctatggaacagctgacataaattcacttgcagctgatggaaaactacttaaactcaactctcgatctacactggccatggattgggacagtgaaactcggagactttactatgatgagcaagaatctgaggcctacgagaagcatgtgagcatgttgcagcctcagaagaagaagaagaccacagtggccctgagagactgcatcgagctcttcaccaccatggagacccttggggagcatgacccctggtactgtcccaactgtaagaagcatcaacaggccacaaaaaagtttgacctatggtccttgcccaagatcctggtggtccacctcaaacgtttctcctacaacagatactggagggataagctcgacacagtcgtagaattcccaatcagagggctgaacatgtccgagtttgtctgtaacctgtcagcaaggccttatgtgtacgacctcattgccgtgtccaatcattatggagccatgggggttggccactacactgcatatgcgaagaacaaactgaatggtaaatggtattactttgatgatagcaacgtgtccctggcctctgaggatcagatagtgactaaagcagcttatgtgctattttaccaacgtcgagatgatgaattttataagacaccttcacttagcagttctggttcctctgatggagggacacgaccaagcagctctcagcagggctttggggatgatgaggcttgcagcatggacaccaactaatgctgactccacgatcctgccaccctgtagcgccagtgtaatcccccaggagaacatctttgacactctgcagactgctagtgttctgtctaaaaaccagacaaggaaatacccttcttttatgagcagaaggaaacaaaaaaaaaaaaagaagaccgtttacctagaagaagctatgtcaagaggctgaattatttttatttttaaacaggtggtgagaaatttctgtgaaacctgtgaagctgaaaagggggtgggatgggggtactcaatggagtatgtctgatggatcccgaagaatggagaggaacacaggcgctgagtatggagcagcctggagacccaccccacctgcagggctgccctgagcgcctggatttctggttctgatgccaatactagtcaccccaagtagtctgctcacagtaacccaaacctcaagtaaactcccctttccctcgc

SEQ ID NO: 33558 - DNA, 1536 bp, Homo sapiens
  source 1..1536: mol_type = unassigned DNA
gccgcggaggagatggcggaaggtggaggctgccgtgagcgaccggatgcggagactcagaagtccgagcttggacccttaatgaggaccacactccaacgcggggcgcagtggtatcttattgacagccggtggttcaagcagtggaagaagtatgtgggctttgacagctgggacatgtacaatgtgggtgaacataacctatttcctggcccaatagacaactctgggctattttcagatcctgagagtcagaccttgaaagaacacttaattgatgaattggactatgtattggtccctaccgaggcgtggaataaactactaaactggtacggctgtgtagaaggccagcaacccatcgtcagaaaagttgtggagcatggcctgtttgtcaagcactgcaaagtcgaggtgtatttgctggaactgaagctctgtgagaacagtgaccccaccaatgtgctgagttgccatttcagcaaggcagacaccattgcaaccatcgagaaagagatgcggaagctattcaacatccctgcggagcgtgaaacacggctctggaacaaatacatgagcaacacctacgagcagttgagcaagctagacaacactgtccaggatgctgggctataccagggtcaggtgctagtaattgagcctcaaaatgaagatggcacatggcccaggcagaccttgcagtcaaaagtttcgttctttttgcccaggctggagtgcaatggcgcgatcttggctcactgcaacttctgcctcccgggttcaagcaattctcctgcctcagcttcccgagtagcgccatcacatctggctaatttttttttttttgagatggagtctcactctgtcaccaagctggagtgcggtggtgcagtctcggcttactcccgggttcaagtgatgcttctgccccagcctcccgagtggctgggatgacaggcgcccgccaccatgtccagataatttttgtatttttagtagagatgtggtttcactgtgtcttgaactcctgacctcatggccaggctggtcttgaattcctgaccttgtgatcgtgacctcatgatccgccagcctcggcctcccaaagtgctgggattacaagggtgagccacctcacccagcctaattttgtatttttagtagtgacggggtttctccatgttggtcaggctggtctcaaactcctgacctcaggtgatccgtctgcctcggcctcccaaagtgctgagattacaggcatgagccaccacgcgcgacctggctaatttcttttgcattttagtagagacagggtttcactgtgttgcccaggctggtctcgaactcctgagctcaggcaatctgcctgcctcagcctcccaaagtactaggattacaggcacgagccactgcgcctggtcagccttgtggtttttcacactgaaagggtatgtggtggtgtggactgatgtgacaggaagaccagttaatttgtggactctcacttaaataaagtttaccttgaagtagtatgaa

SEQ ID NO: 33559 - DNA, 4022 bp, Homo sapiens
  source 1..4022: mol_type = unassigned DNA
gacttcaggaaagcagtttccaggaggtgagagtttaagccaaacctgaaagaggttgatttgtaatgatttgcaggggggcactggaggcagccgccaggacttttcacttaggagatcagcatttgccctgatggaaactgggcgatcctgcagggactgacctctgagttatccaaaggccgacctggggaaagactgattttgaggttttaatagttttcagatgcttcaagtgttgtgaacagagacttgtttggattatgcatttctcagctagactaaataaatgctagcaatggatacgtgcaaacatgttgggcagctgcagcttgctcaagaccattccagcctcaaccctcagaaatggcactgtgtggactgcaacacgaccgagtccatttgggcttgccttagctgctcccatgttgcctgtggaagatatattgaagagcatgcactcaagcactttcaagaaagcagtcatcctgttgcattggaggtgaatgagatgtacgttttttgttacctttgtgatgattatgttctgaatgataacacaactggagacctgaagttactacgacgtacattaagtgccatcaaaagtcaaaattatcactgcacaactcgtagtgggaggtttttacggtccatgggtacaggtgatgattcttatttcttacatgacggtgcccaatctctgcttcaaagtgaagatcaactgtatactgctctttggcacaggagaaggatactaatgggtaaaatctttcgaacatggtttgaacaatcacccattggaagaaaaaagcaagaagaaccatttcaggaaaaaatagtagtaaaaagagaagtaaagaaaagacggcaggaattggagtatcaagttaaagcagaattggaaagtatgcctccaagaaagagtttacgtttacaagggctcgctcagtcgaccataatagaaatagtttctgttcaggtgccagcacaaacgccagcatcaccagcaaaagataaagtactctctacctcagaaaatgaaatatctcaaaaagtcagtgactcctcagttaaacgaaggccaatagtaactcctggtgtaacaggattgagaaatttgggaaatacttgctatatgaattctgttcttcaggtgttgagtcatttacttatttttcgacaatgttttttaaagcttgatctgaaccaatggctggctatgactgctagcgagaagacaagatcttgtaagcatccaccagtcacagatacagtagtatatcaaatgaatgaatgtcaggaaaaagatacaggttttgtttgctccagacaatcaagtctgtcatcaggactaagtggtggagcatcaaaaggtagaaagatggaacttattcagccaaaggagccaacttcacagtacatttctctttgtcatgaattgcatactttgttccaagtcatgtggtctggaaagtgggcgttggtctcaccatttgctatgctacactcagtgtggagactcattcctgcctttcgtggttacgcccaacaagacgctcaggaatttctttgtgaacttttagataaaatacaacgtgaattagagacaactggtaccagtttaccagctcttatccccacttctcaaaggaaactcatcaaacaagttctgaatgttgtaaataacatttttcatggacaacttcttagtcaggttacatgtcttgcatgtgacaacaaatcaaataccatagaacctttctgggacttgtcattggagtttccagaaaggtatcaatgcagtggaaaagatattgcttcccagccatgtctggttactgaaatgttggccaaatttacagaaactgaagctttagaaggaaaaatctacgtatgtgaccagtgtaactcaaagcgtagaaggttttcctccaaaccagttgtactcacagaagcccagaaacaacttatgatatgccacctacctcaggttctcagactgcacctcaaacgattcaggtggtcaggacgtaataaccgagagaagattggtgttcatgttggctttgaggaaatcttaaacatggagccctattgctgcagggagaccctgaaatccctcagaccagaatgctttatctatgacttgtccgcggtggtgatgcaccatgggaaaggatttggctcagggcactacactgcctactgctataattctgaaggagggttctgggtacactgcaatgattccaaactaagcatgtgcactatggatgaagtatgcaaggctcaagcttatatcttgttttatacccaacgagttactgagaatggacattctaaacttttgcctccagagctcctgttggggagccaacatcccaatgaagacgctgatacctcgtctaatgaaatccttagctgatccaaagacaatggggttttcttcctgtgatttatatatatactttttaaaagactgatgtaccattttaaacttcattttttcttgtgaatcagtgtatactacatttatacattttatatctaacaatttttttttttacaaagtataaatgtatatatcaactgaaggtaactacttttttcatatttggagttttaaacttttggtgtttacctcagactgatgttacctcttttatatttttatgtcttaattggctcggatgatgaacttgtgcaatcttctaccaacaaagttcaagtggcatcattttatatacatgtatctttttcaggtattttctatacaaattcttaatagatggaaaattagactctactttggtcactaatagtctttcatttgtatattgaagttaccttgccccttggagttattgaagtgacatgtcaaggtatcacctaaatattcttcagtcacactcactggtatttctgaggctttgtgtgttaacaggccttgtaattgacattattttggttaatgtaaccccaaaattgctttagtaattgctctttggcatagtcaaactataaatgaaaatggcagctttacaaatagtatatttaagtgaactctggaactatggacatgaaaaaaatgatggctgggatttatgatttttgtctggcagcaaacaggtttgtccagaagtctaataattaagcagtcataaaaagtctgaatttagtaaaccagtgtatgatgttattcaaatagtttaccttgggtatgagttcattttataatgtctgatgacattagatctcttaaaactttatgtattttttttagttcaaaggaatagagtcttgaagagaaaaaattatagggcagaaaagataagtgttcaaaattggcaactggactattattatgtctagcatctcattctaaataactaaagcttgatttactcttgctaggattatgtgactactaggtaggagcctcttaaaacactggccctgagcattaaaaaaaaaaaaaaaaactaaaagctatctatctaaacttgcacaaaaaaaaatacagtgtgagtcactctttttcttcttctgataatctcactgggtttctttaaagtcctgttgctgctaactttatcttatttggagagggtagaatcaactaatctctgtagaccagctatgtatctaagctctgttaaccacaggaagatcatgtatcccttttttataagtgggtttatttgcaggttgaagtcttagtgaaagatagtatcctgtagaatgctgttcaccactagtgatcatctgttaagtacaaacttgaaagaggtctctaccaataaatttttcttaaatttcacaaaacaagtcatctgggttagctgatagtgaggtgcagtgagacttttatcactgaatagacaaatcatttgtgccgaaaatacatctggaatattaaatggctatgtttaaaattgttcataatacctatgcaagttgttacctcaactgttacacacttcttaatacctcattaaaaatttacatggtcaagataa

SEQ ID NO: 33560 - DNA, 3161 bp, Homo sapiens
  source 1..3161: mol_type = unassigned DNA
gggtcgtcgcggccgccgaaccggggggcggggggccggggtgagcgctaagatggccgccccggctcgggctgttttcagatgcttcaagtgttgtgaacagagacttgtttggattatgcatttctcagctagactaaataaatgctagcaatggatacgtgcaaacatgttgggcagctgcagcttgctcaagaccattccagcctcaaccctcagaaatggcactgtgtggactgcaacacgaccgagtccatttgggcttgccttagctgctcccatgttgcctgtggaagatatattgaagagcatgcactcaagcactttcaagaaagcagtcatcctgttgcattggaggtgaatgagatgtacgttttttgttacctttgtgatgattatgttctgaatgataacacaactggagacctgaagttactacgacgtacattaagtgccatcaaaagtcaaaattatcactgcacaactcgtagtgggaggtttttacggtccatgggtacaggtgatgattcttatttcttacatgacggtgcccaatctctgcttcaaagtgaagatcaactgtatactgctctttggcacaggagaaggatactaatgggtaaaatctttcgaacatggtttgaacaatcacccattggaagaaaaaagcaagaagaaccatttcaggaaaaaatagtagtaaaaagagaagtaaagaaaagacggcaggaattggagtatcaagttaaagcagaattggaaagtatgcctccaagaaagagtttacgtttacaagggctcgctcagtcgaccataatagaaatagtttctgttcaggtgccagcacaaacgccagcatcaccagcaaaagataaagtactctctacctcagaaaatgaaatatctcaaaaagtcagtgactcctcagttaaacgaaggccaatagtaactcctggtgtaacaggattgagaaatttgggaaatacttgctatatgaattctgttcttcaggtgttgagtcatttacttatttttcgacaatgttttttaaagcttgatctgaaccaatggctggctatgactgctagcgagaagacaagatcttgtaagcatccaccagtcacagatacagtagtatatcaaatgaatgaatgtcaggaaaaagatacaggttttgtttgctccagacaatcaagtctgtcatcaggactaagtggtggagcatcaaaaggtagaaagatggaacttattcagccaaaggagccaacttcacagtacatttctctttgtcatgaattgcatactttgttccaagtcatgtggtctggaaagtgggcgttggtctcaccatttgctatgctacactcagtgtggagactcattcctgcctttcgtggttacgcccaacaagacgctcaggaatttctttgtgaacttttagataaaatacaacgtgaattagagacaactggtaccagtttaccagctcttatccccacttctcaaaggaaactcatcaaacaagttctgaatgttgtaaataacatttttcatggacaacttcttagtcaggttacatgtcttgcatgtgacaacaaatcaaataccatagaacctttctgggacttgtcattggagtttccagaaaggtatcaatgcagtggaaaagatattgcttcccagccatgtctggttactgaaatgttggccaaatttacagaaactgaagctttagaaggaaaaatctacgtatgtgaccagtgtaactcaaagcgtagaaggttttcctccaaaccagttgtactcacagaagcccagaaacaacttatgatatgccacctacctcaggttctcagactgcacctcaaacgattcaggtggtcaggacgtaataaccgagagaagattggtgttcatgttggctttgaggaaatcttaaacatggagccctattgctgcagggagaccctgaaatccctcagaccagaatgctttatctatgacttgtccgcggtggtgatgcaccatgggaaaggatttggctcagggcactacactgcctactgctataattctgaaggagggttctgggtacactgcaatgattccaaactaagcatgtgcactatggatgaagtatgcaaggctcaagcttatatcttgttttatacccaacgagttactgagaatggacattctaaacttttgcctccagagctcctgttggggagccaacatcccaatgaagacgctgatacctcgtctaatgaaatccttagctgatccaaagacaatggggttttcttcctgtgatttatatatatactttttaaaagactgatgtaccattttaaacttcattttttcttgtgaatcagtgtatactacatttatacattttatatctaacaatttttttttttacaaagtataaatgtatatatcaactgaaggtaactacttttttcatatttggagttttaaacttttggtgtttacctcagactgatgttacctcttttatatttttatgtcttaattggctcggatgatgaacttgtgcaatcttctaccaacaaagttcaagtggcatcattttatatacatgtatctttttcaggtattttctatacaaattcttaatagatggaaaattagactctactttggtcactaatagtctttcatttgtatattgaagttaccttgccccttggagttattgaagtgacatgtcaaggtatcacctaaatattcttcagtcacactcactggtatttctgaggctttgtgtgttaacaggccttgtaattgacattattttggttaatgtaaccccaaaattgctttagtaattgctctttggcatagtcaaactataaatgaaaatggcagctttacaaatagtatatttaagtgaactctggaactatggacatgaaaaaaatgatggctgggatttatgatttttgtctggcagcaaacaggtttgtccagaagtctaataattaagcagtcataaaaagtctgaatttagtaaaccagtgtatgatgttattcaaatagtttaccttgggtatgagttcattttataatgtctgatgacattagatctcttaaaactttatgtattttttttagttcaaaggaatagagtcttg

SEQ ID NO: 33561 - DNA, 2499 bp, Homo sapiens
  source 1..2499: mol_type = unassigned DNA
gattaccgcgaggtgatgctcgaagccccggggcacttcgggagggcggttgtggcactcggttgaggaggaatgcgcttcccggcgtcttgcccgccttctctccatcgatcggtccccgcgctgccggcacctgctgccgcttaaagcttgaaaatcagcttcctaaagccattcccgatggccttcgatgggaaagaatgccatatggctgaattcattatgggggataagaaatatgtcagtgtgcgcggaggggaacctgttaatacgttcaaatttaagagtagttttcagatgcttcaagtgttgtgaacagagacttgtttggattatgcatttctcagctagactaaataaatgctagcaatggatacgtgcaaacatgttgggcagctgcagcttgctcaagaccattccagcctcaaccctcagaaatggcactgtgtggactgcaacacgaccgagtccatttgggcttgccttagctgctcccatgttgcctgtggaagatatattgaagagcatgcactcaagcactttcaagaaagcagtcatcctgttgcattggaggtgaatgagatgtacgttttttgttacctttgtgatgattatgttctgaatgataacacaactggagacctgaagttactacgacgtacattaagtgccatcaaaagtcaaaattatcactgcacaactcgtagtgggaggtttttacggtccatgggtacaggtgatgattcttatttcttacatgacggtgcccaatctctgcttcaaagtgaagatcaactgtatactgctctttggcacaggagaaggatactaatgggtaaaatctttcgaacatggtttgaacaatcacccattggaagaaaaaagcaagaagaaccatttcaggaaaaaatagtagtaaaaagagaagtaaagaaaagacggcaggaattggagtatcaagttaaagcagaattggaaagtatgcctccaagaaagagtttacgtttacaagggctcgctcagtcgaccataatagaaatagtttctgttcaggtgccagcacaaacgccagcatcaccagcaaaagataaagtactctctacctcagaaaatgaaatatctcaaaaagtcagtgactcctcagttaaacgaaggccaatagtaactcctggtgtaacaggattgagaaatttgggaaatacttgctatatgaattctgttcttcaggtgttgagtcatttacttatttttcgacaatgttttttaaagcttgatctgaaccaatggctggctatgactgctagcgagaagacaagatcttgtaagcatccaccagtcacagatacagtagtatatcaaatgaatgaatgtcaggaaaaagatacaggttttgtttgctccagacaatcaagtctgtcatcaggactaagtggtggagcatcaaaaggtagaaagatggaacttattcagccaaaggagccaacttcacagtacatttctctttgtcatgaattgcatactttgttccaagtcatgtggtctggaaagtgggcgttggtctcaccatttgctatgctacactcagtgtggagactcattcctgcctttcgtggttacgcccaacaagacgctcaggaatttctttgtgaacttttagataaaatacaacgtgaattagagacaactggtaccagtttaccagctcttatccccacttctcaaaggaaactcatcaaacaagttctgaatgttgtaaataacatttttcatggacaacttcttagtcaggttacatgtcttgcatgtgacaacaaatcaaataccatagaacctttctgggacttgtcattggagtttccagaaaggtatcaatgcagtggaaaagatattgcttcccagccatgtctggttactgaaatgttggccaaatttacagaaactgaagctttagaaggaaaaatctacgtatgtgaccagtgtaactcaaagcgtagaaggttttcctccaaaccagttgtactcacagaagcccagaaacaacttatgatatgccacctacctcaggttctcagactgcacctcaaacgattcaggtggtcaggacgtaataaccgagagaagattggtgttcatgttggctttgaggaaatcttaaacatggagccctattgctgcagggagaccctgaaatccctcagaccagaatgctttatctatgacttgtccgcggtggtgatgcaccatgggaaaggatttggctcagggcactacactgcctactgctataattctgaaggagggttctgggtacactgcaatgattccaaactaagcatgtgcactatggatgaagtatgcaaggctcaagcttatatcttgttttatacccaacgagttactgagaatggacattctaaacttttgcctccagagctcctgttggggagccaacatcccaatgaagacgctgatacctcgtctaatgaaatccttagctga

SEQ ID NO: 33562 - DNA, 677 bp, Homo sapiens
  source 1..677: mol_type = unassigned DNA
gctaagatggccgccccggctcgggctggtgagtgtgcgcgagggcgcgcggccgcggcgattggcggagtgaggacccctgcgggagcggacgtgcgacggcagcccccggggccgggaggcacctgggggcctattctcgccgcgcagggcgctggggggtcctgagagagggagagcctggggctgcgggcgcgcggaagggaatgagccgaggggcgcgcggcggcgacgcgtccggcgaattttgaattgcccccctgggaagtttcgttttcagatgcttcaagtgttgtgaacagagacttgtttggattatgcatttctcagctagactaaataaatgctagcaatggatacgtgcaaacatgttgggcagctgcagcttgctcaagaccattccagcctcaaccctcagaaatggcactgtgtggactgcaacacgaccgagtccatttgggcttgccttagctgctcccatgttgcctgtggaagatatattgaagagcatgcactcaagcactttcaagaaagcagtcatcctgttgcattggaggtgaatgagatgtacgttttttgttacctttgtgatgattatgttctgaatgataacacaactggagacctgaagttactacgacgtacattaagtgccatcaaaagtcaaaattatcact

SEQ ID NO: 33563 - DNA, 666 bp, Homo sapiens
  source 1..666: mol_type = unassigned DNA
gggcggggggccggggtgagcgctaagatggccgccccggctcgggctgccaactgtcaagtctgttcggcctcagagtatgttatagagccatgaattaaagttttcagatgcttcaagtgttgtgaacagagacttgtttggattatgcatttctcagctagactaaataaatgctagcaatggatacgtgcaaacatgttgggcagctgcagcttgctcaagaccattccagcctcaaccctcagaaatggcactgtgtggactgcaacacgaccgagtccatttgggcttgccttagctgctcccatgttgcctgtggaagatatattgaagagcatgcactcaagcactttcaagaaagcagtcatcctgttgcattggaggtgaatgagatgtacgttttttgttacctttgtgatgattatgttctgaatgataacacaactggagacctgaagttactacgacgtacattaagtgccatcaaaagtcaaaattatcactgcacaactcgtagtgggaggtttttacggtccatgggtacaggtgatgattcttatttcttacatgacggtgcccaatctctgcttcaaagtgaagatcaactgtatactgctctttggcacaggagaaggatactaatgggtaaaatctttcgaacat

SEQ ID NO: 33564 - DNA, 4752 bp, Homo sapiens
  source 1..4752: mol_type = unassigned DNA
cgctccctccccgccctccccgcgccgccgcctcctcctcccggcctccctctcccagccaaactgaaagccggaccccaggccgccgcgctgccgcccggcctccccgccagcgcgccaccatgggcagtcccggtttccccttgtaaagatggcggtgagggatcgctgcaacctttagactaatgactgtccgaaacatcgcctccatctgtaatatgggcaccaatgcctctgctctggaaaaagacattggtccagagcagtttccaatcaatgaacactatttcggattggtcaattttggaaacacatgctactgtaactccgtgcttcaggcattgtacttctgccgtccattccgggagaatgtgttggcatacaaggcccagcaaaagaagaaggaaaacttgctgacgtgcctggcggaccttttccacagcattgccacacagaagaagaaggttggcgtcatcccaccaaagaagttcatttcaaggctgagaaaagagaatgatctctttgataactacatgcagcaggatgctcatgaatttttaaattatttgctaaacactattgcggacatccttcaggaggagaagaaacaggaaaaacaaaatggaaaattaaaaaatggcaacatgaacgaacctgcggaaaataataaaccagaactcacctgggtccatgagatttttcagggaacgcttaccaatgaaactcgatgcttgaactgtgaaactgttagtagcaaagatgaagattttcttgacctttctgttgatgtggagcagaatacatccattacccactgtctaagagacttcagcaacacagaaacactgtgtagtgaacaaaaatattattgtgaaacatgctgcagcaaacaagaagcccagaaaaggatgagggtaaaaaagctgcccatgatcttggccctgcacctaaagcggttcaagtacatggagcagctgcacagatacaccaagctgtcttaccgtgtggtcttccctctggaactccggctcttcaacacctccagtgatgcagtgaacctggaccgcatgtatgacttggttgcggtggtcgttcactgtggcagtggtcctaatcgtgggcattatatcactattgtgaaaagtcacggcttctggcttttgtttgatgatgacattgtagagaaaatagatgctcaagctattgaagaattctatggcctgacgtcagatatatcaaaaaattcagaatctggatatattttattctatcagtcaagagagtaactgaaagacctgcgggactgattcacgtggggagaatgttcacagcactgtcacccggcttctccgcaggctttcctcttccccagtggcccactaatggtatcactccgagtctcaatggtctggctgtgttagactctctccttttgtgtttttacatgcagcactactcttggttttatttcagtctgacatagagttaactgcaatcagattgtagtctgatttatatgaataacggttgctaattttaggactgggtgaaagctatgccattcattatgtctggctgtattagaatgacatttcctatgaatgtctacggtctgttttaggtgtttgctaaacttctatggcttccagggtcttcttacaatgcattcctttaacttgtccctggaagcattgctacccattttcagcttctctgcctctcttctgatacaaggacagaagaattgggtagatattcaccttttaggggtgcaagtatagctttaagtttgtgcaagtgaaaatgttgaaaagtgagtaacctcgatattaaaatcatccttgacatgaaacagggtgaagagaagctgtccgtggcggctggtgttggctggcattggcactgggctgtgctgacctagccattacaattccaggggctaagaaggctcagggcagacaaagtcaagaggaggaagtttttgtggacaatgaaaagttattttcgtacctttctaccaaaaccaagtttcaggaaaataactctatgttgtttattttcagtgacacttatgtaaggccctgtgagttgtatttatcctgtatccggcactgctaagcttttcaaggtatctttccaatcctgctgatgtggcagtcaatggctgcagggctggcaaacctccccttagccagtcagcacggcattgttccttatcaggaataacaaaggtactacatctttccagccatcagcacgttgtacaacttaactttttaacatagtccgtctgtttactgaggcactggcgagtcccagggctgatacagaaccttccctagagggaataccagagttagctgggtatagaggtggctcaaaggaagtgtccgtgggcagggggaggaatgaacaaaatggcgctgtttctttggctcagactcctagaatgcttgacaagacagaatttttttggaagaacctcatctcactatagttacttttttcacttttgttatatatgtatttattagagcatttgaatattggtacctttaaaagggtcatttggtgttttgctgttgagctggtttttgagtcatagatcttggcttcctttagaagccacttaacttccatacactataataaactgtgaacatatttttgttacctaatgcatccactgatgaacatgcaaactttgggcataatgtgaactaaaattgaaatggaaaatgttagtggccattttgcaacaatgaagaggatagcactttatctagatgaaaactggatttcttatctttgaaatatcttgaactgtttattgctcagaacttaagtaagcatgccaacatttcgtttgtttatgcttgaagtgaaatgttttacttttcactggagaagacaaaacagggtgatcttcatgttattgttttatacaagtgatggaaatgtaccttgccttgtttagaggcaatttcacatttataaatatttttttttcctccatgaaacttacgcagtaatcactacctggaaggtgagttttgatctctttttaaggagaggcactttccaactgaaggtgattgatgtagggaaatgtttgtactatatagaatccatatatttgactgcaagttacaaagttttaagaacatgatggttggtctctaatatatttggaactgattcataagaaaagttattaaaattatctttgaaacacctcttgaagctaatttattagaaaaaatatttcagttggaaggctgtagaagtaatgtttaaatgctaagtcataagttcaggatatttcttttctatttggttgtgcaaaatgtttttcccagttatttaatcgaagtaattccttttaatagaaagagtcagttaaaattcagcattcatggatagatttttggaacgaaaaagggtaagtataagaaaatattgcaaacacattaaaacagttgtatggtgcaggaaaagaagattggaaaaagaccaaaacacacttctccagcaacactccatcagctttttaaaatttagagctatctgctaattttttccctcttccttctcaataaatgaaacaaacactgggcagctgcaggtttctcccaatcatgtctctttatgtaaagacagtaacatgcaaacacttttagtttacatccctcattcacagtgtaaagcaggaaatggtgtgggagatgtgagaccattctgaggtcagcgatagcccaaaggctctgcagtattccctccaatggccaaggattccgtgtgtcatctgcaggagtgagtaggcctgctgtatttcttgtaactgctgggtgttacaaaataagttacaatgttttacactttaaaaaaaaaacagaaggaacatttgctttattggttacttactagtttagcctctaggttatggcacagcatgctaaaaaatcatgtgtttaaaagtaaatgttggtaaaatgctggcatctggtcctattgtgttgatgcattttcacttctgtggtcataggaaatggactggtctaaagagagtgaggcacaacacaagcagggcattagtttgaataggaagtcaatcatatttggttttatggcctggtgtattttgggtttaagataaaatagggaaaaatgtcagaaatgatccctatgcatttattttcatggatacccttaatttcatgggcatgcctaataatgatctatgttctaactggagcttagggcttattttagatattggagtgtagctttattacagatggattttatctttcaacattgcattttgatcaactttgtatattcacgtgtattaaaatattgtgcactaaatgttttgcccttgtttgctattatatggtcaaggcatttatcagcactattgtaatgaactcatgtaagtggcatgggtcagggaaaattatttcctacttttctgcctaattaaatttctgttttccagtattacattaatttatttttggcttccatttctgtataaccaaaatagttactgtatttgtgtggcattcctattattttgttgctaaaaatattgtagtttttatttaaaataatctgtaccttaattttttaaaatgtaaccaattcaagcactttaagcaataatgtcaatcttgtgaaattttaatcagtttaacaccctgcctctaaaattgtttgcaaaaaataaataaatgaataaaatgggaa

SEQ ID NO: 33565 - DNA, 1419 bp, Homo sapiens
  source 1..1419: mol_type = unassigned DNA
tgttatgtcatctaccaggtgtttaagggacagtggagatcatgccatttcagacctggtggaagcaaccactaatataaacacctcccatgtataggaaggctggagtgggaatccttaaccccgccccctgctcaggtcaatcccccacccaccgcccccactgtccctcccagtcttccttcccagaggagaaggctgggtatgaggaaactgctgtcttttcactggatcagacgtaaatattaactggacctctctttagattctttgctcaataatgaattgttttcagggcaccaatgcctctgctctggaaaaagacattggtccagagcagtttccaatcaatgaacactatttcggattggtcaattttggaaacacatgctactgtaactccgtgcttcaggcattgtacttctgccgtccattccgggagaatgtgttggcatacaaggcccagcaaaagaagaaggaaaacttgctgacgtgcctggcggaccttttccacagcattgccacacagaagaagaaggttggcgtcatcccaccaaagaagttcatttcaaggctgagaaaagagaatgatctctttgataactacatgcagcaggatgctcatgaatttttaaattatttgctaaacactattgcggacatccttcaggaggagaagaaacaggaaaaacaaaatggaaaattaaaaaatggcaacatgaacgaacctgcggaaaataataaaccagaactcacctgggtccatgagatttttcagggaacgcttaccaatgaaactcgatgcttgaactgtgaaactgttagtagcaaagatgaagattttcttgacctttctgttgatgtggagcagaatacatccattacccactgtctaagagacttcagcaacacagaaacactgtgtagtgaacaaaaatattattgtgaaacatgctgcagcaaacaagaagcccagaaaaggatgagggtaaaaaagctgcccatgatcttggccctgcacctaaagcggttcaagtacatggagcagctgcacagatacaccaagctgtcttaccgtgtggtcttccctctggaactccggctcttcaacacctccagtgatgcagtgaacctggaccgcatgtatgacttggttgcggtggtcgttcactgtggcagtggtcctaatcgtgggcattatatcactattgtgaaaagtcacggcttctggcttttgtttgatgatgacattgtagagaaaatagatgctcaagctattgaagaattctatggcctgacgtcagatatatcaaaaaattcagaatctggatatattttattctatcagtcaagagagtaactgaaagacctgcgggactgattcacgtggggagaatgttcacagcactgtcacccggc

SEQ ID NO: 33566 - DNA, 7976 bp, Homo sapiens
  source 1..7976: mol_type = unassigned DNA
ctaaaaataccattaagtaatagtattagcttttgtattctgagattcaacagcagcagtcacttccctccactcctatgtgtatcccaggaccaccctgggcggggagggctgaggtcagggaggtctgaagctggtcctgggctccgggggtgacagtgatgaggaactgggtgcacacatgagtggggcagccgggcctggccagagaagcaacacacacgtgcacagacatgtttatccacatacacatgtgcacgcatgtgcacaaacacattgcaggcaggcatgttgacgcctcaggcagcggaggaccctgactctgggccctgctgacccaggcaaggccccattgtgatgcgtgccatgacctcagaatgtcactggtgcttagcacctatccgctctccagactgcgtctgtgttctacggcagttacacacacgcagtggtattcacaagcggttttgtggactcaaaggttttctccctgagaggcataacccaggccagctgattcatcagaatcaggtgagtgtgacctgctctcttccctccaggctgacttggggacagtggctatggtatgggcggtgttggcctctgggcagctacagaggagggtcatccctgagcactcaccgggcgcccgttctacactgcccatgtagacgattttctctttcgtcttcatggtggcttcgtagagtgggtgctgttcccgaatgtacccattcgacaggtgagccgtctggggtcagagaggcagtaactggcctgggaatccagacaagaccctgggttttgctctcagccctgctgtgtgccatgctagacttcaggcctcaaccctgagacctccctgctctagatcccaaatctgcccagatttccgatcccaatggggcagagcctggccctggcagagacactgggatggatccactgtgggtggggaggagggaagggtcctcagaacacacctggggcctaagctgggtcttgatggtcactgtgggacccactggacacacacagtcccttgtctgggagtggcatggggagccttctgcccttgggcagttgtggaaagtgaaggagccctggagagctggctgaggggagactatcttcccttgtgttcaaaggggtccaggcactggggctctccccaagtatttcttattctgtctggcctcgctttccttttgccctgagtattctcaggagggacggtccatctagatgtcctccaggagcaaggacccactgttcttcatcagtgacccaggaaaatgaagccccctcctgtggggacagctcagaatggtggagtccacagtccctccctgagagacatggtttccatgagcacagtggctgctttggagacagtaatcattttcatccccaaaaccaaacacactcctgctcaaatggtgttattgctaaagcagcttcactggttagactgaagggccatggtagcccaagtgatgagcggggtagaatggagcagtcaggagagatcttgttccccgtaggaaactgggcatctctgtggccctgaacatcccaggaggccgatcgtacagagacctctggtgcctgaccgcagttcacatccacatccctggaatagaccatcacaggctcttcacccttggcaggtggacaccattcaacctgccggggcaggatggacatggtagagaatgcagatagtttgcaggcacaggagcggaaggacatacttatgaagtatgacaagggacaccgagctgggctgccagaggacaaggggcctgagcccgttggaatcaacagcagcattgatcgttttggcattttgcatgagacggagctgcctcctgtgactgcacgggaggcgaagaaaattcggcgggagatgacacgaacgagcaagtggatggaaatgctgggagaatgggagacatataagcacagtagcaaactcatagatcgagtgtacaagggaattcccatgaacatccggggcccggtgtggtcagtcctcctgaacattcaggaaatcaagttgaaaaaccccggaagataccagatcatgaaggagaggggcaagaggtcatctgaacacatccaccacatcgacctggacgtgaggacgactctccggaaccatgtcttctttagggatcgatatggagccaagcagagggaactattctacatcctcctggcctattcggagtataacccggaggtgggctactgcagggacctgagccacatcaccgccttgttcctcctttatctgcctgaggaggacgcattctgggcactggtgcagctgctggccagtgagaggcactccctgccaggattccacagcccaaatggtgggacagtccaggggctccaagaccaacaggagcatgtggtacccaagtcacaacccaagaccatgtggcatcaggacaaggaaggtctatgcgggcagtgtgcctcgttaggctgccttctccggaacctgattgacgggatctctctcgggctcaccctgcgcctgtgggacgtgtatttggtggaaggagaacaggtgttgatgccaataaccagcattgctcttaaggttcagcagaagcgcctcatgaagacatccaggtgtggcctgtgggcacgtctgcggaaccaattcttcgatacctgggccatgaacgatgacaccgtgctcaagcatcttagggcctctacgaagaaactaacaaggaagcaaggggacctgccacccccagccaaacgcgagcaagggtccttggcacccaggcctgtgccggcttcacgtggtgggaagaccctctgcaaggggtataggcaggcccctccaggcccaccagcccagttccagcggcccatttgctcagcttccccgccatgggcatctcgtttttccacgccctgtcctggtggggctgtccgggaagacacgtaccctgtgggcactcagggtgtgcccagcctggccctggctcagggaggacctcagggttcctggagattcctggagtggaagtcaatgccccggctcccaacggacctggatatagggggcccttggttcccccattatgattttgaatggagctgctgggtccgtgccatatcccaggaggaccagctggccacctgctggcaggctgaacactgcggagaggttcacaacaaagatatgagttggcctgaggagatgtcttttacagcaaatagtagtaaaatagatagacaaaaggttcccacagaaaagggagccacaggtctaagcaacctgggaaacacatgcttcatgaactcaagcatccagtgcgttagtaacacacagccactgacacagtattttatctcagggagacatctttatgaactcaacaggacaaatcccattggtatgaaggggcatatggctaaatgctatggtgatttagtgcaggaactctggagtggaactcagaagagtgttgccccattaaagcttcggcggaccatagcaaaatatgctcccaagtttgatgggtttcagcaacaagactcccaagaacttctggcttttctcttggatggtcttcatgaagatctcaaccgagtccatgaaaagccatatgtggaactgaaggacagtgatggccgaccagactgggaagtagctgcagaggcctgggacaaccatctaagaagaaatagatcaattattgtggatttgttccatgggcagctaagatctcaagtcaaatgcaagacatgtgggcatataagtgtccgatttgaccctttcaattttttgtctttgccactaccaatggacagttacatggacttagaaataacagtgattaagttagatggtactacccctgtacggtatggactaagactgaatatggatgaaaagtacacaggtttaaaaaaacagctgagggatctctgtggacttaattcagaacaaatcctactagcagaagtacatgattccaacataaagaactttcctcaggataaccaaaaagtacaactctcagtgagcggatttttgtgtgcatttgaaattcctgtcccttcatctccaatttcagcttctagtccaacacaaatagatttctcctcttcaccatctacaaatggaatgttcaccctaactaccaatggggacctacccaaaccaatattcatccccaatggaatgccaaacactgttgtgccatgtggaactgagaagaacttcacaaatggaatggttaatggtcacatgccatctcttcctgacagcccctttacaggttacatcattgcagtccaccgaaaaatgatgaggacagaactgtatttcctgtcacctcaggagaatcgccccagcctctttggaatgccattgattgttccatgcactgtgcatacccggaagaaagacctatatgatgcggtttggattcaagtatcctggttagcaagaccactcccacctcaggaagctagtattcatgcccaggatcgtgataactgtatgggctatcaatatccattcactctacgagttgtgcagaaagatgggaactcctgtgcttggtgcccacagtatagattttgcagaggctgtaaaattgattgtggggaagacagagctttcattggaaatgcctatattgctgtggattggcaccccacagcccttcaccttcgctatcaaacatcccaggaaagggttgtagataagcatgagagtgtggagcagagtcggcgagcgcaagccgagcccatcaacctggacagctgtctccgtgctttcaccagtgaggaagagctaggggaaagtgagatgtactactgttccaagtgtaagacccactgcttagcaacaaagaagctggatctctggaggcttccacccttcctgattattcaccttaagcgatttcaatttgtaaatgatcagtggataaaatcacagaaaattgtcagatttcttcgggaaagttttgatccgagtgcttttttggtaccacgagacccggccctctgccagcataaaccactcacaccccagggggatgagctctccaagcccaggattctggcaagagaggtgaagaaagtggatgcgcagagttcggctggaaaagaggacatgctcctaagcaaaagcccatcctcactcagcgctaacatcagcagcagcccaaaaggttctccttcttcatcaagaaaaagtggaaccagctgtccctccagcaaaaacagcagccctaatagcagcccacggactttggggaggagcaaagggaggctccggctgccccagattggcagcaaaaataagccgtcaagtagtaagaagaacttggatgccagcaaagagaatggggctgggcagatctgtgagctggctgacgccttgagccgagggcatatgcgggggggcagccaaccagagctggtcactcctcaggaccatgaggtagctttggccaatggattcctttatgagcatgaagcatgtggcaatggctgtggcgatggctacagcaatggtcagcttggaaaccacagtgaagaagacagcactgatgaccaaagagaagacactcatattaagcctatttataatctatatgcaatttcatgccattcaggaattctgagtgggggccattacatcacttatgccaaaaacccaaactgcaagtggtactgttataatgacagcagctgtgaggaacttcaccctgatgaaattgacaccgactctgcctacattcttttctatgagcagcaggggatagactacgcacaatttctgccaaagattgatggcaaaaagatggcagacacaagcagtacggatgaagactctgagtctgattacgaaaagtactctatgttacagtaaagctaccactctggctgctagacagcttggtggcgagggagatgactccttgtagctgatacttggcaaaagtgtcactgaaagacaagctaaatgtagttattttatcctgttagaacaaaaattctaattaaaatagttaacttgaagagtagaaacaattgtattttgaagtctcatacaagctgtctgatagagaactttcaggcagatcccaccattagcctgtaaacaaaaggtgtggcaccagccacctgggaccaaataagaattgaattgtgcttgtccagatatgaacaaatatgtagtgagtatagagtttaccaataatcataacaaatattaaagatttccttggagtcagaggaaaaaacaaacaattataatgttgtctagggacgacatgatacgctacctcctttttcctgaagttttattccattatattgacaagatggagaaagcaagatcatgaaggtgtgcaaatgattcttacggcatggacaaggatttttcaatttattttttaaactgtttccataccctttctttttcttgctttttgtttttgccattgtgtttacgtttgagacacaaccagtcattggtggcaggggcatagagtggtcagtctgaaagggaggctctcttaagagctatgtgccttccaaccagagggagacccagtagaaagaaaaacatcctgggaaatccagctaccagggccctcccagtggaggcatcttacatttaggctacttcaagtatcctcagaaatgtattctgcacccccggccccgcccatgctgagggaaggggagcagttgccaatatttgcaccatcttcacatgcacatgttgcaacaagagcttctgggaaggtaagcggcatcggagctagatcacgtttcacaattagtggttattcttttctgtgtttgttttgcactttaaaaaagagagaacacatgcaaatgaacttgcttgtgtgtatttgatggctctaagggctataaattacaaacaaaacacatcccagacattaggagttcataagtatatttaatgaaattggtggttttaggaagtcaactttagttttgctttgtttgcatgtccactggtttttttattttgatatttgtctttttttaaattttacagtagtcattgaaagttatgtttctttgcttacttcattttttccctctaattatttaagattggaacaaaagtataaatattatttatttgaggtagaatttttttcatgtagtttcttaatatatacttgaaggaaatgtttcaccttatttttggtctttgtttattcatttagaccctgcaagttgattctcattgccagattccattaccctttcttcctcataggtagtaattaccaatgtaactaagcatttgtgttctgatatctgaggccagtaactattaatatctagttctcagagcatttggaaaggttatcttaaatggctacctaaattgaaatccttttcagaaaaaatataattgcaagtaggtaggagtggcctaaattgtctaatgtaataaagtcagacaaaatgcacactttatagtttcaagattttcagtaaataaaatctgtccattcctacctggacatgtcccattaaaaagtggaagattttaaataatttctttacagatgttttatttaaacaggtagcacaatctactaatgttgtgtgatttgtgttatactggttgtaattaatttttttaattcatgaactagcggaaaatttattaaattaactattaactacattcaccttgtaaattactgtataaaacttgttgacaatgcactgactttagaaagatgttaatgtacataaatagagtgtaaataaaatagtgttgatgtactgaaatatgaactgtatcaaaagtattggtaattgtatatggggtgtacctgtttatctgttaactattatccaaacaaattaaatactgtggttgcctctatgtgctgtttttcctcatacaagtaaacacagaaagtcaaatt

SEQ ID NO: 33567 - DNA, 8182 bp, Homo sapiens
  source 1..8182: mol_type = unassigned DNA
ctaaaaataccattaagtaatagtattagcttttgtattctgagattcaacagcagcagtcacttccctccactcctatgtgtatcccaggaccaccctgggcggggagggctgaggtcagggaggtctgaagctggtcctgggctccgggggtgacagtgatgaggaactgggtgcacacatgagtggggcagccgggcctggccagagaagcaacacacacgtgcacagacatgtttatccacatacacatgtgcacgcatgtgcacaaacacattgcaggcaggcatgttgacgcctcaggcagcggaggaccctgactctgggccctgctgacccaggcaaggccccattgtgatgcgtgccatgacctcagaatgtcactggtgcttagcacctatccgctctccagactgcgtctgtgttctacggcagttacacacacgcagtggtattcacaagcggttttgtggactcaaaggttttctccctgagaggcataacccaggccagctgattcatcagaatcaggtgagtgtgacctgctctcttccctccaggctgacttggggacagtggctatggtatgggcggtgttggcctctgggcagctacagaggagggtcatccctgagcactcaccgggcgcccgttctacactgcccatgtagacgattttctctttcgtcttcatggtggcttcgtagagtgggtgctgttcccgaatgtacccattcgacaggtgagccgtctggggtcagagaggcagtaactggcctgggaatccagacaagaccctgggttttgctctcagccctgctgtgtgccatgctagacttcaggcctcaaccctgagacctccctgctctagatcccaaatctgcccagatttccgatcccaatggggcagagcctggccctggcagagacactgggatggatccactgtgggtggggaggagggaagggtcctcagaacacacctggggcctaagctgggtcttgatggtcactgtgggacccactggacacacacagtcccttgtctgggagtggcatggggagccttctgcccttgggcagttgtggaaagtgaaggagccctggagagctggctgaggggagactatcttcccttgtgttcaaaggggtccaggcactggggctctccccaagtatttcttattctgtctggcctcgctttccttttgccctgagtattctcaggagggacggtccatctagatgtcctccaggagcaaggacccactgttcttcatcagtgacccaggaaaatgaagccccctcctgtggggacagctcagaatggtggagtccacagtccctccctgagagacatggtttccatgagcacagtggctgctttggagacagtaatcattttcatccccaaaaccaaacacactcctgctcaaatggtgttattgctaaagcagcttcactggttagactgaagggccatggtagcccaagtgatgagcggggtagaatggagcagtcaggagagatcttgttccccgtaggaaactgggcatctctgtggccctgaacatcccaggaggccgatcgtacagagacctctggtgcctgaccgcagttcacatccacatccctggaatagaccatcacaggctcttcacccttggcaggtggacaccattcaacctgccggggcaggatggacatggtagagaatgcagatagtttgcaggcacaggagcggaaggacatacttatgaagtatgacaagggacaccgagctgggctgccagaggacaaggggcctgagcccgttggaatcaacagcagcattgatcgttttggcattttgcatgagacggagctgcctcctgtgactgcacgggaggcgaagaaaattcggcgggagatgacacgaacgagcaagtggatggaaatgctgggagaatgggagacatataagcacagtagcaaactcatagatcgagtgtacaagggaattcccatgaacatccggggcccggtgtggtcagtcctcctgaacattcaggaaatcaagttgaaaaaccccggaagataccagatcatgaaggagaggggcaagaggtcatctgaacacatccaccacatcgacctggacgtgaggacgactctccggaaccatgtcttctttagggatcgatatggagccaagcagagggaactattctacatcctcctggcctattcggagtataacccggaggtgggctactgcagggacctgagccacatcaccgccttgttcctcctttatctgcctgaggaggacgcattctgggcactggtgcagctgctggccagtgagaggcactccctgccaggattccacagcccaaatggtgggacagtccaggggctccaagaccaacaggagcatgtggtacccaagtcacaacccaagaccatgtggcatcaggacaaggaaggtctatgcgggcagtgtgcctcgttaggctgccttctccggaacctgattgacgggatctctctcgggctcaccctgcgcctgtgggacgtgtatttggtggaaggagaacaggtgttgatgccaataaccagcattgctcttaaggttcagcagaagcgcctcatgaagacatccaggtgtggcctgtgggcacgtctgcggaaccaattcttcgatacctgggccatgaacgatgacaccgtgctcaagcatcttagggcctctacgaagaaactaacaaggaagcaaggggacctgccacccccaggcccaacagccctgggacgaaggtgtgtggcaggaagcccccagccagtctgaaccctgggggcagtcccaggagccacccaccatgccccaacggcttccccatgccaggcagcacacacccctccctctgggatcagcagactacaggcgtgtcgtcagtgtcagaccacaggggccacacagagaccccaaggactccagagatgcagccaaacgcgagcaagggtccttggcacccaggcctgtgccggcttcacgtggtgggaagaccctctgcaaggggtataggcaggcccctccaggcccaccagcccagttccagcggcccatttgctcagcttccccgccatgggcatctcgtttttccacgccctgtcctggtggggctgtccgggaagacacgtaccctgtgggcactcagggtgtgcccagcctggccctggctcagggaggacctcagggttcctggagattcctggagtggaagtcaatgccccggctcccaacggacctggatatagggggcccttggttcccccattatgattttgaatggagctgctgggtccgtgccatatcccaggaggaccagctggccacctgctggcaggctgaacactgcggagaggttcacaacaaagatatgagttggcctgaggagatgtcttttacagcaaatagtagtaaaatagatagacaaaaggttcccacagaaaagggagccacaggtctaagcaacctgggaaacacatgcttcatgaactcaagcatccagtgcgttagtaacacacagccactgacacagtattttatctcagggagacatctttatgaactcaacaggacaaatcccattggtatgaaggggcatatggctaaatgctatggtgatttagtgcaggaactctggagtggaactcagaagagtgttgccccattaaagcttcggcggaccatagcaaaatatgctcccaagtttgatgggtttcagcaacaagactcccaagaacttctggcttttctcttggatggtcttcatgaagatctcaaccgagtccatgaaaagccatatgtggaactgaaggacagtgatggccgaccagactgggaagtagctgcagaggcctgggacaaccatctaagaagaaatagatcaattattgtggatttgttccatgggcagctaagatctcaagtcaaatgcaagacatgtgggcatataagtgtccgatttgaccctttcaattttttgtctttgccactaccaatggacagttacatggacttagaaataacagtgattaagttagatggtactacccctgtacggtatggactaagactgaatatggatgaaaagtacacaggtttaaaaaaacagctgagggatctctgtggacttaattcagaacaaatcctactagcagaagtacatgattccaacataaagaactttcctcaggataaccaaaaagtacaactctcagtgagcggatttttgtgtgcatttgaaattcctgtcccttcatctccaatttcagcttctagtccaacacaaatagatttctcctcttcaccatctacaaatggaatgttcaccctaactaccaatggggacctacccaaaccaatattcatccccaatggaatgccaaacactgttgtgccatgtggaactgagaagaacttcacaaatggaatggttaatggtcacatgccatctcttcctgacagcccctttacaggttacatcattgcagtccaccgaaaaatgatgaggacagaactgtatttcctgtcacctcaggagaatcgccccagcctctttggaatgccattgattgttccatgcactgtgcatacccggaagaaagacctatatgatgcggtttggattcaagtatcctggttagcaagaccactcccacctcaggaagctagtattcatgcccaggatcgtgataactgtatgggctatcaatatccattcactctacgagttgtgcagaaagatgggaactcctgtgcttggtgcccacagtatagattttgcagaggctgtaaaattgattgtggggaagacagagctttcattggaaatgcctatattgctgtggattggcaccccacagcccttcaccttcgctatcaaacatcccaggaaagggttgtagataagcatgagagtgtggagcagagtcggcgagcgcaagccgagcccatcaacctggacagctgtctccgtgctttcaccagtgaggaagagctaggggaaagtgagatgtactactgttccaagtgtaagacccactgcttagcaacaaagaagctggatctctggaggcttccacccttcctgattattcaccttaagcgatttcaatttgtaaatgatcagtggataaaatcacagaaaattgtcagatttcttcgggaaagttttgatccgagtgcttttttggtaccacgagacccggccctctgccagcataaaccactcacaccccagggggatgagctctccaagcccaggattctggcaagagaggtgaagaaagtggatgcgcagagttcggctggaaaagaggacatgctcctaagcaaaagcccatcctcactcagcgctaacatcagcagcagcccaaaaggttctccttcttcatcaagaaaaagtggaaccagctgtccctccagcaaaaacagcagccctaatagcagcccacggactttggggaggagcaaagggaggctccggctgccccagattggcagcaaaaataagccgtcaagtagtaagaagaacttggatgccagcaaagagaatggggctgggcagatctgtgagctggctgacgccttgagccgagggcatatgcgggggggcagccaaccagagctggtcactcctcaggaccatgaggtagctttggccaatggattcctttatgagcatgaagcatgtggcaatggctgtggcgatggctacagcaatggtcagcttggaaaccacagtgaagaagacagcactgatgaccaaagagaagacactcatattaagcctatttataatctatatgcaatttcatgccattcaggaattctgagtgggggccattacatcacttatgccaaaaacccaaactgcaagtggtactgttataatgacagcagctgtgaggaacttcaccctgatgaaattgacaccgactctgcctacattcttttctatgagcagcaggggatagactacgcacaatttctgccaaagattgatggcaaaaagatggcagacacaagcagtacggatgaagactctgagtctgattacgaaaagtactctatgttacagtaaagctaccactctggctgctagacagcttggtggcgagggagatgactccttgtagctgatacttggcaaaagtgtcactgaaagacaagctaaatgtagttattttatcctgttagaacaaaaattctaattaaaatagttaacttgaagagtagaaacaattgtattttgaagtctcatacaagctgtctgatagagaactttcaggcagatcccaccattagcctgtaaacaaaaggtgtggcaccagccacctgggaccaaataagaattgaattgtgcttgtccagatatgaacaaatatgtagtgagtatagagtttaccaataatcataacaaatattaaagatttccttggagtcagaggaaaaaacaaacaattataatgttgtctagggacgacatgatacgctacctcctttttcctgaagttttattccattatattgacaagatggagaaagcaagatcatgaaggtgtgcaaatgattcttacggcatggacaaggatttttcaatttattttttaaactgtttccataccctttctttttcttgctttttgtttttgccattgtgtttacgtttgagacacaaccagtcattggtggcaggggcatagagtggtcagtctgaaagggaggctctcttaagagctatgtgccttccaaccagagggagacccagtagaaagaaaaacatcctgggaaatccagctaccagggccctcccagtggaggcatcttacatttaggctacttcaagtatcctcagaaatgtattctgcacccccggccccgcccatgctgagggaaggggagcagttgccaatatttgcaccatcttcacatgcacatgttgcaacaagagcttctgggaaggtaagcggcatcggagctagatcacgtttcacaattagtggttattcttttctgtgtttgttttgcactttaaaaaagagagaacacatgcaaatgaacttgcttgtgtgtatttgatggctctaagggctataaattacaaacaaaacacatcccagacattaggagttcataagtatatttaatgaaattggtggttttaggaagtcaactttagttttgctttgtttgcatgtccactggtttttttattttgatatttgtctttttttaaattttacagtagtcattgaaagttatgtttctttgcttacttcattttttccctctaattatttaagattggaacaaaagtataaatattatttatttgaggtagaatttttttcatgtagtttcttaatatatacttgaaggaaatgtttcaccttatttttggtctttgtttattcatttagaccctgcaagttgattctcattgccagattccattaccctttcttcctcataggtagtaattaccaatgtaactaagcatttgtgttctgatatctgaggccagtaactattaatatctagttctcagagcatttggaaaggttatcttaaatggctacctaaattgaaatccttttcagaaaaaatataattgcaagtaggtaggagtggcctaaattgtctaatgtaataaagtcagacaaaatgcacactttatagtttcaagattttcagtaaataaaatctgtccattcctacctggacatgtcccattaaaaagtggaagattttaaataatttctttacagatgttttatttaaacaggtagcacaatctactaatgttgtgtgatttgtgttatactggttgtaattaatttttttaattcatgaactagcggaaaatttattaaattaactattaactacattcaccttgtaaattactgtataaaacttgttgacaatgcactgactttagaaagatgttaatgtacataaatagagtgtaaataaaatagtgttgatgtactgaaatatgaactgtatcaaaagtattggtaattgtatatggggtgtacctgtttatctgttaactattatccaaacaaattaaatactgtggttgcctctatgtgctgtttttcctcatacaagtaaacacagaaagtc

SEQ ID NO: 33568 - DNA, 8351 bp, Homo sapiens
  source 1..8351: mol_type = unassigned DNA
gccgccgtctcgtgtggtgtctgaggggcgtctacctggagtcactgagccgacgaaagggaaaaggccagtgcctgtccgggaagagctcagcctagtggggcgggcgacaagttacagttgctgccttacgatggccgtggcccgtggaggcactagaccctcaccaggggtctgtcaggaaaggcgggcagatacgtgaggcctgaacaggaaggaactgggagacccaagactgtaccgccaagaccgctttcgagtcgggccgaccggaatttgaattcgtttcttcacttactagttgatttttttccttgattccttcgtgggactcaagacaggggtgccctgtttactcagcccactgtgctcaacctcttgcaggagtgtgcaggaaatgaaggccctttgaggtcaggtggatgaggatgtcagtgtgaagatggacactgtgcctggagtgaacctgagctggatcctgaatgagatgcatgaccaggacaagaaattggtggagaagagctacaaggatgccaagggctgtttcttcagcatgagagaggggctgaactgcgaggtggccaccaacacagaggccctgcagagcggcaggatagagatatggagctctacatctctgtgcagaacctgagccatcccagctcagcaaggtagggcctctgtcccctccccaccctgtacctatcaccccagggtgagcccagccttatagacccctgcttggaggtgtgttacgggacccaactggcccagctgcaggggctcatcagaagcatggagcagcagctgtgcgagctctgctgcgacgcggagcaccaggaccatgagcaccaggtccttctggacgtgaagacacggctggagcaggagatcgccacctacagccgcttgctagaggttgaggacgctcaagtcacagggagaagacgtccacccacacatcaggagacaggcctggaacagagccttcctgcacagcctcagaagggacccaccctggtgacaccttgatcttggactgacactcatgacctccagtactgtgagacagtaacattctgttgttgaaggtgcccagtctgtggtactgtaaaacagccctgggaaactaacgcagcctgttagcccacagatggtgaagggatggaatgctccacggagctccaggcttactatctacagcccccaaagtgtgctgcgggacccttgggtgggtgtaggtatgcaaggtaattttgggtggttcaaggtgaataatttcaattgacataataatgtatttatcttgctgggtaaatgagggatacccaactgttaggaaccaggcaacacagcaggaggtgagcagccagccagtgagcaaagcttcatctgtagaaacagccacttcccatccctcgcattaccgcatgagctctgcctcctgtcagatgagcggtgccgttagattctcacagaagcatgaaccctactgtgaactgcgcatgccagggatctagattgcgtgctccttatgagaacctaatgcctgatgatctgtgactgtctcatcactgccagatggaaccacgtagttgcaggaaaacaagttcagggctcccactgattctacattatggctggagtgcaatggcgcaatctcggctctctgcaacttccgcctcctgggttcaagcaattctcctgcctcagcctcccgagtagctgggactacaggcatgtgccaccatgcctggggctgtcattgggacagtctgagatggggagtcgggggagacaatggatgaatggatggatgaatggacagcagtccagggagatgtccctgtgtgtcctgaactgggcccttcctccagtgagaagccttcctgagctgacttggggacagtggctatggtatgggcggtgttggcctctgggcagctacagaggagggtcatccctgagcactcaccgggcgcccgttctacactgcccatgtagacgattttctctttcgtcttcatggtggcttcgtagagtgggtgctgttcccgaatgtacccattcgacaggaaactgggcatctctgtggccctgaacatcccaggaggccgatcgtacagagacctctggtgcctgaccgcagttcacatccacatccctggaatagaccatcacaggctcttcacccttggcaggtggacaccattcaacctgccggggcaggatggacatggtagagaatgcagatagtttgcaggcacaggagcggaaggacatacttatgaagtatgacaagggacaccgagctgggctgccagaggacaaggggcctgagcccgttggaatcaacagcagcattgatcgttttggcattttgcatgagacggagctgcctcctgtgactgcacgggaggcgaagaaaattcggcgggagatgacacgaacgagcaagtggatggaaatgctgggagaatgggagacatataagcacagtagcaaactcatagatcgagtgtacaagggaattcccatgaacatccggggcccggtgtggtcagtcctcctgaacattcaggaaatcaagttgaaaaaccccggaagataccagatcatgaaggagaggggcaagaggtcatctgaacacatccaccacatcgacctggacgtgaggacgactctccggaaccatgtcttctttagggatcgatatggagccaagcagagggaactattctacatcctcctggcctattcggagtataacccggaggtgggctactgcagggacctgagccacatcaccgccttgttcctcctttatctgcctgaggaggacgcattctgggcactggtgcagctgctggccagtgagaggcactccctgccaggattccacagcccaaatggtgggacagtccaggggctccaagaccaacaggagcatgtggtacccaagtcacaacccaagaccatgtggcatcaggacaaggaaggtctatgcgggcagtgtgcctcgttaggctgccttctccggaacctgattgacgggatctctctcgggctcaccctgcgcctgtgggacgtgtatttggtggaaggagaacaggtgttgatgccaataaccagcattgctcttaaggttcagcagaagcgcctcatgaagacatccaggtgtggcctgtgggcacgtctgcggaaccaattcttcgatacctgggccatgaacgatgacaccgtgctcaagcatcttagggcctctacgaagaaactaacaaggaagcaaggggacctgccacccccagccaaacgcgagcaagggtccttggcacccaggcctgtgccggcttcacgtggtgggaagaccctctgcaaggggtataggcaggcccctccaggcccaccagcccagttccagcggcccatttgctcagcttccccgccatgggcatctcgtttttccacgccctgtcctggtggggctgtccgggaagacacgtaccctgtgggcactcagggtgtgcccagcctggccctggctcagggaggacctcagggttcctggagattcctggagtggaagtcaatgccccggctcccaacggacctggatatagggggcccttggttcccccattatgattttgaatggagctgctgggtccgtgccatatcccaggaggaccagctggccacctgctggcaggctgaacactgcggagaggttcacaacaaagatatgagttggcctgaggagatgtcttttacagcaaatagtagtaaaatagatagacaaaaggttcccacagaaaagggagccacaggtctaagcaacctgggaaacacatgcttcatgaactcaagcatccagtgcgttagtaacacacagccactgacacagtattttatctcagggagacatctttatgaactcaacaggacaaatcccattggtatgaaggggcatatggctaaatgctatggtgatttagtgcaggaactctggagtggaactcagaagagtgttgccccattaaagcttcggcggaccatagcaaaatatgctcccaagtttgatgggtttcagcaacaagactcccaagaacttctggcttttctcttggatggtcttcatgaagatctcaaccgagtccatgaaaagccatatgtggaactgaaggacagtgatggccgaccagactgggaagtagctgcagaggcctgggacaaccatctaagaagaaatagatcaattattgtggatttgttccatgggcagctaagatctcaagtcaaatgcaagacatgtgggcatataagtgtccgatttgaccctttcaattttttgtctttgccactaccaatggacagttacatggacttagaaataacagtgattaagttagatggtactacccctgtacggtatggactaagactgaatatggatgaaaagtacacaggtttaaaaaaacagctgagggatctctgtggacttaattcagaacaaatcctactagcagaagtacatgattccaacataaagatttctcctcttcaccatctacaaatggaatgttcaccctaactaccaatggggacctacccaaaccaatattcatccccaatggaatgccaaacactgttgtgccatgtggaactgagaagaacttcacaaatggaatggttaatggtcacatgccatctcttcctgacagcccctttacaggttacatcattgcagtccaccgaaaaatgatgaggacagaactgtatttcctgtcacctcaggagaatcgccccagcctctttggaatgccattgattgttccatgcactgtgcatacccggaagaaagacctatatgatgcggtttggattcaagtatcctggttagcaagaccactcccacctcaggaagctagtattcatgcccaggatcgtgataactgtatgggctatcaatatccattcactctacgagttgtgcagaaagatgggaactcctgtgcttggtgcccacagtatagattttgcagaggctgtaaaattgattgtggggaagacagagctttcattggaaatgcctatattgctgtggattggcaccccacagcccttcaccttcgctatcaaacatcccaggaaagggttgtagataagcatgagagtgtggagcagagtcggcgagcgcaagccgagcccatcaacctggacagctgtctccgtgctttcaccagtgaggaagagctaggggaaagtgagatgtactactgttccaagtgtaagacccactgcttagcaacaaagaagctggatctctggaggcttccacccttcctgattattcaccttaagcgatttcaatttgtaaatgatcagtggataaaatcacagaaaattgtcagatttcttcgggaaagttttgatccgagtgcttttttggtaccacgagacccggccctctgccagcataaaccactcacaccccagggggatgagctctccaagcccaggattctggcaagagaggtgaagaaagtggatgcgcagagttcggctggaaaagaggacatgctcctaagcaaaagcccatcctcactcagcgctaacatcagcagcagcccaaaaggttctccttcttcatcaagaaaaagtggaaccagctgtccctccagcaaaaacagcagccctaatagcagcccacggactttggggaggagcaaagggaggctccggctgccccagattggcagcaaaaataagccgtcaagtagtaagaagaacttggatgccagcaaagagaatggggctgggcagatctgtgagctggctgacgccttgagccgagggcatatgcgggggggcagccaaccagagctggtcactcctcaggaccatgaggtagctttggccaatggattcctttatgagcatgaagcatgtggcaatggctgtggcgatggctacagcaatggtcagcttggaaaccacagtgaagaagacagcactgatgaccaaagagaagacactcatattaagcctatttataatctatatgcaatttcatgccattcaggaattctgagtgggggccattacatcacttatgccaaaaacccaaactgcaagtggtactgttataatgacagcagctgtgaggaacttcaccctgatgaaattgacaccgactctgcctacattcttttctatgagcagcaggggatagactacgcacaatttctgccaaagattgatggcaaaaagatggcagacacaagcagtacggatgaagactctgagtctgattacgaaaagtactctatgttacagtaaagctaccactctggctgctagacagcttggtggcgagggagatgactccttgtagctgatacttggcaaaagtgtcactgaaagacaagctaaatgtagttattttatcctgttagaacaaaaattctaattaaaatagttaacttgaagagtagaaacaattgtattttgaagtctcatacaagctgtctgatagagaactttcaggcagatcccaccattagcctgtaaacaaaaggtgtggcaccagccacctgggaccaaataagaattgaattgtgcttgtccagatatgaacaaatatgtagtgagtatagagtttaccaataatcataacaaatattaaagatttccttggagtcagaggaaaaaacaaacaattataatgttgtctagggacgacatgatacgctacctcctttttcctgaagttttattccattatattgacaagatggagaaagcaagatcatgaaggtgtgcaaatgattcttacggcatggacaaggatttttcaatttattttttaaactgtttccataccctttctttttcttgctttttgtttttgccattgtgtttacgtttgagacacaaccagtcattggtggcaggggcatagagtggtcagtctgaaagggaggctctcttaagagctatgtgccttccaaccagagggagacccagtagaaagaaaaacatcctgggaaatccagctaccagggccctcccagtggaggcatcttacatttaggctacttcaagtatcctcagaaatgtattctgcacccccggccccgcccatgctgagggaaggggagcagttgccaatatttgcaccatcttcacatgcacatgttgcaacaagagcttctgggaaggtaagcggcatcggagctagatcacgtttcacaattagtggttattcttttctgtgtttgttttgcactttaaaaaagagagaacacatgcaaatgaacttgcttgtgtgtatttgatggctctaagggctataaattacaaacaaaacacatcccagacattaggagttcataagtatatttaatgaaattggtggttttaggaagtcaactttagttttgctttgtttgcatgtccactggtttttttattttgatatttgtctttttttaaattttacagtagtcattgaaagttatgtttctttgcttacttcattttttccctctaattatttaagattggaacaaaagtataaatattatttatttgaggtagaatttttttcatgtagtttcttaatatatacttgaaggaaatgtttcaccttatttttggtctttgtttattcatttagaccctgcaagttgattctcattgccagattccattaccctttcttcctcataggtagtaattaccaatgtaactaagcatttgtgttctgatatctgaggccagtaactattaatatctagttctcagagcatttggaaaggttatcttaaatggctacctaaattgaaatccttttcagaaaaaatataattgcaagtaggtaggagtggcctaaattgtctaatgtaataaagtcagacaaaatgcacactttatagtttcaagattttcagtaaataaaatctgtccattcctacctggacatgtcccattaaaaagtggaagattttaaataatttctttacagatgttttatttaaacaggtagcacaatctactaatgttgtgtgatttgtgttatactggttgtaattaatttttttaattcatgaactagcggaaaatttattaaattaactattaactacattcaccttgtaaattactgtataaaacttgttgacaatgcactgactttagaaagatgttaatgtacataaatagagtgtaaataaaatagtgttgatgtactgaaatatgaactgtatcaaaagtattggtaattgtatatggggtgtacctgtttatctgttaactattatccaaacaaattaaatactgtggttgcctct

SEQ ID NO: 33569 - DNA, 576 bp, Homo sapiens
  source 1..576: mol_type = unassigned DNA
gtctgtgttctacggcagttacacacacgcagtggtattcacaagcggttttgtggactcaaaggttttctccctgagaggcataacccaggccagctgattcatcagaatcaggaaactgggcatctctgtggccctgaacatcccaggaggccgatcgtacagagacctctggtgcctgaccgcagttcacatccacatccctggaatagaccatcacaggctcttcacccttggcaggtggacaccattcaacctgccggggcaggatggacatggtagagaatgcagatagtttgcaggcacaggagcggaaggacatacttatgaagtatgacaagggacaccgagctgggctgccagaggacaaggggcctgagcccgttggaatcaacagcagcattgatcgttttggcattttgcatgagacggagctgcctcctgtgactgcacgggaggcgaagaaaattcggcgggagatgacaccgtgctcaagcatcttagggcctctacgaagaaactaacaaggaagcaaggggacctgccacccccagccaaacgcgagcaagggtcctt

SEQ ID NO: 33570 - DNA, 572 bp, Homo sapiens
  source 1..572: mol_type = unassigned DNA
gtctgtgttctacggcagttacacacacgcagtggtattcacaagcggttttgtggactcaaaggttttctccctgagaggcataacccaggccagctgattcatcagaatcaggaaactgggcatctctgtggccctgaacatcccaggaggccgatcgtacagagacctctggtgcctgaccgcagttcacatccacatccctggaatagaccatcacaggctcttcacccttggcaggtggacaccattcaacctgccggggcaggatggacatggtagagaatgcagatagtttgcaggcacaggagcggaaggacatacttatgaagtatgacaagggacaccgagctgggctgccagaggacaaggggagcccgttggaatcaacagcagcattgatcgttttggcattttgcatgagacggagctgcctcctgtgactgcacgggaggcgaagaaaattcggcgggagatgacaccgtgctcaagcatcttagggcctctacgaagaaactaacaaggaagcaaggggacctgccacccccagccaaacgcgagcaagggtcctt

SEQ ID NO: 33571 - DNA, 5412 bp, Homo sapiens
  source 1..5412: mol_type = unassigned DNA
gtacgtgcgcgtctccctgccgccgccgccgcccgccgcgggccgccccggggccgccgtcgccgacgacgcgcgggaggaggaggaggaggccgccccgccgccgccgccgccgccgccgccccggctcgccgccgcccgcccgccgggctcgcagccccggcccccggccgcaggcgaggcccaggccgcggccgacatgaaccaccagcagcagcagcagcagcagaaagcgggcgagcagcagttgagcgagcccgaggacatggagatggaagcgggagatacagatgacccaccaagaattactcagaaccctgtgatcaatgggaatgtggccctgagtgatggacacaacaccgcggaggaggacatggaggatgacaccagttggcgctccgaggcaacctttcagttcactgtggagcgcttcagcagactgagtgagtcggtccttagccctccgtgttttgtgcgaaatctgccatggaagattatggtgatgccacgcttttatccagacagaccacaccaaaaaagcgtaggattctttctccagtgcaatgctgaatctgattccacgtcatggtcttgccatgcacaagcagtgctgaagataataaattacagagatgatgaaaagtcgttcagtcgtcgtattagtcatttgttcttccataaagaaaatgattggggattttccaattttatggcctggagtgaagtgaccgatcctgagaaaggatttatagatgatgacaaagttacctttgaagtctttgtacaggcggatgctccccatggagttgcgtgggattcaaagaagcacacaggctacgtcggcttaaagaatcagggagcgacttgttacatgaacagcctgctacagacgttatttttcacgaatcagctacgaaaggctgtgtacatgatgccaaccgagggggatgattcgtctaaaagcgtccctttagcattacaaagagtgttctatgaattacagcatagtgataaacctgtaggaacaaaaaagttaacaaagtcatttgggtgggaaactttagatagcttcatgcaacatgatgttcaggagctttgtcgagtgttgctcgataatgtggaaaataagatgaaaggcacctgtgtagagggcaccatacccaaattattccgcggcaaaatggtgtcctatatccagtgtaaagaagtagactatcggtctgatagaagagaagattattatgatatccagctaagtatcaaaggaaagaaaaatatatttgaatcatttgtggattatgtggcagtagaacagctcgatggggacaataaatacgacgctggggaacatggcttacaggaagcagagaaaggtgtgaaattcctaacattgccaccagtgttacatctacaactgatgagatttatgtatgaccctcagacggaccaaaatatcaagatcaatgataggtttgaattcccagagcagttaccacttgatgaatttttgcaaaaaacagatcctaaggaccctgcaaattatattcttcatgcagtcctggttcatagtggagataatcatggtggacattatgtggtttatctaaaccccaaaggggatggcaaatggtgtaaatttgatgacgacgtggtgtcaaggtgtactaaagaggaagcaattgagcacaattatgggggtcacgatgacgacctgtctgttcgacactgcactaatgcttacatgttagtctacatcagggaatcaaaactgagtgaagttttacaggcggtcaccgaccatgatattcctcagcagttggtggagcgattacaagaagagaaaaggatcgaggctcagaagcggaaggagcggcaggaagcccatctctatatgcaagtgcagatagtcgcagaggaccagttttgtggccaccaagggaatgacatgtacgatgaagaaaaagtgaaatacactgtgttcaaagtattgaagaactcctcgcttgctgagtttgttcagagcctctctcagaccatgggatttccacaagatcaaattcgattgtggcccatgcaagcaaggagtaatggaacaaaacgaccagcaatgttagataatgaagccgacggcaataaaacaatgattgagctcagtgataatgaaaacccttggacaatattcctggaaacagttgatcccgagctggctgctagtggagcgaccttacccaagtttgataaagatcatgatgtaatgttatttttgaagatgtatgatcccaaaacgcggagcttgaattactgtgggcatatctacacaccaatatcctgtaaaatacgtgacttgctcccagttatgtgtgacagagcaggatttattcaagatactagccttatcctctatgaggaagttaaaccgaatttaacagagagaattcaggactatgacgtgtctcttgataaagcccttgatgaactaatggatggtgacatcatagtatttcagaaggatgaccctgaaaatgataacagtgaattacccaccgcaaaggagtatttccgagatctctaccaccgcgttgatgtcattttctgtgataaaacaatccctaatgatcctggatttgtggttacgttatcaaatagaatgaattattttcaggttgcaaagacagttgcacagaggctcaacacagatccaatgttgctgcagtttttcaagtctcaaggttatagggatggcccaggtaatcctcttagacataattatgaaggtactttaagagatcttctacagttcttcaagcctagacaacctaagaaactttactatcagcagcttaagatgaaaatcacagactttgagaacaggcgaagttttaaatgtatatggttaaacagccaatttagggaagaggaaataacactatatccagacaagcatgggtgtgtccgggacctgttagaagaatgtaaaaaggccgtggagcttggggagaaagcatcagggaaacttaggctgctagaaattgtaagctacaaaatcattggtgttcatcaagaagatgaactattagaatgtttatctcctgcaacgagccggacgtttcgaatagaggaaatccctttggaccaggtggacatagacaaagagaatgagatgcttgtcacagtggcgcatttccacaaagaggtcttcggaacgttcggaatcccgtttttgctgaggatacaccagggcgagcattttcgagaagtgatgaagcgaatccagagcctgctggacatccaggagaaggagtttgagaagtttaaatttgcaattgtaatgatgggccgacaccagtacataaatgaagacgagtatgaagtaaatttgaaagactttgagccacagcccggtaatatgtctcatcctcggccttggctagggctcgaccacttcaacaaagccccaaagaggagtcgctacacttaccttgaaaaggccattaaaatccataactgatttccaagctggtgtgttcaaggcgaggacggtgtgtgggtggccccttaacagcctagaactttggtgcacgtgccctctagccgaagtcttcagcaagaggattcgctgctggtgttaattttattttattgaggctgttcagtttggcttctctgtatctattgactgccctttttgagcaaaatgaagatgtttttataaagcttggatgccaatgagagttattttatggtaaccacagtgcaaggcaactgtcagcgcaatgggggagaagaggttagtggatcgggggtccctggctcaaggtctctgggctgtccctagtgggcacgagtggctcggctgccttcctggggtcccgtgcaccagccctgcagctagcaagtcttgtgtttaggctcgtctgacctatttccttcagttatactttcaatgaccttttgtgcatctgttaaggcaaaacagagaaactcacaacctaataaatagcgctcttcccttcattgtgtgcattgtcggcccttcctcgggttctcctcctccagctgcctgggggctttttaataaacttgtctcacctcgtcagccactactgtctgcagcccctttgcaaagtggatgcactgaatacagtccggacagacattgtgggggtctttttattaaatcaagaacattgttaaattcaattaaggtttactctgctgccttggcagacttacgatctcaacagttcatacgagcaggtgaaaggattataaatagaatttcgttaaagtggaacagacgacaagaaagccttttagcaagagggcatgctcactagtggttagtaagctgtcgactttgtaaaaaagttaaaaatgaaaaaaaaaggaaaaatgaattgtatatttaatgaatgaacatgtacaatttgccactgggaggaggttcctttttgttgggtgagtctgcaagtgaatttcactgatgttgatattcattgtgtgtagttttatttcggtcccagccccgtttccttttattttggagctaatgccagctgcgtgtctagttttgagtgcagtaaaatagaatcagcaaatcactcttatttttcatccttttccggtattttttgggttgtttctgtgggagcagtgtacaccaactcttcctgtatattgcctttttgctggaaaatgttgtatgttgaataaaattttctataaaaattataattcagtgagttacgtggaagtggaggaagatttctactctccctggaaacaggcctgggaaaccttggcatttgtaacaaggtttcactgagatgtacttttccttctaattccgttttgcgggggcagggtctcttgtttctttttttttttttttttttttttagcctctaactagtcacatttactcttaagaaatgaaaggttttccaggagagaactgtgtacaaataaggtgactggagatgtgacctgatgtgtcacgaggcccttcggggcggcaggcgctatcgtgggcgtggtccttgcaccgtcccatcggccttgccttccagctccgtggcacggtttcctggtctttgggccagtgtgtaccttggagtgacttcctttctcaacttccactgcagtgtgtgtgccttctgctctgagagctgccttgtgacccgtgtgatagaaagcagggagtgagggtccccgcggacctggcccttccctccttcctcccccagaaagaggagttagagcaggggtgcgagagccgttcgctgtgggtttgtctttgaacaaacattaaggtgtcttgtttttgttctgggctgggggttggctgtagtcttaggtaactgaaagttcctactctcccttaaggtattaaatgactctttttccaaagaa

SEQ ID NO: 33572 - DNA, 3579 bp, Homo sapiens
  source 1..3579: mol_type = unassigned DNA
aaaaaataaaaaagaatgctgaggtagagctcctagagattctatgcagtcactctgatgtgggtgagagaacctcccccatcccccagcagaggccactgcagagccatgcagagatggctgggaaccacaggcttgggctggaagcgggagatacagatgacccaccaagaattactcagaaccctgtgatcaatgggaatgtggccctgagtgatggacacaacaccgcggaggaggacatggaggatgacaccagttggcgctccgaggcaacctttcagttcactgtggagcgcttcagcagactgagtgagtcggtccttagccctccgtgttttgtgcgaaatctgccatggaagattatggtgatgccacgcttttatccagacagaccacaccaaaaaagcgtaggattctttctccagtgcaatgctgaatctgattccacgtcatggtcttgccatgcacaagcagtgctgaagataataaattacagagatgatgaaaagtcgttcagtcgtcgtattagtcatttgttcttccataaagaaaatgattggggattttccaattttatggcctggagtgaagtgaccgatcctgagaaaggatttatagatgatgacaaagttacctttgaagtctttgtacaggcggatgctccccatggagttgcgtgggattcaaagaagcacacaggctacgtcggcttaaagaatcagggagcgacttgttacatgaacagcctgctacagacgttatttttcacgaatcagctacgaaaggctgtgtacatgatgccaaccgagggggatgattcgtctaaaagcgtccctttagcattacaaagagtgttctatgaattacagcatagtgataaacctgtaggaacaaaaaagttaacaaagtcatttgggtgggaaactttagatagcttcatgcaacatgatgttcaggagctttgtcgagtgttgctcgataatgtggaaaataagatgaaaggcacctgtgtagagggcaccatacccaaattattccgcggcaaaatggtgtcctatatccagtgtaaagaagtagactatcggtctgatagaagagaagattattatgatatccagctaagtatcaaaggaaagaaaaatatatttgaatcatttgtggattatgtggcagtagaacagctcgatggggacaataaatacgacgctggggaacatggcttacaggaagcagagaaaggtgtgaaattcctaacattgccaccagtgttacatctacaactgatgagatttatgtatgaccctcagacggaccaaaatatcaagatcaatgataggtttgaattcccagagcagttaccacttgatgaatttttgcaaaaaacagatcctaaggaccctgcaaattatattcttcatgcagtcctggttcatagtggagataatcatggtggacattatgtggtttatctaaaccccaaaggggatggcaaatggtgtaaatttgatgacgacgtggtgtcaaggtgtactaaagaggaagcaattgagcacaattatgggggtcacgatgacgacctgtctgttcgacactgcactaatgcttacatgttagtctacatcagggaatcaaaactgagtgaagttttacaggcggtcaccgaccatgatattcctcagcagttggtggagcgattacaagaagagaaaaggatcgaggctcagaagcggaaggagcggcaggaagcccatctctatatgcaagtgcagatagtcgcagaggaccagttttgtggccaccaagggaatgacatgtacgatgaagaaaaagtgaaatacactgtgttcaaagtattgaagaactcctcgcttgctgagtttgttcagagcctctctcagaccatgggatttccacaagatcaaattcgattgtggcccatgcaagcaaggagtaatggaacaaaacgaccagcaatgttagataatgaagccgacggcaataaaacaatgattgagctcagtgataatgaaaacccttggacaatattcctggaaacagttgatcccgagctggctgctagtggagcgaccttacccaagtttgataaagatcatgatgtaatgttatttttgaagatgtatgatcccaaaacgcggagcttgaattactgtgggcatatctacacaccaatatcctgtaaaatacgtgacttgctcccagttatgtgtgacagagcaggatttattcaagatactagccttatcctctatgaggaagttaaaccgaatttaacagagagaattcaggactatgacgtgtctcttgataaagcccttgatgaactaatggatggtgacatcatagtatttcagaaggatgaccctgaaaatgataacagtgaattacccaccgcaaaggagtatttccgagatctctaccaccgcgttgatgtcattttctgtgataaaacaatccctaatgatcctggatttgtggttacgttatcaaatagaatgaattattttcaggttgcaaagacagttgcacagaggctcaacacagatccaatgttgctgcagtttttcaagtctcaaggttatagggatggcccaggtaatcctcttagacataattatgaaggtactttaagagatcttctacagttcttcaagcctagacaacctaagaaactttactatcagcagcttaagatgaaaatcacagactttgagaacaggcgaagttttaaatgtatatggttaaacagccaatttagggaagaggaaataacactatatccagacaagcatgggtgtgtccgggacctgttagaagaatgtaaaaaggccgtggagcttggggagaaagcatcagggaaacttaggctgctagaaattgtaagctacaaaatcattggtgttcatcaagaagatgaactattagaatgtttatctcctgcaacgagccggacgtttcgaatagaggaaatccctttggaccaggtggacatagacaaagagaatgagatgcttgtcacagtggcgcatttccacaaagaggtcttcggaacgttcggaatcccgtttttgctgaggatacaccagggcgagcattttcgagaagtgatgaagcgaatccagagcctgctggacatccaggagaaggagtttgagaagtttaaatttgcaattgtaatgatgggccgacaccagtacataaatgaagacgagtatgaagtaaatttgaaagactttgagccacagcccggtaatatgtctcatcctcggccttggctagggctcgaccacttcaacaaagccccaaagaggagtcgctacacttaccttgaaaaggccattaaaatccataactgatttccaagctggtgtgttcaaggcgaggacggtgtgtgggtggccccttaacagcctagaactttggtgcacgtgccctctagccgaagtcttcagcaagaggattcgctgctggtgttaattttattttattgaggctgttcagtttggcttctctgtatctattgactgccctttttgagcaaaatgaagatgtttttat

SEQ ID NO: 33573 - DNA, 3554 bp, Homo sapiens
  source 1..3554: mol_type = unassigned DNA
gatgtgggtgagagaacctcccccatcccccagcagaggccactgcagagccatgcagagatggctgggaaccacaggcttgggctggaagcgggagatacagatgacccaccaagaattactcagaaccctgtgatcaatgggaatgtggccctgagtgatggacacaacaccgcggaggaggacatggaggatggggagtaacggggcagttgaaagaaaccatcagtcacgggctgcaccaccagaaggactgctgttcagacctcctgccaaaagttcagcctccatgagaaactgcagccgtagttgagagttctctcacagtgcggtttacccctggcagctggctgaggcaatatctgaggaagacaccagttggcgctccgaggcaacctttcagttcactgtggagcgcttcagcagactgagtgagtcggtccttagccctccgtgttttgtgcgaaatctgccatggaagattatggtgatgccacgcttttatccagacagaccacaccaaaaaagcgtaggattctttctccagtgcaatgctgaatctgattccacgtcatggtcttgccatgcacaagcagtgctgaagataataaattacagagatgatgaaaagtcgttcagtcgtcgtattagtcatttgttcttccataaagaaaatgattggggattttccaattttatggcctggagtgaagtgaccgatcctgagaaaggatttatagatgatgacaaagttacctttgaagtctttgtacaggcggatgctccccatggagttgcgtgggattcaaagaagcacacaggctacgtcggcttaaagaatcagggagcgacttgttacatgaacagcctgctacagacgttatttttcacgaatcagctacgaaaggctgtgtacatgatgccaaccgagggggatgattcgtctaaaagcgtccctttagcattacaaagagtgttctatgaattacagcatagtgataaacctgtaggaacaaaaaagttaacaaagtcatttgggtgggaaactttagatagcttcatgcaacatgatgttcaggagctttgtcgagtgttgctcgataatgtggaaaataagatgaaaggcacctgtgtagagggcaccatacccaaattattccgcggcaaaatggtgtcctatatccagtgtaaagaagtagactatcggtctgatagaagagaagattattatgatatccagctaagtatcaaaggaaagaaaaatatatttgaatcatttgtggattatgtggcagtagaacagctcgatggggacaataaatacgacgctggggaacatggcttacaggaagcagagaaaggtgtgaaattcctaacattgccaccagtgttacatctacaactgatgagatttatgtatgaccctcagacggaccaaaatatcaagatcaatgataggtttgaattcccagagcagttaccacttgatgaatttttgcaaaaaacagatcctaaggaccctgcaaattatattcttcatgcagtcctggttcatagtggagataatcatggtggacattatgtggtttatctaaaccccaaaggggatggcaaatggtgtaaatttgatgacgacgtggtgtcaaggtgtactaaagaggaagcaattgagcacaattatgggggtcacgatgacgacctgtctgttcgacactgcactaatgcttacatgttagtctacatcagggaatcaaaactgagtgaagttttacaggcggtcaccgaccatgatattcctcagcagttggtggagcgattacaagaagagaaaaggatcgaggctcagaagcggaaggagcggcaggaagcccatctctatatgcaagtgcagatagtcgcagaggaccagttttgtggccaccaagggaatgacatgtacgatgaagaaaaagtgaaatacactgtgttcaaagtattgaagaactcctcgcttgctgagtttgttcagagcctctctcagaccatgggatttccacaagatcaaattcgattgtggcccatgcaagcaaggagtaatggaacaaaacgaccagcaatgttagataatgaagccgacggcaataaaacaatgattgagctcagtgataatgaaaacccttggacaatattcctggaaacagttgatcccgagctggctgctagtggagcgaccttacccaagtttgataaagatcatgatgtaatgttatttttgaagatgtatgatcccaaaacgcggagcttgaattactgtgggcatatctacacaccaatatcctgtaaaatacgtgacttgctcccagttatgtgtgacagagcaggatttattcaagatactagccttatcctctatgaggaagttaaaccgaatttaacagagagaattcaggactatgacgtgtctcttgataaagcccttgatgaactaatggatggtgacatcatagtatttcagaaggatgaccctgaaaatgataacagtgaattacccaccgcaaaggagtatttccgagatctctaccaccgcgttgatgtcattttctgtgataaaacaatccctaatgatcctggatttgtggttacgttatcaaatagaatgaattattttcaggttgcaaagacagttgcacagaggctcaacacagatccaatgttgctgcagtttttcaagtctcaaggttatagggatggcccaggtaatcctcttagacataattatgaaggtactttaagagatcttctacagttcttcaagcctagacaacctaagaaactttactatcagcagcttaagatgaaaatcacagactttgagaacaggcgaagttttaaatgtatatggttaaacagccaatttagggaagaggaaataacactatatccagacaagcatgggtgtgtccgggacctgttagaagaatgtaaaaaggccgtggagcttggggagaaagcatcagggaaacttaggctgctagaaattgtaagctacaaaatcattggtgttcatcaagaagatgaactattagaatgtttatctcctgcaacgagccggacgtttcgaatagaggaaatccctttggaccaggtggacatagacaaagagaatgagatgcttgtcacagtggcgcatttccacaaagaggtcttcggaacgttcggaatcccgtttttgctgaggatacaccagggcgagcattttcgagaagtgatgaagcgaatccagagcctgctggacatccaggagaaggagtttgagaagtttaaatttgcaattgtaatgatgggccgacaccagtacataaatgaagacgagtatgaagtaaatttgaaagactttgagccacagcccggtaatatgtctcatcctcggccttggctagggctcgaccacttcaacaaagccccaaagaggagtcgctacacttaccttgaaaaggccattaaaatccataactgatttccaagctggtgtgttcaaggcgaggacggtgtgtgggtggccccttaacagccta

SEQ ID NO: 33574 - DNA, 1966 bp, Homo sapiens
  source 1..1966: mol_type = unassigned DNA
aagaacaagattgcactctgagagaaggaaggcatggtgaagaggtggtgttgtggtgggccttaaagtaggcttaggacttgagctcggggatttggagcgggagatacagatgacccaccaagaattactcagaaccctgtgatcaatgggaatgtggccctgagtgatggacacaacaccgcggaggaggacatggaggatgacaccagttggcgctccgaggcaacctttcagttcactgtggagcgcttcagcagactgagtgagtcggtccttagccctccgtgttttgtgcgaaatctgccatggaagattatggtgatgccacgcttttatccagacagaccacaccaaaaaagcgtaggattctttctccagtgcaatgctgaatctgattccacgtcatggtcttgccatgcacaagcagtgctgaagataataaattacagagatgatgaaaagtcgttcagtcgtcgtattagtcatttgttcttccataaagaaaatgattggggattttccaattttatggcctggagtgaagtgaccgatcctgagaaaggatttatagatgatgacaaagttacctttgaagtctttgtacaggcggatgctccccatggagttgcgtgggattcaaagaagcacacaggctacgtcggcttaaagaatcagggagcgacttgttacatgaacagcctgctacagacgttatttttcacgaatcagctacgaaaggctgtgtacatgatgccaaccgagggggatgattcgtctaaaagcgtccctttagcattacaaagagtgttctatgaattacagcatagtgataaacctgtaggaacaaaaaagttaacaaagtcatttgggtgggaaactttagatagcttcatgcaacatgatgttcaggagctttgtcgagtgttgctcgataatgtggaaaataagatgaaaggcacctgtgtagagggcaccatacccaaattattccgcggcaaaatggtgtcctatatccagtgtaaagaagtagactatcggtctgatagaagagaagattattatgatatccagctaagtatcaaaggaaagaaaaatatatttgaatcatttgtggattatgtggcagtagaacagctcgatggggacaataaatacgacgctggggaacatggcttacaggaagcagagaaaggtgtgaaattcctaacattgccaccagtgttacatctacaactgatgagatttatgtatgaccctcagacggaccaaaatatcaagatcaatgataggtttgaattcccagagcagttaccacttgatgaatttttgcaaaaaacagatcctaaggaccctgcaaattatattcttcatgcagtcctggttcatagtggagataatcatggtggacattatgtggtttatctaaaccccaaaggggatggcaaatggtgtaaatttgatgacgacgtggtgtcaaggtgtactaaagaggaagcaattgagcacaattatgggggtcacgatgacgacctgtctgttcgacactgcactaatgcttacatgttagtctacatcagggaatcaaaactgacagttggtggagcgattacaagaagagaaaaggatcgaggctcagaagcggaaggagcggcaggaagcccatctctatatgcaagtgcagatagtcgcagaggaccagttttgtggccaccaagggaatgacatgtacgatgaagaaaaagtgaaatacactgtgttcaaagtattgaagaactcctcgcttgctgagtttgttcagagcctctctcagaccatgggatttccacaagatcaaattcgattgtggcccatgcaagcaaggagtaatggaacaaaacgaccagcaatgttagataatgaagccgacggcaataaaacaatgattgagctcagtgataatgaaaacccttggacaatattcctg

SEQ ID NO: 33575 - DNA, 8754 bp, Homo sapiens
  source 1..8754: mol_type = unassigned DNA
gcggccgccttagcgcccggtgcttgggtcggcgccgggagcgaggagcgagctacttcaaagccaccaggcctggagcggggacagaggcggcgactaggggaaggtgaagccgtcgctgcaggaggaggagcaggaggaggtgacgcaggagaaacgcaccgcccggagcccgtctgagctcagcgagagccccagcctgaggggagaaggggaagagggccgtcgccggccaaggaggaggaggaggcgggcgcggcgaggagcgagttccggcgccggtgtgcagccttttggttgagacgcccgcagccccgagcccggccgccgcagcctttcgatacactttgttgccggtcacccccgggcctgggatgcacccagggtaggtctcgtcccgggaccgagccccaccgtcgcctggtgcctcccgcctccgtgtgccctggttgtgagaagacgtctgtgtcgtgcggttatgcaatggtctctgcaagatggtttattcttgaattggacctttttaagactgacaaatgctggtacttcatcttctataagtggactataatttcttttctcaagacaactacataagcagacaaaattgcaaagatctgccctgtgtcgagtatgacagccacgactcgtggctctccggtcggagggaatgacaaccagggccaggctcctgatggacagtctcagccccccctccaacagaatcagacttcatcgcctgattcttccaatgaaaattccccggcaactcccccagatgagcaaggtcaaggtgatgccccaccacagcttgaagatgaggaacctgcatttccacatactgacttggccaagttggatgacatgatcaacaggcctcgatgggtggttccagttttgccgaaaggggaattagaagtgcttttagaagctgctattgatcttagtaaaaagggccttgatgttaaaagtgaagcatgtcagcgatttttccgtgatgggctaacaatatcattcactaaaattcttacagatgaagcagtgagtggctggaagtttgaaattcataggtgtattattaacaatactcatcgtctggtggagctatgtgtggccaagttgtcccaagactggtttccacttttagaacttcttgccatggccttaaatcctcattgcaaattccatatctacaatggtacacgtccatgtgaatcagtttcctcaagtgttcagttgcctgaagatgaactctttgctcgttctccagatcctcgatcaccaaagggttggctagtggatcttctcaacaaatttggcactttaaatgggttccagattttgcatgatcgttttattaatggatcagcattaaacgttcaaataattgcagcccttattaaaccatttgggcaatgctatgagtttctcactcttcatacagtgaaaaagtactttcttccaataatagaaatggttccacagtttttagaaaacttaactgatgaagaactgaaaaaagaagcaaagaatgaagccaaaaatgatgctctttcaatgattattaaatctttgaagaatttagcttcaagggttccaggacaagaagaaactgttaaaaacttagaaatatttaggttaaaaatgatacttagattattgcaaatttcttctttcaatggaaagatgaatgcactgaatgaagttaataaggtgatatctagtgtatcatactatactcatcgacatggtaatcctgaggaggaagagtggctcacagctgaacgaatggcagaatggatacagcagaacaatatcttatccatagtgttgcgagatagtcttcatcagccacagtatgtagaaaagttagagaagattcttcgttttgtcatcaaagaaaaagctctgaccttacaggatcttgataatatctgggcagcacaggcagggaaacatgaagccattgtgaagaatgtacatgatctcctggcaaaattggcatgggatttttctcctgaacaacttgatcatctttttgattgttttaaggccagttggacaaatgcgagtaaaaagcaacgtgaaaagctacttgagctgatacgtcgtcttgcagaagatgataaagatggtgtgatggcacacaaagtgttgaaccttctgtggaatctggctcacagtgatgatgtgcctgtagatatcatggacctggctctcagtgcccacataaaaatactagattacagttgctcccaggaccgtgatacacaaaagatccaatggatagatcgctttatagaagaacttcgcacaaatgacaaatgggttattcccgcactgaaacaaattagagaaatttgtagtttgtttggtgaagcgcctcaaaatttgagtcaaactcagcgaagtccccatgtgttttatcgccatgacttaatcaatcaacttcaacacaatcatgccctagttactttggtagcagaaaaccttgcaacttacatggaaagcatgagactatatgctagagaccatgaagattatgacccacaaactgtgaggctgggaagtagatatagtcatgttcaagaagttcaagaacggcttaacttccttagatttttattgaaggatggtcagctgtggctatgtgctcctcaggcaaaacaaatatggaaatgcttagctgagaatgcagtttacctttgtgatcgtgaagcctgttttaagtggtattccaagttgatgggggatgaaccagacttagatcctgatattaataaggacttctttgaaagtaatgtgcttcagcttgatccttctctgttaactgaaaatggaatgaagtgttttgagcgattcttcaaagctgtgaattgtcgagaaggaaaactagtagcaaaaaggagagcctatatgatggatgacttggagttaataggattagattacctttggagggtcgtgattcagagtaatgatgatattgccagcagagctatagatctcctcaaagagatatacacgaaccttggtccaagactacaagtcaatcaggtggtgatccatgaagacttcattcagtcttgttttgatcgtctgaaggcttcctatgacacattgtgtgttttggatggtgacaaagacagtgttaattgtgcaagacaggaagctgttcgaatggttcgagtattaactgttttaagggaatatataaatgaatgtgacagtgattatcatgaggaaagaacaattctccctatgtcgagagcattccgcggtaaacacctctcttttgtagttcgatttccaaaccagggcagacaggttgatgacttggaggtatggtctcatacaaatgatacaattggttcagtacgacgatgtattctcaatcgtattaaagccaacgtagcccatacaaaaattgagctctttgtgggcggtgagctgatagatcctgcagatgatagaaagttgattggacaattaaacttaaaagataaatcgcttattacagccaaacttacacagataagttccaatatgccttcaagccctgatagctcttctgattcctccactggatctcctggaaaccatggtaatcattacagtgatggtcccaatccagaagtggaaagctgtttgcctggagtgataatgtcactgcatcccagatacatctcttttctttggcaagttgcagacttaggtagcagcctaaatatgccaccccttagagatggagcaagagtacttatgaaacttatgccgccagatagcacaacgatagaaaaattaagagctatttgtttagaccatgccaaacttggagaaagcagccttagtccatctcttgactcacttttctttggtccttcagcctcacaagtgctatatctaacagaggtagtctatgccttgttaatgcctgctggtgcacctctggctgatgattcctctgattttcagtttcacttcttgaaaagtggtggcctaccccttgtactgagtatgctaaccagaaataacttcctaccgaatgcagatatggaaactcgaaggggtgcctacctcaatgctcttaaaatagccaagcttttgctaactgccattggctatggtcatgttcgagctgtggcagaagcttgtcagccaggtgtagaaggtgtgaatcccatgacacagatcaaccaagttacccatgatcaagcagtggtgctacaaagtgcccttcagagcattcctaatccatcatccgagtgcatgcttagaaatgtgtcagttcgtcttgctcagcagatatctgatgaggcttcaagatatatgcctgatatttgtgtaattagagctatacaaaaaattatctgggcatcaggatgtgggtcgttacagctagtatttagcccaaatgaagaaatcactaaaatttatgagaagaccaatgcaggcaatgagccagacttggaagacgaacaggtttgctgtgaagcattggaagtgatgaccttatgttttgccttgattccaacagccttagatgctcttagtaaagaaaaggcttggcagacattcatcattgacttactattgcactgtcacagcaaaactgttcgtcaggtggcacaggagcagttctttttaatgtgcaccagatgttgcatgggacaccggcctctacttttcttcattactctactctttactgttttggggagcacagcaagagagagagctaaacactcaggcgactactttactcttttaagacaccttcttaattacgcttacaatagtaatattaatgtacccaatgctgaagttcttctcaataatgaaattgattggcttaaaagaattagggatgatgttaaaagaacaggagaaacgggtattgaagagacgatcttagagggccaccttggagtgacaaaggagttactggcctttcaaacttctgagaaaaaatttcatattggttgtgaaaaaggaggtgctaatctcattaaagaattaattgatgatttcatatttcctgcatccaatgtttacctacagtatatgagaaatggagagcttccagctgaacaggctattccggtctgtggttcaccacctacaattaatgctggttttgaattacttgtagcattagctgttggctgtgtgaggaatctcaaacaaatagtagattctttgactgaaatgtattacattggcacagcaataactacttgtgaagcacttactgagtgggaatatctgccacctgttggaccccgcccacccaaaggattcgtggggctgaaaaatgccggtgctacttgttacatgaattctgtgattcagcaactctacatgattccttccattaggaacggtattcttgccattgaaggcacaggtagtgatgtagatgatgatatgtctggggatgagaagcaggacaatgagagcaatgttgatcccagggatgatgtatttggatatcctcaacaatttgaagataaaccagcattaagtaaaactgaagatagaaaagagtacaacattggtgtcctaagacaccttcaggtcatctttggtcatttagctgcttctcgactgcaatactatgtgcccagaggattttggaaacagttcaggctttggggtgagcctgttaatctgcgtgaacaacacgatgctttagaattttttaattcattggtggatagtttagatgaagctttaaaagctttaggacatccagctatgctaagtaaagtcttaggaggttcctttgctgatcagaagatctgccaaggctgcccacataggtacgaatgtgaagaatcttttacgaccctaaacgtagacattagaaatcaccaaaatcttcttgattctttggaacagtatgtcaaaggagatttactagaaggtgcaaatgcatatcattgtgaaaaatgcaataaaaaggttgataccgtaaagcgcttgctgattaaaaaattacctcctgttcttgctatacaactaaagcgatttgactatgactgggaaagagaatgtgcaatcaagttcaatgattattttgaatttcctcgagagctggacatggaaccttacacagttgcaggtgtcgcaaagctggaaggggataatgtaaacccagagagtcagttgatacaacagagtgagcagtctgaaagtgagacagcaggaagcacaaaatacagacttgtgggtgtgctcgtacacagtggtcaagcgagtggggggcattattattcttacatcatccaaaggaatggtggagatggtgagagaaatcgctggtataaatttgatgatggtgatgtaacagaatgtaaaatggatgatgacgaagaaatgaaaaaccagtgttttggtggagagtacatgggagaagtgtttgatcacatgatgaagcgtatgtcatacaggcgccagaaaaggtggtggaatgcttatatacttttttatgaacgaatggacacaatagaccaagatgatgagttgataagatatatatcagagcttgctatcaccaccagacctcatcagattattatgccatcagccattgagagaagtgtacggaaacagaacgtacaattcatgcataaccgaatgcagtacagtatggagtattttcagtttatgaaaaaactgcttacatgtaatggcgtttacttaaaccctcctcccgggcaagatcacctgttgcctgaagcagaagaaatcactatgatcagtattcaacttgctgctaggttcctctttactacaggatttcacacaaagaaagtagtccgtggctctgccagtgattggtatgatgcattgtgtattctccttcgtcacagcaagaatgtacgtttttggtttgctcataacgtcctttttaatgtttcaaatcgcttctccgaataccttctggagtgccctagtgcagaagtgaggggtgcgtttgcaaaacttatagtctttattgcacatttttccttgcaagatgggccatgtccttcaccttttgcctctcctggaccttctagtcaggcttatgacaacttaagcttgagtgatcacttactaagagcagtactaaatctcttgagaagggaagtttcagagcatgggcgtcatttacagcagtatttcaacctgtttgtaatgtatgccaatttaggtgtggcagagaagacacagcttctgaaattgagtgtacctgctacttttatgcttgtgtctttagatgaaggtccaggtcctccaatcaaataccagtatgctgaattaggcaaattatactcagtagtgtcacagctgatccgctgttgcaatgtctcttcaagaatgcagtcttcaatcaatggtaatcctcctcttcccaatccttttggtgatcctaatttatcacaacctataatgccaattcagcagaatgtggcagacattttatttgtgagaacaagttatgtgaagaaaatcattgaagactgcagtaattcagaggaaaccgtcaaattgcttcgtttttgctgctgggagaatcctcagttctcatctactgtcctcagtgaacttctctggcaggttgcatattcctatacctatgaactgcggccctatttggatctgcttttgcaaatcttactgattgaggactcctggcaaactcacagaattcataatgcactgaaaggaattccagatgaccgagatgggctgtttgacacaatccagcgctctaagaatcactatcaaaaaagagcataccagtgtataaaatgtatggtagctctatttagtaactgtcctgttgcttaccaaatcctgcagggcaatggagatcttaaaagaaagtggacctgggcagtggaatggcttggagatgaacttgaaagaagaccatatactggcaatcctcagtacacttacaacaattggtctcccccagtgcaaagcaatgaaacgtccaatggttatttcttggagagatcacatagtgctaggatgacacttgcaaaagcttgtgaactctgtccagaggaggtaaaaaaagccaccagtgtgcagcagatagaaatggaagagagcaaagagccagatgaccaagatgctccagatgaacatgagtcgcctccacctgaagatgccccattgtacccccattcacctggatctcagtatcaacagaataaccatgtgcatggacagccatatacaggcccagcagcacatcacatgaacaaccctcagagaactggccaacgagcacaagaaaattatgaaggcagtgaagaagtatccccacctcaaaccaaggatcaatgaaatgcacataattaactggttccatcaagactgtgcacccaggccttacagtccaacctttttctgtgtctggctaatatttaaaactagaaaaactattcctaatcaacatggagtggagagtttattcactgtcttatctgcagaaatttgctgtcaatatataacccgcctgcagtggaaagtgtatagtgttttgtaataaatggcctgatgctaatgtgtaaatggcaaaggtgtatatagtatattaatgttgactgttaattcttaagcaagaaacttttttcttgatgagactcacagatctacacaaactacaaaagttaattttcttgttacacccactgcactctgcaaccagtgttgcctgcctcatggcagttggatcagctcctttacaaaaaa

SEQ ID NO: 33576 - DNA, 8371 bp, Homo sapiens
  source 1..8371: mol_type = unassigned DNA
gcggccgccttagcgcccggtgcttgggtcggcgccgggagcgaggagcgagctacttcaaagccaccaggcctggagcggggacagaggcggcgactaggggaaggtgaagccgtcgctgcaggaggaggagcaggaggaggtgacgcaggagaaacgcaccgcccggagcccgtctgagctcagcgagagccccagcctgaggggagaaggggaagagggccgtcgccggccaaggaggaggaggaggcgggcgcggcgaggagcgagttccggcgccggtgtgcagccttttggttgagacgcccgcagccccgagcccggccgccgcagcctttcgatacactttgttgccggtcacccccgggcctgggatgcacccagggtaggtctcgtcccgggaccgagccccaccgtcgcctggtgcctcccgcctccgtgtgccctggttgtgagaagacgtctgtgtcgtgcggttatgcaatggtctctgcaagatggtttattcttgaattggacctttttaagactgacaaatgctggtacttcatcttctataagtggactataatttcttttctcaagacaactacataagcagacaaaattgcaaagatctgccctgtgtcgagtatgacagccacgactcgtggctctccggtcggagggaatgacaaccagggccaggctcctgatggacagtctcagccccccctccaacagaatcagacttcatcgcctgattcttccaatgaaaattccccggcaactcccccagatgagcaaggtcaaggtgatgccccaccacagcttgaagatgaggaacctgcatttccacatactgacttggccaagttggatgacatgatcaacaggcctcgatgggtggttccagttttgccgaaaggggaattagaagtgcttttagaagctgctattgatcttagtaaaaagggccttgatgttaaaagtgaagcatgtcagcgatttttccgtgatgggctaacaatatcattcactaaaattcttacagatgaagcagtgagtggctggaagtttgaaattcataggtgtattattaacaatactcatcgtctggtggagctatgtgtggccaagttgtcccaagactggtttccacttttagaacttcttgccatggccttaaatcctcattgcaaattccatatctacaatggtacacgtccatgtgaatcagtttcctcaagtgttcagttgcctgaagatgaactctttgctcgttctccagatcctcgatcaccaaagggttggctagtggatcttctcaacaaatttggcactttaaatgggttccagattttgcatgatcgttttattaatggatcagcattaaacgttcaaataattgcagcccttattaaaccatttgggcaatgctatgagtttctcactcttcatacagtgaaaaagtactttcttccaataatagaaatggttccacagtttttagaaaacttaactgatgaagaactgaaaaaagaagcaaagaatgaagccaaaaatgatgctctttcaatgattattaaatctttgaagaatttagcttcaagggttccaggacaagaagaaactgttaaaaacttagaaatatttaggttaaaaatgatacttagattattgcaaatttcttctttcaatggaaagatgaatgcactgaatgaagttaataaggtgatatctagtgtatcatactatactcatcgacatggtaatcctgaggaggaagagtggctcacagctgaacgaatggcagaatggatacagcagaacaatatcttatccatagtgttgcgagatagtcttcatcagccacagtatgtagaaaagttagagaagattcttcgttttgtcatcaaagaaaaagctctgaccttacaggatcttgataatatctgggcagcacaggcagggaaacatgaagccattgtgaagaatgtacatgatctcctggcaaaattggcatgggatttttctcctgaacaacttgatcatctttttgattgttttaaggccagttggacaaatgcgagtaaaaagcaacgtgaaaagctacttgagctgatacgtcgtcttgcagaagatgataaagatggtgtgatggcacacaaagtgttgaaccttctgtggaatctggctcacagtgatgatgtgcctgtagatatcatggacctggctctcagtgcccacataaaaatactagattacagttgctcccaggaccgtgatacacaaaagatccaatggatagatcgctttatagaagaacttcgcacaaatgacaaatgggttattcccgcactgaaacaaattagagaaatttgtagtttgtttggtgaagcgcctcaaaatttgagtcaaactcagcgaagtccccatgtgttttatcgccatgacttaatcaatcaacttcaacacaatcatgccctagttactttggtagcagaaaaccttgcaacttacatggaaagcatgagactatatgctagagaccatgaagattatgacccacaaactgtgaggctgggaagtagatatagtcatgttcaagaagttcaagaacggcttaacttccttagatttttattgaaggatggtcagctgtggctatgtgctcctcaggcaaaacaaatatggaaatgcttagctgagaatgcagtttacctttgtgatcgtgaagcctgttttaagtggtattccaagttgatgggggatgaaccagacttagatcctgatattaataaggacttctttgaaagtaatgtgcttcagcttgatccttctctgttaactgaaaatggaatgaagtgttttgagcgattcttcaaagctgtgaattgtcgagaaggaaaactagtagcaaaaaggagagcctatatgatggatgacttggagttaataggattagattacctttggagggtcgtgattcagagtaatgatgatattgccagcagagctatagatctcctcaaagagatatacacgaaccttggtccaagactacaagtcaatcaggtggtgatccatgaagacttcattcagtcttgttttgatcgtctgaaggcttcctatgacacattgtgtgttttggatggtgacaaagacagtgttaattgtgcaagacaggaagctgttcgaatggttcgagtattaactgttttaagggaatatataaatgaatgtgacagtgattatcatgaggaaagaacaattctccctatgtcgagagcattccgcggtaaacacctctcttttgtagttcgatttccaaaccagggcagacaggttgatgacttggaggtatggtctcatacaaatgatacaattggttcagtacgacgatgtattctcaatcgtattaaagccaacgtagcccatacaaaaattgagctctttgtgggcggtgagctgatagatcctgcagatgatagaaagttgattggacaattaaacttaaaagataaatcgcttattacagccaaacttacacagataagttccaatatgccttcaagccctgatagctcttctgattcctccactggatctcctggaaaccatggtaatcattacagtgatggtcccaatccagaagtggaaagctgtttgcctggagtgataatgtcactgcatcccagatacatctcttttctttggcaagttgcagacttaggtagcagcctaaatatgccaccccttagagatggagcaagagtacttatgaaacttatgccgccagatagcacaacgatagaaaaattaagagctatttgtttagaccatgccaaacttggagaaagcagccttagtccatctcttgactcacttttctttggtccttcagcctcacaagtgctatatctaacagaggtagtctatgccttgttaatgcctgctggtgcacctctggctgatgattcctctgattttcagtttcacttcttgaaaagtggtggcctaccccttgtactgagtatgctaaccagaaataacttcctaccgaatgcagatatggaaactcgaaggggtgcctacctcaatgctcttaaaatagccaagcttttgctaactgccattggctatggtcatgttcgagctgtggcagaagcttgtcagccaggtgtagaaggtgtgaatcccatgacacagatcaaccaagttacccatgatcaagcagtggtgctacaaagtgcccttcagagcattcctaatccatcatccgagtgcatgcttagaaatgtgtcagttcgtcttgctcagcagatatctgatgaggcttcaagatatatgcctgatatttgtgtaattagagctatacaaaaaattatctgggcatcaggatgtgggtcgttacagctagtatttagcccaaatgaagaaatcactaaaatttatgagaagaccaatgcaggcaatgagccagacttggaagacgaacaggtttgctgtgaagcattggaagtgatgaccttatgttttgccttgattccaacagccttagatgctcttagtaaagaaaaggcttggcagacattcatcattgacttactattgcactgtcacagcaaaactgttcgtcaggtggcacaggagcagttctttttaatgtgcaccagatgttgcatgggacaccggcctctacttttcttcattactctactctttactgttttggggagcacagcaagagagagagctaaacactcaggcgactactttactcttttaagacaccttcttaattacgcttacaatagtaatattaatgtacccaatgctgaagttcttctcaataatgaaattgattggcttaaaagaattagggatgatgttaaaagaacaggagaaacgggtattgaagagacgatcttagagggccaccttggagtgacaaaggagttactggcctttcaaacttctgagaaaaaatttcatattggttgtgaaaaaggaggtgctaatctcattaaagaattaattgatgatttcatatttcctgcatccaatgtttacctacagtatatgagaaatggagagcttccagctgaacaggctattccggtctgtggttcaccacctacaattaatgctggttttgaattacttgtagcattagctgttggctgtgtgaggaatctcaaacaaatagtagattctttgactgaaatgtattacattggcacagcaataactacttgtgaagcacttactgagtgggaatatctgccacctgttggaccccgcccacccaaaggattcgtggggctgaaaaatgccggtgctacttgttacatgaattctgtgattcagcaactctacatgattccttccattaggaacggtattcttgccattgaaggcacaggtagtgatgtagatgatgatatgtctggggatgagaagcaggacaatgagagcaatgttgatcccagggatgatgtatttggatatcctcaacaatttgaagataaaccagcattaagtaaaactgaagatagaaaagagtacaacattggtgtcctaagacaccttcaggtcatctttggtcatttagctgcttctcgactgcaatactatgtgcccagaggattttggaaacagttcaggctttggggtgagcctgttaatctgcgtgaacaacacgatgctttagaattttttaattcattggtggatagtttagatgaagctttaaaagctttaggacatccagctatgctaagtaaagtcttaggaggttcctttgctgatcagaagatctgccaaggctgcccacataggtacgaatgtgaagaatcttttacgaccctaaacgtagacattagaaatcaccaaaatcttcttgattctttggaacagtatgtcaaaggagatttactagaaggtgcaaatgcatatcattgtgaaaaatgcaataaaaaggttgataccgtaaagcgcttgctgattaaaaaattacctcctgttcttgctatacaactaaagcgatttgactatgactgggaaagagaatgtgcaatcaagttcaatgattattttgaatttcctcgagagctggacatggaaccttacacagttgcaggtgtcgcaaagctggaaggggataatgtaaacccagagagtcagttgatacaacagagtgagcagtctgaaagtgagacagcaggaagcacaaaatacagacttgtgggtgtgctcgtacacagtggtcaagcgagtggggggcattattattcttacatcatccaaaggaatggtggagatggtgagagaaatcgctggtataaatttgatgatggtgatgtaacagaatgtaaaatggatgatgacgaagaaatgaaaaaccagtgttttggtggagagtacatgggagaagtgtttgatcacatgatgaagcgtatgtcatacaggcgccagaaaaggtggtggaatgcttatatacttttttatgaacgaatggacacaatagaccaagatgatgagttgataagatatatatcagagcttgctatcaccaccagacctcatcagattattatgccatcagccattgagagaagtgtacggaaacagaacgtacaattcatgcataaccgaatgcagtacagtatggagtattttcagtttatgaaaaaactgcttacatgtaatggcgtttacttaaaccctcctcccgggcaagatcacctgttgcctgaagcagaagaaatcactatgatcagtattcaacttgctgctaggttcctctttactacaggatttcacacaaagaaagtagtccgtggctctgccagtgattggtatgatgcattgtgtattctccttcgtcacagcaagaatgtacgtttttggtttgctcataacgtcctttttaatgtttcaaatcgcttctccgaataccttctggagtgccctagtgcagaagtgaggggtgcgtttgcaaaacttatagtctttattgcacatttttccttgcaagatgggccatgtccttcaccttttgcctctcctggaccttctagtcaggcttatgacaacttaagcttgagtgatcacttactaagagcagtactaaatctcttgagaagggaagtttcagagcatgggcgtcatttacagcagtatttcaacctgtttgtaatgtatgccaatttaggtgtggcagagaagacacagcttctgaaattgagtgtacctgctacttttatgcttgtgtctttagatgaaggtccaggtcctccaatcaaataccagtatgctgaattaggcaaattatactcagtagtgtcacagctgatccgctgttgcaatgtctcttcaagaatgcagtcttcaatcaatggtaatcctcctcttcccaatccttttggtgatcctaatttatcacaacctataatgccaattcagcagaatgtggcagacattttatttgtgagaacaagttatgtgaagaaaatcattgaagactgcagtaattcagaggaaaccgtcaaattgcttcgtttttgctgctgggagaatcctcagttctcatctactgtcctcagtgaacttctctggcaggttgcatattcctatacctatgaactgcggccctatttggatctgcttttgcaaatcttactgattgaggactcctggcaaactcacagaattcataatgcactgaaaggaattccagatgaccgagatgggctgtttgacacaatccagcgctctaagaatcactatcaaaaaagagcataccagtgtataaaatgtatggtagctctatttagtaactgtcctgttgcttaccaaatcctgcagggcaatggagatcttaaaagaaagtggacctgggcagtggaatggcttggagatgaacttgaaagaagaccatatactggcaatcctcagtacacttacaacaattggtctcccccagtgcaaagcaatgaaacgtccaatggttatttcttggagagatcacatagtgctaggatgacacttgcaaaagcttgtgaactctgtccagaggaggagccagatgaccaagatgctccagatgaacatgagtcgcctccacctgaagatgccccattgtacccccattcacctggatctcagtatcaacagaataaccatgtgcatggacagccatatacaggcccagcagcacatcacatgaacaaccctcagagaactggccaacgagcacaagaaaattatgaaggcagtgaagaagtatccccacctcaaaccaaggatcaatgaaatgcacataattaactggttccatcaagactgtgcacccaggccttacagtccaacctttttctgtgtctgg

SEQ ID NO: 33577 - DNA, 10036 bp, Homo sapiens
  source 1..10036: mol_type = unassigned DNA
tgaataattgaactttgtttatttctccatatttttgcagtggtaattccattataaaacctaatgaaacaatgtttttatagatggtgtggaaagacttttctgggctcagaggtgaaactgacccttgtgtatcagcagcatttctgactgactgagagagtgtagtgattaacagagttgtgatgttagttaagaaacttagatttgccattgtagcttttctaccaattagcagattgtttaactcactgaaattgtaaagtggtagacgtggacttagtcattactgggcagcttatgaattgtattcatttactcatgatgtaaaaatggttagtctccacttttaaggctctagttctagtggctaaataggtacttatttatacagtatgataactgctgtattaaaatacatgtctcaaatgtggaatagtagaagaggtgaagaaaatcatagtttgaggtagaatactgtttgctggtcttaaaaactgtggtattttggtgattccataaattaggtcagatacttccactggagggaaacagtttaaaggatatatgtgatactattaatagaatgaggaagacacaccagatatttaggagggaattagcgagcttgaaactaagagctggtttgaatgagactgggtcataagtgatttcaagtaccagattaaggcactgagattttatttttaagcactgaagtcagattttttccttttaaaagaaaggattcatgatgaaatctgctttttgttttgcagagagcttggagataattctggtggctgtgtggagtatgtgttggaggtattaaattttcacagtatatataaggcagcaattgataggcctttcacagattcttctgataactacataaagagacaaaaaaaagaaaaaagagcaaagatctgtgctgtgtcaagtatgacagccatcactcatggctctccagtaggagggaacgacagccagggccaggttcttgatggccagtctcagcatctcttccaacagaaccagacttcatcacctgattcttccaatgagaattccgtagcaactcctcctccagaggaacaagggcaaggtgatgccccaccacagcatgaagatgaagagcctgcatttccacatactgagctggcaaacctggatgacatgatcaacaggcctcgatgggtggttcctgttttgccaaaaggggaattagaagtgcttttagaagctgctattgatcttagtgtaaaaggccttgatgttaaaagtgaagcatgccaacgtttttttcgagatggactaacaatatctttcactaaaattcttatggatgaggctgtgagtggctggaagtttgaaattcatagatgtattattaacaatactcatcgcctagtggagctttgtgtggccaagttgtcccaagattggtttccacttctagaacttctcgccatggccttaaatcctcactgcaagtttcatatctacaatggtacacgtccgtgtgaattaatttcctcaaatgctcagttgcctgaagatgaattatttgctcgttcttcagatcctcgatcaccaaaaggttggctagtggatctcatcaataaatttggcacattaaatgggttccagattttgcatgatcgtttttttaatggatcagcattaaatattcaaataattgcagctcttattaaaccatttggacaatgctatgagtttctcagtcaacatacactgaaaaagtacttcattccagttatagaaatagttccacatttattggaaaacttaactgatgaagaactgaaaaaggaggcaaagaatgaagccaaaaatgatgccctttcaatgattattaaatctttgaagaacttagcttcaagaatttcaggacaagatgagactataaaaaatttggaaatttttaggttaaagatgatactcagattgttgcaaatttcctcttttaatggaaagatgaatgcactgaatgaaataaataaggttatatctagtgtatcatattatactcatcggcatagtaatcctgaggaggaagaatggctgacagctgagcgaatggcagaatggatacagcaaaataatatcttatccatagtcttgcaagacagtcttcatcaaccacaatatgtagaaaagctagagaaaattcttcgttttgtgattaaagaaaaggctcttacattacaggaccttgataatatctgggcagcacaggcaggaaaacatgaagccattgtgaagaatgtacatgatctgctagcaaagttggcttgggatttttctcctggacaacttgatcatctttttgattgctttaaggcaagttggacaaatgcaagtaaaaagcaacgtgaaaagctccttgagttgatacgccgtcttgcagaagatgataaagatggtgtgatggcacacaaagtgttgaaccttctttggaacctggctcagagtgatgatgtgcctgtagacatcatggaccttgctcttagtgcccacataaaaatactagattatagttgttcccaggatcgagatgcacagaagatccagtggatagatcactttatagaagaacttcgcacaaatgacaagtgggtaattcctgctctgaaacaaataagagaaatttgtagtttgtttggtgaagcatctcaaaatttgagtcaaactcagcgaagtccccacatattttatcgccatgatttaatcaaccagcttcaacaaaatcatgctttagttactttggtagcagaaaaccttgcaacctacatgaatagcatcagattgtatgctggagatcatgaagactatgatccacaaacagtgaggcttggaagtcgatacagtcatgttcaagaagttcaagaacgactaaacttccttagatttttactgaaggatggccaactgtggctctgtgctcctcaggcaaaacaaatatggaagtgcttagcagaaaatgcagtttatctttgtgatcgtgaagcctgttttaagtggtattccaagttaatgggggatgaaccagacttggatcctgatattaataaggacttctttgaaagtaatgtacttcagcttgatccttcccttttaactgaaaatggaatgaaatgctttgaaagatttttcaaagctgtcaattgtcgagaaaggaaactaatagcaaaaagaagatcctatatgatggatgatttggaattaattggactagactacctttggagggttgtgattcagagtagtgacgagattgctaacagagctatagatcttcttaaagagatatacacaaaccttggcccaagattaaaagccaatcaggtggttatccatgaagacttcattcagtcttgctttgatcgtttaaaagcatcatatgatacactgtgtgtttttgatggtgacaaaaacagcattaattgtgcaagacaagaagccattcgaatggttagagtattaactgttataaaagagtacattaatgaatgtgacagtgattatcacaaggaaagaatgattctacctatgtcgagagcatttcgtggcaaacacctctctcttatagttcggtttccaaaccagggcagacaggttgatgagttggatatatggtctcatacgaatgacacaattggttcagtacggcgatgtattgttaatcgtattaaagccaatgtagcccacaaaaaaattgaactttttgtgggtggtgagctgatagattctgaagatgacagaaagctaattggacaattaaacttaaaagataaatctctaattacagccaaacttacacaaataaatttcaatatgccatcaagtcctgatagctcttccgattcctcaactgcatctcctggaaaccaccgtaatcattacaatgatggtcccaatctagaggtggaaagttgtttgcctggggtgataatgtcagtgcatcccagatacatctctttcctttggcaagttgcagacttaggtagcaacctgaatatgccacctcttagagatggagcaagagtacttatgaaacttatgccaccagatagaacagctgtagaaaaattacgagctgtttgtttggaccatgcaaaacttggagaaggcaaacttagtccaccccttgactctcttttctttggtccttctgcctcccaagttctatacctaacagaggtagtttatgccttgttaatgcctgctggtgtgcctctaactgatgggtcctctgactttcaagttcacttcttgaaaagtggtggcttacctcttgtactgagtatgctaataagaaataacttcttgccaaatacagatatggaaactcgaaggggtgcttatttaaatgctcttaaaatagccaaactgttgttaactgcgattggctatggccatgttcgagctgtagcagaagcttgtcagccagttgtagatggtacagaccccataacacagattaaccaagttactcatgatcaagcagtggtgctacaaagtgcccttcagagcattcctaatccctcatccgagtgcgtacttagaaatgagtccatacttcttgctcaggaaatatctaatgaggcttcaagatatatgcctgatatttgtgtaattagggctatacagaaaattatctgggcatcagcatgtggggcattaggactagtttttagcccaaatgaagaaataactaaaatttatcagatgaccaccaatggaagcaataagctggaggtggaagatgaacaagtttgctgtgaagcactggaagtgatgaccttatgttttgctttacttccaacagcgttggatgcacttagtaaagaaaaagcctggcagaccttcatcattgacttattattgcactgtccaagcaaaactgttcgtcagttggcacaggagcagttctttttaatgtgcaccagatgttgcatgggacacaggcctctgcttttcttcattactttactctttaccatactggggagcacagcaagagagaagggtaaatattcaggtgattatttcacacttttacggcaccttctcaattatgcttacaatggcaatattaacatacccaatgctgaagttcttcttgtcagtgaaattgattggctcaaaaggattagggataatgttaaaaacacaggtgaaacaggtgtcgaagagccaatactggaaggccaccttggggtaacaaaagagttattggcctttcaaacttctgagaaaaagtatcactttggttgtgaaaaaggaggtgctaatctcattaaagaattaattgatgatttcatctttcccgcatccaaagtttacctgcagtatttaagaagtggagaactaccagctgagcaggctattccagtctgtagttcacccgttaccatcaatgccggttttgagctacttgtagcattagctattggctgtgtgaggaatctcaaacagatagtagactgtttgactgaaatgtattacatgggcacagcaattactacttgtgaagcacttactgagtgggaatatctgccccctgttggaccccgcccaccaaaaggatttgtgggactcaaaaatgctggtgctacgtgttacatgaactctgtgatccagcagctatacatgattccttctatcaggaacagtattcttgcaattgaaggcacaggtagtgatttacacgatgatatgttcggggatgagaagcaggacagtgagagtaatgttgatccccgagatgatgtatttggatatcctcatcaatttgaagacaagccagcattaagtaagacagaagataggaaagagtataatattggtgtcctaagacaccttcaggtcatctttggtcatttagctgcttcccaactacaatactatgtacccagaggattttggaaacagttcaggctttggggtgaacctgttaatctccgtgaacaacatgatgccttagagttttttaattctttggtggatagtttagatgaagctttaaaagctttaggacacccggctatactaagtaaagtcctaggaggctcctttgctgatcagaagatctgccaaggctgcccacataggtatgaatgtgaagaatcttttacaactttgaatgtggatattagaaatcatcaaaatcttcttgactctttggaacagtatatcaaaggagatttattggaaggtgcaaatgcatatcattgtgaaaaatgtgataaaaaggttgacacagtaaagcgcctgctaattaaaaaattgcctcgggttcttgctatccaactcaaacgatttgactatgactgggaaagagaatgtgcaattaaattcaatgattattttgaatttcctcgagagctggatatgggaccttacacagtagcaggtgttgcaaacctggaaagggataatgtaaactcagaaaatgagttgattgaacagaaagagcagtctgacaatgaaactgcaggaggcacaaagtacagacttgtaggagtgcttgtacacagtggtcaagcaagcggtgggcattattattcttacatcattcaaaggaatggtaaagatgatcagacagatcactggtataaatttgatgatggagatgtaacagaatgcaaaatggatgatgatgaagaaatgaaaaatcagtgttttggtggagagtacatgggagaagtatttgatcacatgatgaagcgcatgtcatataggcgacagaagaggtggtggaatgcttacatacttttttatgaacaaatggatatgatagatgaagatgatgagatgataagatacatatcagagctaactattgcaagaccccatcagatcattatgtcaccagccattgagagaagtgtacggaaacaaaatgtgaaatttatgcataaccgattgcaatatagtttagagtattttcagtttgtgaaaaaactgcttacatgtaatggtgtttatttaaaccctgctccagggcaggattatttgttgcctgaagcagaagaaattactatgattagtattcagcttgctgctagattcctctttaccactggatttcacaccaagaaaatagttcgtggtcctgccagtgactggtatgatgcactgtgcgttcttctccgtcacagcaaaaatgtacgtttttggtttactcataatgtcctttttaatgtatcaaatcgcttctctgaataccttctggagtgccctagtgcagaagtgaggggtgcatttgcaaaacttatagtgtttattgcacacttttccttgcaagatgggtcttgtccttctccttttgcatctccaggaccttctagtcaggcatgtgataacttgagcttgagtgaccacttactaagagccacactaaatctcttgagaagggaagtttcagagcatggacatcatttacagcaatattttaatttgtttgtaatgtatgccaatttaggtgtggcagaaaaaacacagcttctgaaattgaatgtacctgctacctttatgcttgtgtctttagacgaaggaccaggtcctccaatcaaatatcagtatgctgaattaggcaagttatattcagtagtgtctcagctgattcgttgttgcaatgtgtcatcaacaatgcagtcttcaatcaatggtaatccccctctccccaatcctttcggtgaccttaatttatcacagcctataatgccaattcagcagaatgtgttagacattttatttgtgagaacaagttatgtgaagaaaattattgaagactgcagtaactcagaggataccatcaaattacttcgcttttgctcttgggagaatcctcagttctcatctactgtcctcagcgaacttctctggcaggttgcatattcatatacctatgaacttcggccatatttagatctacttttccaaattttactgattgaggactcctggcagactcacagaattcataatgcacttaaaggaattccagatgacagagatgggctgttcgatacaatacagcgctcgaagaatcactatcaaaaacgagcatatcagtgcataaaatgtatggtagctctatttagcagttgtcctgttgcttaccagatcttacagggtaacggagatcttaaaagaaaatggacctgggcagtggaatggctaggagatgaacttgaaagaagaccatatactggcaatcctcagtatagttacaacaattggtctcctccagtacaaagcaatgaaacagcaaatggttatttcttagaaagatcacatagtgctaggatgacacttgcaaaagcttgtgaactctgtccagaagaggagccagatgaccaggatgccccagatgagcatgagccctctccatcagaagatgccccattatatcctcattcacctgcctctcagtatcaacagaataatcatgtacatggacagccatatacaggaccagcagcacatcacttgaacaaccctcagaaaacaggccaacgaacacaagaaaattatgaaggcaatgaagaagtatcctcacctcagatgaaggatcagtgaaaagcaataattaactgcttcctttatgactatgcactaaggtcttatagtccaaactttctctgtgtctggctagtattgaaaactagataaactgctccaaaccaacatggagtaaagagcatattcactggtttatttgcagtaatttgcaatttgtcagtgtataagacacatgcagggtgaagtgtacagagttttgtaacaaatgactggtcctaatctgtaaatgagaaaggtatatatactatgttaatgtctgactgttaattcttaagcaagaaactttttttgatgaaaacaagtcagatctacacagtcacacaattattttttgttgtgttcactacattgtgcaattgatattgcctgctttgagcagtttggtcaacttaccaacttccccccaaaaaagggaacataaaagagcccatctttgtcagtttacaccaatagtttcttgttaatccttctttcctggatatataaggctggtggtaacttttgaattatatggttgatgtggaaaattggcagtgtaacatttctagatacttttcattacctttttattctggtatataggctaaccactttaaagctattcttatgctgtaacagttagcatggcttcacactgtttgtgtagccaagaggacagaattacatgaatgacagtgcccagagtgacagctgtatattgctcagagcttttatttcttatacctagaataaatataaaatgggggaaaaatgtgacagacaagcagtttttcattgcacacatattcttcacatttaatgtttgatagttcaatttcttgagctgaagaatatcaaagtatcgataatacgaattttaaaatattaaaaccaatacacaaaattttcctatgtcagaatgtggtggagcataatagattgtatttggtgtgcttgcgattttttttttccatagaatttattaagtgaagtttctaaaactttgcttctcctgatcccggtgaagtgtacatcataagaatccatagtactttgaagtaccattgcaccaagatgtctgactgaattcatagtcacacttttatttgaaagaaagaattgttgtagttttttttcattattctaaaactcttgttgttagatacaagatttaattaagatctaagctcctgcttatttaatgtaattctaaggtaccattttagaaaaaacatttgttttaagattccaagaaacctgtgagttaatactatatttaaaagagaattggtaaattttgaatgtgtgtaatattttggaacctgtttaaaaaccaaatatacctgcaaatagatacagcctatcctatactatttaaatgtttggctgttttgttttatagaaattattttgctgaattcacaaataaaatttaagaaga

SEQ ID NO: 33578 - DNA, 909 bp, Homo sapiens
  source 1..909: mol_type = unassigned DNA
aattattgaagactgcagtaactcagaggataccatcaaattacttcgcttttgctcttgggagaatcctcagttctcatctactgtcctcagcgaacttctctggcagaattcataatgcacttaaaggaattccagatgacagagatgggctgttcgatacaatacagcgctcgaagaatcactatcaaaaacgagcatatcagtgcataaaatgtatggtagctctatttagcagttgtcctgttgcttaccagatcttacagggtaacggagatcttaaaagaaaatggacctgggcagtggaatggctaggagatgaacttgaaagaagaccatatactggcaatcctcagtatagttacaacaattggtctcctccagtacaaagcaatgaaacagcaaatggttatttcttagaaagatcacatagtgctaggatgacacttgcaaaagcttgtgaactctgtccagaagaggagccagatgaccaggatgccccagatgagcatgagccctctccatcagaagatgccccattatatcctcattcacctgcctctcagtatcaacagaataatcatgtacatggacagccatatacaggaccagcagcacatcacttgaacaaccctcagaaaacaggccaacgaacacaagaaaattatgaaggcaatgaagaagtatcctcacctcagatgaaggatcagtgaaaagcaataattaactgcttcctttatgactatgcactaaggtcttatagtccaaactttctctgtgtctggctagtattgaaaactagataaactgctccaaaccaacatggagtaaagagcatattcactggtttatttgcagtaatttgcaatttgtcagtgtataagacacatgcagggtgaagtgtacaga

SEQ ID NO: 33579 - DNA, 6103 bp, Homo sapiens
  source 1..6103: mol_type = unassigned DNA
taacttccggttgctgtgctgagtcggaagtgggaacccttcggccgctgagattctgtcgtgtcgtcgctgctggcacttcaggctctgcctctcccactaggtctggatggaggataccttaaagtgaaatgacagaccaggagaataacaacaacatctcaagtaacccctttgctgctctttttggctccctggctgatgccaaacagtttgcggcaatccaaaaagagcagctgaagcaacaatctgatgaactcccagctagcccagatgactcggataatagcgtgtcagagagcctggatgaattcgattactctgtggctgagattagccgctcattccgatcacagcaggaaatatgtgagcaactcaacatcaatcacatgatccaaaggatcttccttattactctggacaacagtgatcccagcttgaaaagcgggaatggcatccctagccgttgtgtgtatttggaagaaatggcagtagagctagaagatcaagactggcttgatatgagcaatgttgagcaggccctcttcgctcgcttattacttcaagatccaggcaaccacttaattaacatgacttcttctacaacgctaaatctctctgctgatcgagatgcaggagagaggcacattttttgttacctttactcctgcttccagagagccaaggaagagattaccaaagttccagagaacctgctaccctttgcagtgcagtgcagaaacctcactgtgtccaatacccgaacagttcttctcaccccagagatctatgttgaccaaaacatccatgagcaactggtagatttgatgttagaagccatccagggagcccattttgaagatgtaactgagtttctggaagaggtcattgaagccttgatattggatgaggaagttagaacatttccagaagtcatgattccagtgtttgatattttattgggccgaataaaagatctagagctctgtcagatccttttgtatgcatatctggatattcttctctatttcactaggcaaaaagatatggcaaaggtttttgtagaatacattcagcccaaggaccctaccaatgggcaaatgtaccagaagaccttgctgggagtaattctgagtatctcctgcttattaaagactccgggtgttgtagaaaatcatggctactttttgaatccatctcgttccagcccccaggagatcaaagtacaggaggccaacatccatcagttcatggctcagttccacgaaaagatctaccagatgctgaagaacttactccagctctctccagaaaccaaacactgtatcttgtcctggcttggaaactgtttgcatgcaaatgcaggccgcaccaagatttgggccaatcagatgccagaaatctttttccaaatgtatgcctcagatgctttctttctgaatctgggtgctgctctcctgaagctatgccagccattttgcaaacccagatcctctcggctcctcacctttaatcccacatactgtgccctcaaggagttgaatgatgaagaacgaaaaattaaaaatgtacacatgagaggtttggacaaagaaacctgtttgatcccagctgtgcaggagccgaagtttccacagaactacaaccttgtaacagagaaccttgctctgacagagtacaccttgtacttgggatttcacaggttgcatgatcagatggtaaaaatcaaccaaaatctgcatcggctgcaggttgcctggcgggatgctcagcaaagttctagccctgctgctgacaatcttcgtgagcagtttgaacgactgatgaccatctatctttctaccaagactgccatgacagagccacaaatgctacaaaactgcctaaacttgcaggtgtccatggctgttctactggttcaactggccataggcaatgagggctcacagccaatagagctaacctttcctttgccagatggctacagctctttggcttatgtgccagaattttttgcagataacctgggtgattttctcatttttctccgccgctttgccgatgacattttggagacatcagcagattccctggagcatgtccttcactttatcaccattttcactggaagcatagaaagaatgaagaatccccacctgagggccaaactagcagaggtgttggaagcagtgatgccccacctggatcagaccccaaatcccttggtatccagtgtgttccaccggaaacgtgtgttctgcaactttcagtatgcaccccaacttgcagaggctctaatcaaggtttttgtggacatcgaatttacaggagacccccatcaatttgaacagaagtttaattaccgccgtcccatgtatcctatcctaagatacatgtgggggacagatacctatcgggagagcattaaggatttggctgactatgcctctaagaatttagaagccatgaatcccccacttttcctccgctttcttaacctgctaatgaatgatgccatcttccttttggatgaagccatacagtatttgagcaagataaagattcagcaaattgagaaggatcgaggtgaatgggatagtctgactccagaagcccgccgagaaaaggaggctggcctacagatgtttggacagctggcacgtttccataacatcatgtccaatgaaacaatcggtacccttgcctttctcacatcagagatcaagtcactctttgtgcatcccttcctggctgagcgcatcatctccatgttgaactacttcctgcaacacctggttggccccaagatgggtgccttaaaagtcaaggacttcagcgaatttgacttcaaaccccagcagcttgtatcagatatctgcactatctacttaaatcttggggatgaggagaatttctgtgccactgtgcccaaggatggacgttcctattccccaactctctttgcacagacagttcgagtcttgaagaaaataaataagcctgggaatatgattatggctttcagcaacttggcagagagaatcaagtctcttgcagacctccaacaacaggaagaggaaacctatgcagatgcctgtgatgagttcctggatcccattatgagcacactgatgtgtgaccctgtggtgctgccatcttccagagtcactgtggatagatccaccattgcaagacatttgctcagtgaccaaacagatccctttaaccgtagtcccctcaccatggaccagatccggccaaacacagaactaaaagaaaaaatccaacggtggcttgcagagaggaaacaacaaaaggagcaacttgaatagatactgtgaactaaccaaaccaaaaccaaccccagagtgcagataaacaattgtttgtggtttctctctttctggttctgttccttttctttcttcttttctttttcttttttttttttttttttactaaattagagaactgctcttgctgaaattatgatagttaagattcctaagaacttgacaatgctcccctggcttgcaggaaattatacttattatagcatcaccaagtttagaaatcatcactaattttcaccctctgttgtctcttcatattcttcttccttttcctaaatgaaattatattatttcaactactaaaacttcccgccaccctgctatttctcttccaattactgttcaaacatttttggtgagtgctgcttttataaatatgtgatgtcacatatttcagtgacagctgatgttatcagaaaaatcctgttatcctgtgtatttactagtcctcatgatctagacttaaccccttttctgtgttacagagtaacttcacataaaagcagatacctttaagtttgtgtagacttctgaataagatgatagacgagaattttttttaaaaaaggaatttaaaggaatcttgtgcaacttctgttgatagctcttaattttgttatacagtctttttaatgaggattggtagggcaatcctaccaattgatgggggtgaggagactgttgggcccttattctcttatgaaaatctgtttctacaaggactaggcctaagtagatttaggcaacgggtatcatatccatgaaaaatgtcattttaagacactaatatcaacagtatatctcagtgtgtgagatatataaatacacatacaccccatgtgcttttttgttggtttagtgtaaactgagtaccactttatattttctcttccatagtgagatgtatgcagtatgtggccatgtttactaacatactcattcttcacaaaattctgagattataaaatgtatatagttaatatttgtttgagcttgtgacctgacttctaagagctacttctaacacagccttaggtcttcaattaacaaagtaggaagttgagcacaaccttgtccacagccattttaaatatccacttagccctgtgtagttggtaggtggacaccactttcataagtgaacttgagctcactactcaattgtgcagcttaatatgctgactagggacattcccctatggattatctttatatcactgtctttctaagcccagagatgtcataagtgacaagaaaagtgataggatcaagaaatgggtgtcactgcttcatttggaacatgttattaactatggtctctttcaaataaatagtagttttatatttcaacacaagttgctataagcagtccttgatgggtttttgattgcatcagctggaaagcctcaaatctaagagggcttcccatcctagatataaaataggtgttgcctattgctgtgcttataaaatgaaaaaggaaattgaggacacttttgcaaatgccagaatgtaagattcattcagtgtgctccctgggcctttatggcatgggttgacaggatttgtttattttctaaaattagcttcattcaatatttatcatcctcctttccctctctgagaatgaactatgtataaaataagcttctgcctatttgcatttatcttccaaacccaatctagtaggatgttctcattttaaaaacgaggggaaaagaccagagtttttcaggagaaaactggaggaaaatgggcacaaaaactcagaaggcagctattcccagcagcttcctagttaacaacccccatgctgcctccagtctttgtctgtattcttctgtatttaaccttcagattgtaagccttttctggcaagcttttcttctttttttaaactcttttcctgaaactttttatgaatggctatggcaccattaatgctgctgaatatctttaaactctgcacaagcaagtgtgtagcttaaggccactactggtaaggaaaccaagtgtcctctgtgccttttttctttctgtgaagtaatttaagaatatccaaaaaaattagactttaaaaagttatcttggtacaacaccgtgtgtatatacacttggaagcttaaaaaggtgttttgtctggaacttagaagcagctctaaatctagtagagcagactttctaacatacctagttttgtgtattggctttgctggagtatgatagcaaaatgaagactcttttactcagctctggtattgctcataacttaccaagaggctaatactaaacttggaaaattgtttaagtatgttttatcaagcagtctgggttttgttttttaatatactttttaatggatatgtgaaaactgaaggaaatgttaaaggttttttaatggtgcaagtgaaggtgccagttgctatttgatatcacactctacaaaagcttcattactttatttgatggtggttgctaagcagccattgcacagagcataagtctactgggtgcctttacatgccagaggctgatgctgcactgttgatgtcatgtgaggaaataatgcacatgctctaactgctcaacaggaaatgaacctagaaacagaaaatgaaaaggttgattgaaataaaacttgatcaacgcgactgtattttgaaacattccaggaaggttacttcttgtcaaacttgcctggcagtgtttgttcaaaacttgtatttaataaatgaacatctgacttacaa

SEQ ID NO: 33580 - DNA, 6061 bp, Homo sapiens
  source 1..6061: mol_type = unassigned DNA
cgtgtcgtcgctgctggcacttcaggctctgcctctcccactaggtctggatggaggataccttaaagtgaaatgacagaccaggagaataacaacaacatctcaagtaacccctttgctgctctttttggctccctggctgatgccaaacagtttgcggcaatccaaaaagagcagctgaagcaacaatctgatgaactcccagctagcccagatgactcggataatagcgtgtcagagagcctggatgaattcgattactctgtggctgagattagccgctcattccgatcacagcaggaaatatgtgagcaactcaacatcaatcacatgatccaaaggatcttccttattactctggacaacagtgatcccagcttgaaaagcgggaatggcatccctagccgttgtgtgtatttggaagaaatggcagtagagctagaagatcaagactggcttgatatgagcaatgttgagcaggccctcttcgctcgcttattacttcaagatccaggcaaccacttaattaacatgacttcttctacaacgctaaatctctctgctgatcgagatgcaggagagaggcacattttttgttacctttactcctgcttccagagagccaaggaagagattaccaaagttccagagaacctgctaccctttgcagtgcagtgcagaaacctcactgtgtccaatacccgaacagttcttctcaccccagagatctatgttgaccaaaacatccatgagcaactggtagatttgatgttagaagccatccagggagcccgtgagtacatgaacaagatctattttgaagatgtaactgagtttctggaagaggtcattgaagccttgatattggatgaggaagttagaacatttccagaagtcatgattccagtgtttgatattttattgggccgaataaaagatctagagctctgtcagatccttttgtatgcatatctggatattcttctctatttcactaggcaaaaagatatggcaaaggtttttgtagaatacattcagcccaaggaccctaccaatgggcaaatgtaccagaagaccttgctgggagtaattctgagtatctcctgcttattaaagactccgggtgttgtagaaaatcatggctactttttgaatccatctcgttccagcccccaggagatcaaagtacaggaggccaacatccatcagttcatggctcagttccacgaaaagatctaccagatgctgaagaacttactccagctctctccagaaaccaaacactgtatcttgtcctggcttggaaactgtttgcatgcaaatgcaggccgcaccaagatttgggccaatcagatgccagaaatctttttccaaatgtatgcctcagatgctttctttctgaatctgggtgctgctctcctgaagctatgccagccattttgcaaacccagatcctctcggctcctcacctttaatcccacatactgtgccctcaaggagttgaatgatgaagaacgaaaaattaaaaatgtacacatgagaggtttggacaaagaaacctgtttgatcccagctgtgcaggagccgaagtttccacagaactacaaccttgtaacagagaaccttgctctgacagagtacaccttgtacttgggatttcacaggttgcatgatcagatggtaaaaatcaaccaaaatctgcatcggctgcaggttgcctggcgggatgctcagcaaagttctagccctgctgctgacaatcttcgtgagcagtttgaacgactgatgaccatctatctttctaccaagactgccatgacagagccacaaatgctacaaaactgcctaaacttgcaggtgtccatggctgttctactggttcaactggccataggcaatgagggctcacagccaatagagctaacctttcctttgccagatggctacagctctttggcttatgtgccagaattttttgcagataacctgggtgattttctcatttttctccgccgctttgccgatgacattttggagacatcagcagattccctggagcatgtccttcactttatcaccattttcactggaagcatagaaagaatgaagaatccccacctgagggccaaactagcagaggtgttggaagcagtgatgccccacctggatcagaccccaaatcccttggtatccagtgtgttccaccggaaacgtgtgttctgcaactttcagtatgcaccccaacttgcagaggctctaatcaaggtttttgtggacatcgaatttacaggagacccccatcaatttgaacagaagtttaattaccgccgtcccatgtatcctatcctaagatacatgtgggggacagatacctatcgggagagcattaaggatttggctgactatgcctctaagaatttagaagccatgaatcccccacttttcctccgctttcttaacctgctaatgaatgatgccatcttccttttggatgaagccatacagtatttgagcaagataaagattcagcaaattgagaaggatcgaggtgaatgggatagtctgactccagaagcccgccgagaaaaggaggctggcctacagatgtttggacagctggcacgtttccataacatcatgtccaatgaaacaatcggtacccttgcctttctcacatcagagatcaagtcactctttgtgcatcccttcctggctgagcgcatcatctccatgttgaactacttcctgcaacacctggttggccccaagatgggtgccttaaaagtcaaggacttcagcgaatttgacttcaaaccccagcagcttgtatcagatatctgcactatctacttaaatcttggggatgaggagaatttctgtgccactgtgcccaaggatggacgttcctattccccaactctctttgcacagacagttcgagtcttgaagaaaataaataagcctgggaatatgattatggctttcagcaacttggcagagagaatcaagtctcttgcagacctccaacaacaggaagaggaaacctatgcagatgcctgtgatgagttcctggatcccattatgagcacactgatgtgtgaccctgtggtgctgccatcttccagagtcactgtggatagatccaccattgcaagacatttgctcagtgaccaaacagatccctttaaccgtagtcccctcaccatggaccagatccggccaaacacagaactaaaagaaaaaatccaacggtggcttgcagagaggaaacaacaaaaggagcaacttgaatagatactgtgaactaaccaaaccaaaaccaaccccagagtgcagataaacaattgtttgtggtttctctctttctggttctgttccttttctttcttcttttctttttcttttttttttttttttttactaaattagagaactgctcttgctgaaattatgatagttaagattcctaagaacttgacaatgctcccctggcttgcaggaaattatacttattatagcatcaccaagtttagaaatcatcactaattttcaccctctgttgtctcttcatattcttcttccttttcctaaatgaaattatattatttcaactactaaaacttcccgccaccctgctatttctcttccaattactgttcaaacatttttggtgagtgctgcttttataaatatgtgatgtcacatatttcagtgacagctgatgttatcagaaaaatcctgttatcctgtgtatttactagtcctcatgatctagacttaaccccttttctgtgttacagagtaacttcacataaaagcagatacctttaagtttgtgtagacttctgaataagatgatagacgagaattttttttaaaaaaggaatttaaaggaatcttgtgcaacttctgttgatagctcttaattttgttatacagtctttttaatgaggattggtagggcaatcctaccaattgatgggggtgaggagactgttgggcccttattctcttatgaaaatctgtttctacaaggactaggcctaagtagatttaggcaacgggtatcatatccatgaaaaatgtcattttaagacactaatatcaacagtatatctcagtgtgtgagatatataaatacacatacaccccatgtgcttttttgttggtttagtgtaaactgagtaccactttatattttctcttccatagtgagatgtatgcagtatgtggccatgtttactaacatactcattcttcacaaaattctgagattataaaatgtatatagttaatatttgtttgagcttgtgacctgacttctaagagctacttctaacacagccttaggtcttcaattaacaaagtaggaagttgagcacaaccttgtccacagccattttaaatatccacttagccctgtgtagttggtaggtggacaccactttcataagtgaacttgagctcactactcaattgtgcagcttaatatgctgactagggacattcccctatggattatctttatatcactgtctttctaagcccagagatgtcataagtgacaagaaaagtgataggatcaagaaatgggtgtcactgcttcatttggaacatgttattaactatggtctctttcaaataaatagtagttttatatttcaacacaagttgctataagcagtccttgatgggtttttgattgcatcagctggaaagcctcaaatctaagagggcttcccatcctagatataaaataggtgttgcctattgctgtgcttataaaatgaaaaaggaaattgaggacacttttgcaaatgccagaatgtaagattcattcagtgtgctccctgggcctttatggcatgggttgacaggatttgtttattttctaaaattagcttcattcaatatttatcatcctcctttccctctctgagaatgaactatgtataaaataagcttctgcctatttgcatttatcttccaaacccaatctagtaggatgttctcattttaaaaacgaggggaaaagaccagagtttttcaggagaaaactggaggaaaatgggcacaaaaactcagaaggcagctattcccagcagcttcctagttaacaacccccatgctgcctccagtctttgtctgtattcttctgtatttaaccttcagattgtaagccttttctggcaagcttttcttctttttttaaactcttttcctgaaactttttatgaatggctatggcaccattaatgctgctgaatatctttaaactctgcacaagcaagtgtgtagcttaaggccactactggtaaggaaaccaagtgtcctctgtgccttttttctttctgtgaagtaatttaagaatatccaaaaaaattagactttaaaaagttatcttggtacaacaccgtgtgtatatacacttggaagcttaaaaaggtgttttgtctggaacttagaagcagctctaaatctagtagagcagactttctaacatacctagttttgtgtattggctttgctggagtatgatagcaaaatgaagactcttttactcagctctggtattgctcataacttaccaagaggctaatactaaacttggaaaattgtttaagtatgttttatcaagcagtctgggttttgttttttaatatactttttaatggatatgtgaaaactgaaggaaatgttaaaggttttttaatggtgcaagtgaaggtgccagttgctatttgatatcacactctacaaaagcttcattactttatttgatggtggttgctaagcagccattgcacagagcataagtctactgggtgcctttacatgccagaggctgatgctgcactgttgatgtcatgtgaggaaataatgcacatgctctaactgctcaacaggaaatgaacctagaaacagaaaatgaaaaggttgattgaaataaaacttgatcaacgcgactgtattttgaaacattccaggaaggttacttcttgtcaaacttgcctggcagtgtttgttcaaaacttgtatttaataaatgaacatctgactt

SEQ ID NO: 33581 - DNA, 2149 bp, Homo sapiens
  source 1..2149: mol_type = unassigned DNA
gtataagtagaggaagaaaacagcaactcagtcatagaaagggacactaagaatagcaatttttaatgccttctcaagatacctgaattgatgcagagcatttttcaaaactactcagtcaacacattgccggaagaaggaaattatgtctttagagagaaatctccatcatagacattttaaataagacagtagataaaagttcagcatgtgcttaagctgctcagctgcctagattcaaacaaaaaatgaatatcatctagtttcccaatattagctagctcaagacattatctacagggccaaaggaaatgattttggactattatccataactttgaattatgtgtcttcctttcagtagagaatattaggctgaccttttctgaagaataatttaatttaatattgaacaacagagagctggaagctgctcttagattgcatctcaggttgcatgatcagatggtaaaaatcaaccaaaatctgcatcggctgcaggttgcctggcgggatgctcagcaaagttctagccctgctgctgacaatcttcgtgagcagtttgaacgactgatgaccatctatctttctaccaagactgccatgacagagccacaaatgctacaaaactgcctaaacttgcaggtgtccatggctgttctactggttcaactggccataggcaatgagggctcacagccaatagagctaacctttcctttgccagatggctacagctctttggcttatgtgccagaattttttgcagataacctgggtgattttctcatttttctccgccgctttgccgatgacattttggagacatcagcagattccctggagcatgtccttcactttatcaccattttcactggaagcatagaaagaatgaagaatccccacctgagggccaaactagcagaggtgttggaagcagtgatgccccacctggatcagaccccaaatcccttggtatccagtgtgttccaccggaaacgtgtgttctgcaactttcagtatgcaccccaacttgcagaggctctaatcaaggtttttgtggacatcgaatttacaggagacccccatcaatttgaacagaagtttaattaccgccgtcccatgtatcctatcctaagatacatgtgggggacagatacctatcgggagagcattaaggatttggctgactatgcctctaagaatttagaagccatgaatcccccacttttcctccgctttcttaacctgctaatgaatgatgccatcttccttttggatgaagccatacagtatttgagcaagataaagattcagcaaattgagaaggatcgaggtgaatgggatagtctgactccagaagcccgccgagaaaaggaggctggcctacagatgtttggacagctggcacgtttccataacatcatgtccaatgaaacaatcggtacccttgcctttctcacatcagagatcaagtcactctttgtgcatcccttcctggctgagcgcatcatctccatgttgaactacttcctgcaacacctggttggccccaagatgggtgccttaaaagtcaaggacttcagcgaatttgacttcaaaccccagcagcttgtatcagatatctgcactatctacttaaatcttggggatgaggagaatttctgtgccactgtgcccaaggatggacgttcctattccccaactctctttgcacagacagttcgagtcttgaagaaaataaataagcctgggaatatgattatggctttcagcaacttggcagagagaatcaagtctcttgcagacctccaacaacaggaagaggaaacctatgcagatgcctgtgatgagttcctggatcccattatgagcacactgatgtgtgaccctgtggtgctgccatcttccagagtcactgtggatagatccaccattgcaagacatttgctcagtgaccaaacagatccctttaaccgtagtcccctcaccatggaccagatccggccaaacacagaactaaaagaaaaaatccaacggtggcttgcagagaggaaacaacaaaaggagcaacttgaatagatactgtgaactaaccaaaccaaaaccaaccccagagtgcagataaacaattgtttgtggtttctct

SEQ ID NO: 33582 - DNA, 4772 bp, Homo sapiens
  source 1..4772: mol_type = unassigned DNA
gacggggtgggacggaggcggggagaggacgcaggcgagaggaactcggcggcgcggcgcccgcggcctattggctgccacgtcccggcgccagaagccccgcctccctgacgggggtcacgtgatccctttcaaagatggccgccctgttgttttgatgaataatacttggtggggcgagggggaaagagtaggggtggaggggtaggaggatttactcttccagcgagagctacgcgcatcccatcctccccctcccccctacccgggctccggcgtggaggcggggcgtggccggcctgctttgggaggggaggggcttcccttacagtgctgggctctgccaggacggctgtggggtcgccttacctcggggtatccactctgcagtcgaccagttcccgccaggagcaaagggtaggaaggagagcaggatctgctgtaggaacgcagctaccgcgccactatcacgaagaaacagcaggctcggggcacgagacgaactggagaccgcgctgcctagctgggtaacctgggaagcagagggtaataagtggcgccttaagacaaccctgtagcagcagcagtggcggccaaaggaggctgctcagggaacaagcggctgtagtagtctgtggggcgactggagtgaccgaagccaaggcagtttagtgcctctcgtgttcttattttttaacctctgactatgcaattctgaaacctcccccattcgggggaccagacagcctgatagacaccttccactctccttcctcccgccgtggtctcgagaacagaaggatctctccttaacgcctttcaccattaagaggaaagcgatggaggagctgagcgctgatgagattcgacggaggcgccttgcacgacttgctggtggacagacctctcagccaaccaccccactcacctctccccagagggagaaccctccggggcctcccatagcggcatcagccccaggaccctctcagagtcttggtctcaatgtccacaacatgaccccagctacctccccaataggtgcatcaggagtagcccatcgaagccagagcagtgaaggagtcagttctctcagcagctcgccctctaatagccttgaaacgcaatctcagtctctctcacgttcccagagcatggatatcgatggtgtctcatgtgagaaaagcatgtcccaggtggatgtggattcaggaattgaaaacatggaggttgatgaaaatgatcgaagagaaaagcggagcctcagtgataaggagccttcctcgggccctgaagtgtctgaagagcaggccttacagctggtctgtaagatcttccgtgtctcttggaaggaccgggacagagatgtcatctttctttcttctctttctgcacagtttaagcagaacccaaaagaagtattctccgattttaaggacttgattggccagattttaatggaagtgctaatgatgtccactcagaccagagatgaaaacccatttgccagtctgacagccacatcacagccaattgctgcagcagcacggtcaccagacagaaatctcttgctaaacactggctccaatccaggaacaagccccatgttctgcagcgtggcttcctttggtgccagctctttgtctagtttgggagcctctggtggagcaagtaattgggattcctacagtgaccatttcaccattgaaacctgcaaagagacagatatgctgaactacctcatcgagtgtttcgaccgagttggaatagaggaaaaaaaagcaccaaagatgtgcagccagccagcagtcagccagcttctgagcaacatccgctcacagtgcatatcccatactgctttagtactacaaggctccctaacacagcccaggtccttgcagcagccgtccttcctagtgccgtatatgctgtgtaggaatctcccatatggcttcattcaggaactggtgagaaccactcaccaggatgaagaagtgttcaagcagatatttatccccattttacaaggcctggctcttgctgccaaagagtgctccctcgacagtgactactttaaataccccctcatggcactaggtgagctctgtgaaaccaagtttgggaagacacaccctgtgtgcaatttggttgcttctttgcggttgtggttgccgaaatccttaagtcctggctgtgggcgggagctgcagagactctcttacttaggggctttctttagcttctcagtctttgcagaagatgatgttaaagtggttgaaaaatacttctcagggcctgccattaccctggaaaacactcgtgtggttagccaatcattgcagcattacttagagctcggaaggcaagagctttttaagattctgcatagtattttgttaaatggcgaaacccgtgaggctgctctcagttacatggcggctgtcgtcaatgccaatatgaagaaagcacagatgcagacagatgatagattggtgtctacagatggatttatgctgaatttcctttgggtactgcagcagctaagtacaaaaatcaagttagaaacagttgatcccacgtatatttttcacccaagatgtcggattactcttcccaatgatgagacgcgtgtgaatgcaacgatggaagatgtgaatgactggctgactgaactctatggcgatcagcctccattttctgagccgaaattccctacggagtgcttctttctcaccctgcatgctcaccacctctctattctgcctagttgccgtcgctatatccgcagactccgggctatccgggagctcaatagaactgtagaagatttgaaaaataatgaaagccaatggaaagattccccactggcaactagacaccgcgaaatgctgaagcgctgtaaaactcagcttaagaaactggtacggtgcaaggcctgtgctgatgctggcctacttgacgagagcttcctgagaagatgtctgaatttttatggccttctcattcagctgctgctccgcatcctggaccccgcatatcccgatataacactgcctttaaattcagatgtccccaaggtatttgcagcgttgcctgagttttatgtagaagatgttgcagaatttttattttttattgtacaatactctccccaggcgctttatgagccctgtactcaggatattgtgatgttccttgttgtgatgttgtgcaaccagaactacatccgaaacccatatttggtggccaaactggtagaagtcatgtttatgaccaaccctgctgttcagccacgaacccagaagttttttgaaatgattgagaaccatcctctctccaccaagttgttggtaccttccctgatgaagttttatacagatgttgagcataccggagccaccagtgagttttatgacaagttcacaattcgctatcatattagcaccatttttaaaagcctttggcaaaacatagctcaccatggcacctttatggaggagttcaactccgggaagcagtttgttcgctatataaacatgttgataaacgacacgacgtttttgctcgatgaaagtctggagtctctgaagcgaatccatgaagtgcaggaagagatgaagaacaaagaacagtgggaccagttgccccgggatcagcagcaggctcgtcagtctcagcttgctcaggatgagcgtgtgtcccgctcttacctcgccctggccaccgaaaccgtggacatgttccacatcctcacgaagcaggtccagaagcccttcctcagaccggagcttggaccccgattggctgcaatgctgaactttaatcttcagcaactttgtggccccaagtgccgtgacctgaaagttgaaaaccctgagaaatacggctttgaaccaaagaagctgttggaccaactgacggatatttacttacagctggactgtgctcggttcgcgaaagccattgctgacgaccagagatcctacagtaaggaattgtttgaagaagttatttcaaagatgcggaaggcagggatcaaatccacaatagcaatagaaaaatttaagctgctcgccgagaaagtggaggagatagtggccaagaacgcacgcgcagaaatcgactacagcgacgctcctgatgagttcagagaccctctgatggacaccctcatgacagaccccgtgcggctgccctctggcaccatcatggaccgctccatcatcctgcggcacctgctcaactcccccacggaccccttcaaccggcagacgctgacagagagcatgctggaaccagtgccagaactgaaagagcagattcaggcgtggatgagagagaaacagaacagcgatcactaaaccgttccgccgcccaccctctgctagacacagccaaggccaacgaggcaagcagaagcagcggccgcagcgaagctgccgttcatgtgttggaggccaaatgtggcaaaccaaccccaggcccacccagagcgagcaaacgctgagacctgaaaggacatggatgagaagaggagcccgcttcctgtacatatatttaagtgacaaacacggtcaaaagcttaagggacaggttttatggttgcttgtgtaataaagcatgtccttcgtatgtcacagtttggggcaacggaagtcttttagtgatggctaatgggtctgggcagcatcccttcatgaatttttttttaatccaatatccgttgatttgattgtgattagagaaccttggacattttgctgctaaagaat

SEQ ID NO: 33583 - DNA, 5267 bp, Homo sapiens
  source 1..5267: mol_type = unassigned DNA
ctctccttcctcccgccgtggtctcgagaacagaaggatctctccttaacgcctttcaccattaagaggaaagcgatggaggagctgagcgctgatgagattcgacggaggcgccttgcacgacttgctggtggacagacctctcagccaaccaccccactcacctctccccagagggagaaccctccggggcctcccatagcggcatcagccccaggaccctctcagagtcttggtctcaatgtccacaacatgaccccagctacctccccaataggtgcatcaggagtagcccatcgaagccagagcagtgaaggagtcagttctctcagcagctcgccctctaatagccttgaaacgcaatctcagtctctctcacgttcccagagcatggatatcgatggtgtctcatgtgagaaaagcatgtcccaggtggatgtggattcaggaattgaaaacatggaggttgatgaaaatgatcgaagagaaaagcggagcctcagtgataaggagccttcctcgggccctgaagtgtctgaagagcaggccttacagctggtctgtaagatcttccgtgtctcttggaaggaccgggacagagatgtcatctttctttcttctctttctgcacagtttaagcagaacccaaaagaagtattctccgattttaaggacttgattggccagattttaatggaagtgctaatgatgtccactcagaccagagatgaaaacccatttgccagtctgacagccacatcacagccaattgctgcagcagcacggtcaccagacagaaatctcttgctaaacactggctccaatccaggaacaagccccatgttctgcagcgtggcttcctttggtgccagctctttgtctagcctctatgaaagtagtccggctcccactcccagtttctggagctctgttcccgtgatgggcccgtctcttgcctcaccttcccgtgcagccagccagttggctgtgccttccactcccctcagtcctcacagtgcagcctctggaactgctgcgggaagccagccttcatccccgcggtatcgcccctacactgtcactcacccatgggcgtcctcaggcgtctccattctgtcgagctccccaagtccccctgccctcgccagtagcccccaagcagtgcccgccagcagttccagacagaggcccagcagcacgggtccacccctaccacccgcctcacccagtgccacgagcagacgcccctcctccctgaggatctctcctagtttgggagcctctggtggagcaagtaattgggattcctacagtgaccatttcaccattgaaacctgcaaagagacagatatgctgaactacctcatcgagtgtttcgaccgagttggaatagaggaaaaaaaagcaccaaagatgtgcagccagccagcagtcagccagcttctgagcaacatccgctcacagtgcatatcccatactgctttagtactacaaggctccctaacacagcccaggtccttgcagcagccgtccttcctagtgccgtatatgctgtgtaggaatctcccatatggcttcattcaggaactggtgagaaccactcaccaggatgaagaagtgttcaagcagatatttatccccattttacaaggcctggctcttgctgccaaagagtgctccctcgacagtgactactttaaataccccctcatggcactaggtgagctctgtgaaaccaagtttgggaagacacaccctgtgtgcaatttggttgcttctttgcggttgtggttgccgaaatccttaagtcctggctgtgggcgggagctgcagagactctcttacttaggggctttctttagcttctcagtctttgcagaagatgatgttaaagtggttgaaaaatacttctcagggcctgccattaccctggaaaacactcgtgtggttagccaatcattgcagcattacttagagctcggaaggcaagagctttttaagattctgcatagtattttgttaaatggcgaaacccgtgaggctgctctcagttacatggcggctgtcgtcaatgccaatatgaagaaagcacagatgcagacagatgatagattggtgtctacagatggatttatgctgaatttcctttgggtactgcagcagctaagtacaaaaatcaagttagaaacagttgatcccacgtatatttttcacccaagatgtcggattactcttcccaatgatgagacgcgtgtgaatgcaacgatggaagatgtgaatgactggctgactgaactctatggcgatcagcctccattttctgagccgaaattccctacggagtgcttctttctcaccctgcatgctcaccacctctctattctgcctagttgccgtcgctatatccgcagactccgggctatccgggagctcaatagaactgtagaagatttgaaaaataatgaaagccaatggaaagattccccactggcaactagacaccgcgaaatgctgaagcgctgtaaaactcagcttaagaaactggtacggtgcaaggcctgtgctgatgctggcctacttgacgagagcttcctgagaagatgtctgaatttttatggccttctcattcagctgctgctccgcatcctggaccccgcatatcccgatataacactgcctttaaattcagatgtccccaaggtatttgcagcgttgcctgagttttatgtagaagatgttgcagaatttttattttttattgtacaatactctccccaggcgctttatgagccctgtactcaggatattgtgatgttccttgttgtgatgttgtgcaaccagaactacatccgaaacccatatttggtggccaaactggtagaagtcatgtttatgaccaaccctgctgttcagccacgaacccagaagttttttgaaatgattgagaaccatcctctctccaccaagttgttggtaccttccctgatgaagttttatacagatgttgagcataccggagccaccagtgagttttatgacaagttcacaattcgctatcatattagcaccatttttaaaagcctttggcaaaacatagctcaccatggcacctttatggaggagttcaactccgggaagcagtttgttcgctatataaacatgttgataaacgacacgacgtttttgctcgatgaaagtctggagtctctgaagcgaatccatgaagtgcaggaagagatgaagaacaaagaacagtgggaccagttgccccgggatcagcagcaggctcgtcagtctcagcttgctcaggatgagcgtgtgtcccgctcttacctcgccctggccaccgaaaccgtggacatgttccacatcctcacgaagcaggtccagaagcccttcctcagaccggagcttggaccccgattggctgcaatgctgaactttaatcttcagcaactttgtggccccaagtgccgtgacctgaaagttgaaaaccctgagaaatacggctttgaaccaaagaagctgttggaccaactgacggatatttacttacagctggactgtgctcggttcgcgaaagccattgctgacgaccagagatcctacagtaaggaattgtttgaagaagttatttcaaagatgcggaaggcagggatcaaatccacaatagcaatagaaaaatttaagctgctcgccgagaaagtggaggagatagtggccaagaacgcacgcgcagaaatcgactacagcgacgctcctgatgagttcagagaccctctgatggacaccctcatgacagaccccgtgcggctgccctctggcaccatcatggaccgctccatcatcctgcggcacctgctcaactcccccacggaccccttcaaccggcagacgctgacagagagcatgctggaaccagtgccagaactgaaagagcagattcaggcgtggatgagagagaaacagaacagcgatcactaaaccgttccgccgcccaccctctgctagacacagccaaggccaacgaggcaagcagaagcagcggccgcagcgaagctgccgttcatgtgttggaggccaaatgtggcaaaccaaccccaggcccacccagagcgagcaaacgctgagacctgaaaggacatggatgagaagaggagcccgcttcctgtacatatatttaagtgacaaacacggtcaaaagcttaagggacaggttttatggttgcttgtgtaataaagcatgtccttcgtatgtcacagtttggggcaacggaagtcttttagtgatggctaatgggtctgggcagcatcccttcatgaatttttttttaatccaatatccgttgatttgattgtgattagagaaccttggacattttgctgctaaagaatcttttttcccctctcccccttcctgaccctacttgcactgctgtggatttttttaagagaagcaaaaacaaaagtaaactcctttccctggccctccaaacatatattctgtgagataactgtgcctgctaccaagtgttaatcctgggatcgtatttttatatcatattcacatatttgtttttttaattggtgttagatgacatgattaataaaaaaggcaagatattttcagaatttgaatttcagttttttttttcttttgaaatgtccctttaagatttttttattctaaacaaaataaagaaaatcctgctgctctggtccttgtgataagcctctcttcggcatctgaggagcagctgcagcaaaatctaggggtgtaagtgtatcaggacttatgtgacttatattttggggagatgagggttgggttttttttttaatgctacgtgacagtttgaaaccttcacagttatcctctgggggtaaatcaattcttcaacccttgggtgtgtgagtttgaggcagggtcatttgtgtgatgtgtttggccttaccaaagcaaaagagggtgcaagaatgtgggagtatgtctgccggtttcaacacacacagacaaacacagccacacgcgcacacaagtataagactttttgtattactgctccctacttaacatacttgaattctcaaatttcctttggggtaaaaaaaaaaaaaggatttgaaaccataaagtgttctgaagaaattaagtctataaaaagcatactttcttttttcttttccttttttccctccacagacaatgtcctctgttcaattcctaacgcaaactacaataaatggtgacacacgttcagaagaaa

SEQ ID NO: 33584 - DNA, 1273 bp, Homo sapiens
  source 1..1273: mol_type = unassigned DNA
taggaacgcagctaccgcgccactatcacgaagaaacagcaggctcggggcacgagacgaactggagaccgcgctgcctagctgggtaacctgggaagcagagggtaataagtggcgccttaagacaaccctgtagcagcagcagtggcggccaaaggaggctgctcagggaacaagcggctgtagtagtctgtggggcgactggagtgaccgaagccaaggcagtttagtgcctctcgtgttcttattttttaacctctgactatgcaattctgaaacctcccccattcgggggaccagacagcctgatagacaccttccactctccttcctcccgccgtggtctcgagaacagaaggatctctccttaacgcctttcaccattaagaggaaagcgatggaggagctgagcgctgatgagattcgacggaggcgccttgcacgacttgctggtggacagacctctcagccaaccaccccactcacctctccccagagggagaaccctccggggcctcccatagcggcatcagccccaggaccctctcagagtcttggtctcaatgtccacaacatgaccccagctacctccccaataggtgcatcaggtttaggtattatctctgatgacaagatgattaagactgaatttggttctgctgattttatgaatttggttgatggttttaagataaaataatctgaaaatgcaagattaaaataatggtcaaaatgaacacctctaattgcagatttcctcgtcttcattctgcattggcacagaactttttctttaacttttcagaggataaaactacctgataggatgtttagaactatctcattaaaaagtaaaagtttatttctttataataaatgagctgatgcttgatatccaggactgtctttgttgggaaatgatatttctcatactgtgtatttgaaaatatctctcttttgtctgtgaacttttctatcaaatatagtattattgtcatataataataattactattttataattaggattctagttgcgtaaagggggtgctaagagaactgcattgatcataatatcatctaataatttgatagccttctgaatcatctgtcttcttgatctagaatcgtgtcaattaaaagtatttgcagagtttttgttgctgtacttctcgttaggtatcagtgtagactatagatatatataaatgtttatacctaatgtggttcaaccaaaacatctgttagtaataaagaagatccttgcctataa

SEQ ID NO: 33585 - DNA, 5522 bp, Homo sapiens
  source 1..5522: mol_type = unassigned DNA
ccctttcaaagatggccgccctgttgttttgatgaataatacttggtggggcgagggggaaagagtaggggtggaggggtaggaggatttactcttccagcgagagctacgcgcatcccatcctccccctcccccctacccgggctccggcgtggaggcggggcgtggccggcctgctttgggaggggaggggcttcccttacagtgctgggctctgccaggacggctgtggggtcgccttacctcggggtatccactctgcagtcgaccagttcccgccaggagcaaagggtaggaaggagagcaggatctgctgtaggaacgcagctaccgcgccactatcacgaagaaacagcaggctcggggcacgagacgaactggagaccgcgctgcctagctgggtaacctgggaagcagagggtaataagtggcgccttaagacaaccctgtagcagcagcagtggcggccaaaggaggctgctcagggaacaagcggctgtagtagtctgtggggcgactggagtgaccgaagccaaggcagtttagtgcctctcgtgttcttattttttaacctctgactatgcaattctgaaacctcccccattcgggggaccagacagcctgatagacaccttccactctccttcctcccgccgtggtctcgagaacagaaggatctctccttaacgcctttcaccattaagaggaaagcgatggaggagctgagcgctgatgagattcgacggaggcgccttgcacgacttgctggtggacagacctctcagccaaccaccccactcacctctccccagagggagaaccctccggggcctcccatagcggcatcagccccaggaccctctcagagtcttggtctcaatgtccacaacatgaccccagctacctccccaataggtgcatcaggagtagcccatcgaagccagagcagtgaaggagtcagttctctcagcagctcgccctctaatagccttgaaacgcaatctcagtctctctcacgttcccagagcatggatatcgatggtgtctcatgtgagaaaagcatgtcccaggtggatgtggattcaggaattgaaaacatggaggttgatgaaaatgatcgaagagaaaagcggagcctcagtgataaggagccttcctcgggccctgaagtgtctgaagagcaggccttacagctggtctgtaagatcttccgtgtctcttggaaggaccgggacagagatgtcatctttctttcttctctttctgcacagtttaagcagaacccaaaagaagtattctccgattttaaggacttgattggccagattttaatggaagtgctaatgatgtccactcagaccagagatgaaaacccatttgccagtctgacagccacatcacagccaattgctgcagcagcacggtcaccagacagaaatctcttgctaaacactggctccaatccaggaacaagccccatgttctgcagcgtggcttcctttggtgccagctctttgtctagtttgggagcctctggtggagcaagtaattgggattcctacagtgaccatttcaccattgaaacctgcaaagagacagatatgctgaactacctcatcgagtgtttcgaccgagttggaatagaggaaaaaaaagcaccaaagatgtgcagccagccagcagtcagccagcttctgagcaacatccgctcacagtgcatatcccatactgctttagtactacaaggctccctaacacagcccaggtccttgcagcagccgtccttcctagtgccgtatatgctgtgtaggaatctcccatatggcttcattcaggaactggtgagaaccactcaccaggatgaagaagtgttcaagcagatatttatccccattttacaaggcctggctcttgctgccaaagagtgctccctcgacagtgactactttaaataccccctcatggcactaggtgagctctgtgaaaccaagtttgggaagacacaccctgtgtgcaatttggttgcttctttgcggttgtggttgccgaaatccttaagtcctggctgtgggcgggagctgcagagactctcttacttaggggctttctttagcttctcagtctttgcagaagatgatgttaaagtggttgaaaaatacttctcagggcctgccattaccctggaaaacactcgtgtggttagccaatcattgcagcattacttagagctcggaaggcaagagctttttaagattctgcatagtattttgttaaatggcgaaacccgtgaggctgctctcagttacatggcggctgtcgtcaatgccaatatgaagaaagcacagatgcagacagatgatagattggtgtctacagatggatttatgctgaatttcctttgggtactgcagcagctaagtacaaaaatcaagttagaaacagttgatcccacgtatatttttcacccaagatgtcggattactcttcccaatgatgagacgcgtgtgaatgcaacgatggaagatgtgaatgactggctgactgaactctatggcgatcagcctccattttctgagccgaaattccctacggagtgcttctttctcaccctgcatgctcaccacctctctattctgcctagttgccgtcgctatatccgcagactccgggctatccgggagctcaatagaactgtagaagatttgaaaaataatgaaagccaatggaaagattccccactggcaactagacaccgcgaaatgctgaagcgctgtaaaactcagcttaagaaactggtacggtgcaaggcctgtgctgatgctggcctacttgacgagagcttcctgagaagatgtctgaatttttatggccttctcattcagctgctgctccgcatcctggaccccgcatatcccgatataacactgcctttaaattcagatgtccccaaggtatttgcagcgttgcctgagttttatgtagaagatgttgcagaatttttattttttattgtacaatactctccccaggcgctttatgagccctgtactcaggatattgtgatgttccttgttgtgatgttgtgcaaccagaactacatccgaaacccatatttggtggccaaactggtagaagtcatgtttatgaccaaccctgctgttcagccacgaacccagaagttttttgaaatgattgagaaccatcctctctccaccaagttgttggtaccttccctgatgaagttttatacagatgttgagcataccggagccaccagtgagttttatgacaagttcacaattcgctatcatattagcaccatttttaaaagcctttggcaaaacatagctcaccatggcacctttatggaggagttcaactccgggaagcagtttgttcgctatataaacatgttgataaacgacacgacgtttttgctcgatgaaagtctggagtctctgaagcgaatccatgaagtgcaggaagagatgaagaacaaagaacagtgggaccagttgccccgggatcagcagcaggctcgtcagtctcagcttgctcaggatgagcgtgtgtcccgctcttacctcgccctggccaccgaaaccgtggacatgttccacatcctcacgaagcaggtccagaagcccttcctcagaccggagcttggaccccgattggctgcaatgctgaactttaatcttcagcaactttgtggccccaagtgccgtgacctgaaagttgaaaaccctgagaaatacggctttgaaccaaagaagctgttggaccaactgacggatatttacttacagctggactgtgctcggttcgcgaaagccattgctgacgaccagagatcctacagtaaggaattgtttgaagaagttatttcaaagatgcggaaggcagggatcaaatccacaatagcaatagaaaaatttaagctgctcgccgagaaagtggaggagatagtggccaagaacgcacgcgcagaaatcgactacagcgacgctcctgatgagttcagaggcaagtggactcaccctctgatggacaccctcatgacagaccccgtgcggctgccctctggcaccatcatggaccgctccatcatcctgcggcacctgctcaactcccccacggaccccttcaaccggcagacgctgacagagagcatgctggaaccagtgccagaactgaaagagcagattcaggcgtggatgagagagaaacagaacagcgatcactaaaccgttccgccgcccaccctctgctagacacagccaaggccaacgaggcaagcagaagcagcggccgcagcgaagctgccgttcatgtgttggaggccaaatgtggcaaaccaaccccaggcccacccagagcgagcaaacgctgagacctgaaaggacatggatgagaagaggagcccgcttcctgtacatatatttaagtgacaaacacggtcaaaagcttaagggacaggttttatggttgcttgtgtaataaagcatgtccttcgtatgtcacagtttggggcaacggaagtcttttagtgatggctaatgggtctgggcagcatcccttcatgaatttttttttaatccaatatccgttgatttgattgtgattagagaaccttggacattttgctgctaaagaatcttttttcccctctcccccttcctgaccctacttgcactgctgtggatttttttaagagaagcaaaaacaaaagtaaactcctttccctggccctccaaacatatattctgtgagataactgtgcctgctaccaagtgttaatcctgggatcgtatttttatatcatattcacatatttgtttttttaattggtgttagatgacatgattaataaaaaaggcaagatattttcagaatttgaatttcagttttttttttcttttgaaatgtccctttaagatttttttattctaaacaaaataaagaaaatcctgctgctctggtccttgtgataagcctctcttcggcatctgaggagcagctgcagcaaaatctaggggtgtaagtgtatcaggacttatgtgacttatattttggggagatgagggttgggttttttttttaatgctacgtgacagtttgaaaccttcacagttatcctctgggggtaaatcaattcttcaacccttgggtgtgtgagtttgaggcagggtcatttgtgtgatgtgtttggccttaccaaagcaaaagagggtgcaagaatgtgggagtatgtctgccggtttcaacacacacagacaaacacagccacacgcgcacacaagtataagactttttgtattactgctccctacttaacatacttgaattctcaaatttcctttggggtaaaaaaaaaaaaaggatttgaaaccataaagtgttctgaagaaattaagtctataaaaagcatactttcttttttcttttccttttttccctccacagacaatgtcctctgttcaattcctaacgcaaactacaataaatggtgacacacgttc

SEQ ID NO: 33586 - DNA, 2536 bp, Homo sapiens
  source 1..2536: mol_type = unassigned DNA
gcctaacctcttcctgcgatgagctcggcacgggaattattattgtcaattttacttgcaagaagtttcctacaagagccaaggaatccatgcgagtaaacatttacgggcaccatagataaaaggcttgtgttttaatcctcatcctctccacctgttagctctgagtctcagttttctcatctctaaaaatggggatattcacaggagttgctgcatcgagttgtgaggattaaaagttggatgtaacggcttggtaattatgagctcttctagtgtcccttcctcttccctgtgcccaaggggttttaggaaagcattttatctccacagcaatcctatgaggttgatactactatcctcatagaaggggaaactgatgccaggagaggttcaagcgtcttacctgaagtcacaaagcaaactgagtgatgaaggaagacttgaacctagaaaatttcactgcaaaggagtaaaagtccctcgcaatttccgactgttggaagaactcgaagaaggccagaaaggagtaggagatggcacagttagctggggtctagaagatgacgaagacatgacacttacaagatggacagggatgataattgggcctccaagaacaatttatgaaaaccgaatatacagccttaaaatagaatgtggacctaaatacccagaagcacccccctttgtaagatttgtaacaaaaattaatatgaatggagtaaatagttctaatggagtggtggacccaagagccatatcagtgctagcaaaatggcagaattcatatagcatcaaagttgtcctgcaagagcttcggcgcctaatgatgtctaaagaaaatatgaaactccctcagccgcccgaaggacagtgttacagcaattaatcaaaaagaaaaaccacaggcccttccccttccccccaattcgatttaatcagtcttcattttccacagtagtaaattttctagatacgtcttgtagacctcaaagtaccggaaaggaagctcccattcaaaggaaatttatcttaagatactgtaaatgatactaattttttgtccatttgaaatatataagttgtgctataacaaatcatcctgtcaagtgtaaccactgtccacgtagttgaacttctgggatcaagaaagtctatttaaattgattcccatcataactggtggggcacatctaactcaactgtgaaaagacacatcacacaatcaccttgctgctgattacacggcctggggtctctgccttctccccttaccctcccgcctcccaccctccctgcaacaacagccctctagcctggggggcttgttagagtagatgtgaaggtttcaggtcgcagcctgtgggactactgctaggtgtgtggggtgtttcgcctgcacccctggtttctttaagtcttaagtgatgccccttccaaaccatcatcctgtccccacgctcctccactcccgcccttggccgaagcatagattgtaacccctccactcccctctgagattggccttcggtgaggaattcagggctttccccatatcttctctcccccacctttatcgaggggtgctgctttttctccctcctcctcaagttcctttttgcaccgtcaccacccaacaccttccatgacacttccttgctttggccagaagccatcaggtaaggttggaaagagcctctgacctcccttgtttagttttggaaccatactcactcactctccaccagcctgggaaatgaatattgggtcctcagccctgccaccctctgctgtcatcagctgatgcattgtttttagctcaggttttgataaggtgaaaagaatagtcaccagggttactcagacctgccagctctcggagtccttggtggttgaacttggagaaagaccgcatgaagatacttgtaagcacacatgatccctctgaattgttttactttcctgtaactgcttttgcttttaaaaattgaagaagttttaaacagggctttcatttggtcatccttgcaatccattggggtctagtttggaatctgacaactggaacaaaaagaaccttgaatccggtgcatgccttggttttggtgctgctgctgcttcccaagatcctcagcagggattaagaaggaacccggtgtgcacagcagatccccgaaattggtgggcttgacctcctggcaaattgctgcgtctttccacttgctgttcaggaccactaaatgctgaaatgtggatgcataccgaaataaaagcaattcattgtgtactaaaggttttttttttttttttaatttagtatttgtgtaaaaccaccttttgaagcagcaactatcaagtctgaaaagcaattgatgtttccattaatctttttctggggggaaaaccttagttctaaggatttaacatcctgtaagtgaagtttaacataacagtattccataagcagcctttttattgtcagaccattgcctgattttaatataataaaaaaaaagtgtgcgttaatatttaa

SEQ ID NO: 33587 - DNA, 1954 bp, Homo sapiens
  source 1..1954: mol_type = unassigned DNA
atggagaagggacttaatactaaaaacttcactgaacaaacaatttatgaaaaccgaatatacagccttaaaatagaatgtggacctaaatacccagaagcacccccctttgtaagatttgtaacaaaaattaatatgaatggagtaaatagttctaatggagtggtggacccaagagccatatcagtgctagcaaaatggcagaattcatatagcatcaaagttgtcctgcaagagcttcggcgcctaatgatgtctaaagaaaatatgaaactccctcagccgcccgaaggacagtgttacagcaattaatcaaaaagaaaaaccacaggcccttccccttccccccaattcgatttaatcagtcttcattttccacagtagtaaattttctagatacgtcttgtagacctcaaagtaccggaaaggaagctcccattcaaaggaaatttatcttaagatactgtaaatgatactaattttttgtccatttgaaatatataagttgtgctataacaaatcatcctgtcaagtgtaaccactgtccacgtagttgaacttctgggatcaagaaagtctatttaaattgattcccatcataactggtggggcacatctaactcaactgtgaaaagacacatcacacaatcaccttgctgctgattacacggcctggggtctctgccttctccccttaccctcccgcctcccaccctccctgcaacaacagccctctagcctggggggcttgttagagtagatgtgaaggtttcaggtcgcagcctgtgggactactgctaggtgtgtggggtgtttcgcctgcacccctggtttctttaagtcttaagtgatgccccttccaaaccatcatcctgtccccacgctcctccactcccgcccttggccgaagcatagattgtaacccctccactcccctctgagattggccttcggtgaggaattcagggctttccccatatcttctctcccccacctttatcgaggggtgctgctttttctccctcctcctcaagttcctttttgcaccgtcaccacccaacaccttccatgacacttccttgctttggccagaagccatcaggtaaggttggaaagagcctctgacctcccttgtttagttttggaaccatactcactcactctccaccagcctgggaaatgaatattgggtcctcagccctgccaccctctgctgtcatcagctgatgcattgtttttagctcaggttttgataaggtgaaaagaatagtcaccagggttactcagacctgccagctctcggagtccttggtggttgaacttggagaaagaccgcatgaagatacttgtaagcacacatgatccctctgaattgttttactttcctgtaactgcttttgcttttaaaaattgaagaagttttaaacagggctttcatttggtcatccttgcaatccattggggtctagtttggaatctgacaactggaacaaaaagaaccttgaatccggtgcatgccttggttttggtgctgctgctgcttcccaagatcctcagcagggattaagaaggaacccggtgtgcacagcagatccccgaaattggtgggcttgacctcctggcaaattgctgcgtctttccacttgctgttcaggaccactaaatgctgaaatgtggatgcataccgaaataaaagcaattcattgtgtactaaaggttttttttttttttttaatttagtatttgtgtaaaaccaccttttgaagcagcaactatcaagtctgaaaagcaattgatgtttccattaatctttttctggggggaaaaccttagttctaaggatttaacatcctgtaagtgaagtttaacataacagtattccataagcagcctttttattgtcagaccattgcctgattttaatataataaaaaaaaagtgtgcgttaatattt

SEQ ID NO: 33588 - DNA, 2133 bp, Homo sapiens
  source 1..2133: mol_type = unassigned DNA
gggggggtgaagaaggggccggccttcaagcaagagcgacgcaagatggcagccaccacgggctcgggagtaaaagtccctcgcaatttccgactgttggaagaactcgaagaaggccagaaaggagtaggagatggcacagttagctggggtctagaagatgacgaagacatgacacttacaagatggacagggatgataattgggcctccaagaacaatttatgaaaaccgaatatacagccttaaaatagaatgtggacctaaatacccagaagcacccccctttgtaagatttgtaacaaaaattaatatgaatggagtaaatagttctaatggagtggtggacccaagagccatatcagtgctagcaaaatggcagaattcatatagcatcaaagttgtcctgcaagagcttcggcgcctaatgatgtctaaagaaaatatgaaactccctcagccgcccgaaggacagtgttacagcaattaatcaaaaagaaaaaccacaggcccttccccttccccccaattcgatttaatcagtcttcattttccacagtagtaaattttctagatacgtcttgtagacctcaaagtaccggaaaggaagctcccattcaaaggaaatttatcttaagatactgtaaatgatactaattttttgtccatttgaaatatataagttgtgctataacaaatcatcctgtcaagtgtaaccactgtccacgtagttgaacttctgggatcaagaaagtctatttaaattgattcccatcataactggtggggcacatctaactcaactgtgaaaagacacatcacacaatcaccttgctgctgattacacggcctggggtctctgccttctccccttaccctcccgcctcccaccctccctgcaacaacagccctctagcctggggggcttgttagagtagatgtgaaggtttcaggtcgcagcctgtgggactactgctaggtgtgtggggtgtttcgcctgcacccctggtttctttaagtcttaagtgatgccccttccaaaccatcatcctgtccccacgctcctccactcccgcccttggccgaagcatagattgtaacccctccactcccctctgagattggccttcggtgaggaattcagggctttccccatatcttctctcccccacctttatcgaggggtgctgctttttctccctcctcctcaagttcctttttgcaccgtcaccacccaacaccttccatgacacttccttgctttggccagaagccatcaggtaaggttggaaagagcctctgacctcccttgtttagttttggaaccatactcactcactctccaccagcctgggaaatgaatattgggtcctcagccctgccaccctctgctgtcatcagctgatgcattgtttttagctcaggttttgataaggtgaaaagaatagtcaccagggttactcagacctgccagctctcggagtccttggtggttgaacttggagaaagaccgcatgaagatacttgtaagcacacatgatccctctgaattgttttactttcctgtaactgcttttgcttttaaaaattgaagaagttttaaacagggctttcatttggtcatccttgcaatccattggggtctagtttggaatctgacaactggaacaaaaagaaccttgaatccggtgcatgccttggttttggtgctgctgctgcttcccaagatcctcagcagggattaagaaggaacccggtgtgcacagcagatccccgaaattggtgggcttgacctcctggcaaattgctgcgtctttccacttgctgttcaggaccactaaatgctgaaatgtggatgcataccgaaataaaagcaattcattgtgtactaaaggttttttttttttttttaatttagtatttgtgtaaaaccaccttttgaagcagcaactatcaagtctgaaaagcaattgatgtttccattaatctttttctggggggaaaaccttagttctaaggatttaacatcctgtaagtgaagtttaacataacagtattccataagcagcctttttattgtcagaccattgcctgattttaatataataaaaaaaaagtgtgcgttaatatttaa

SEQ ID NO: 33589 - DNA, 2459 bp, Homo sapiens
  source 1..2459: mol_type = unassigned DNA
gcctaacctcttcctgcgatgagctcggcacgggaattattattgtcaattttacttgcaagaagtttcctacaagagccaaggaatccatgcgagtaaacatttacgggcaccatagataaaaggcttgtgttttaatcctcatcctctccacctgttagctctgagtctcagttttctcatctctaaaaatggggatattcacaggagttgctgcatcgagttgtgaggattaaaagttggatgtaacggcttgcaatcctatgaggttgatactactatcctcatagaaggggaaactgatgccaggagaggttcaagcgtcttacctgaagtcacaaagcaaactgagtgatgaaggaagacttgaacctagaaaatttcactgcaaaggagtaaaagtccctcgcaatttccgactgttggaagaactcgaagaaggccagaaaggagtaggagatggcacagttagctggggtctagaagatgacgaagacatgacacttacaagatggacagggatgataattgggcctccaagaacaatttatgaaaaccgaatatacagccttaaaatagaatgtggacctaaatacccagaagcacccccctttgtaagatttgtaacaaaaattaatatgaatggagtaaatagttctaatggagtggtggacccaagagccatatcagtgctagcaaaatggcagaattcatatagcatcaaagttgtcctgcaagagcttcggcgcctaatgatgtctaaagaaaatatgaaactccctcagccgcccgaaggacagtgttacagcaattaatcaaaaagaaaaaccacaggcccttccccttccccccaattcgatttaatcagtcttcattttccacagtagtaaattttctagatacgtcttgtagacctcaaagtaccggaaaggaagctcccattcaaaggaaatttatcttaagatactgtaaatgatactaattttttgtccatttgaaatatataagttgtgctataacaaatcatcctgtcaagtgtaaccactgtccacgtagttgaacttctgggatcaagaaagtctatttaaattgattcccatcataactggtggggcacatctaactcaactgtgaaaagacacatcacacaatcaccttgctgctgattacacggcctggggtctctgccttctccccttaccctcccgcctcccaccctccctgcaacaacagccctctagcctggggggcttgttagagtagatgtgaaggtttcaggtcgcagcctgtgggactactgctaggtgtgtggggtgtttcgcctgcacccctggtttctttaagtcttaagtgatgccccttccaaaccatcatcctgtccccacgctcctccactcccgcccttggccgaagcatagattgtaacccctccactcccctctgagattggccttcggtgaggaattcagggctttccccatatcttctctcccccacctttatcgaggggtgctgctttttctccctcctcctcaagttcctttttgcaccgtcaccacccaacaccttccatgacacttccttgctttggccagaagccatcaggtaaggttggaaagagcctctgacctcccttgtttagttttggaaccatactcactcactctccaccagcctgggaaatgaatattgggtcctcagccctgccaccctctgctgtcatcagctgatgcattgtttttagctcaggttttgataaggtgaaaagaatagtcaccagggttactcagacctgccagctctcggagtccttggtggttgaacttggagaaagaccgcatgaagatacttgtaagcacacatgatccctctgaattgttttactttcctgtaactgcttttgcttttaaaaattgaagaagttttaaacagggctttcatttggtcatccttgcaatccattggggtctagtttggaatctgacaactggaacaaaaagaaccttgaatccggtgcatgccttggttttggtgctgctgctgcttcccaagatcctcagcagggattaagaaggaacccggtgtgcacagcagatccccgaaattggtgggcttgacctcctggcaaattgctgcgtctttccacttgctgttcaggaccactaaatgctgaaatgtggatgcataccgaaataaaagcaattcattgtgtactaaaggttttttttttttttttaatttagtatttgtgtaaaaccaccttttgaagcagcaactatcaagtctgaaaagcaattgatgtttccattaatctttttctggggggaaaaccttagttctaaggatttaacatcctgtaagtgaagtttaacataacagtattccataagcagcctttttattgtcagaccattgcctgattttaatataataaaaaaaaagtgtgcgttaatatttaa

SEQ ID NO: 33590 - DNA, 2387 bp, Homo sapiens
  source 1..2387: mol_type = unassigned DNA
gcctaacctcttcctgcgatgagctcggcacgggaattattattgtcaattttacttgcaagaagtttcctacaagagccaaggaatccatgcgagtaaacatttacgggcaccatagataaaaggcttgtgttttaatcctcatcctctccacctgttagctctgagtctcagttttctcatctctaaaaatggggatattcacaggagttgctgcatcgagttgtgaggattaaaagttggatgtaacggcttggtaattatgagctcttctagtgtcccttcctcttccctgtgcccaaggggttttaggaaagcattttatctccacagcaatcctatgaggttgatactactatcctcatagaaggggaaactgatgccaggagaggttcaagcgtcttacctgaagtcacaaagcaaactgagtgatgaaggaagacttgaacctagaaaatttcactgcaaagacaatttatgaaaaccgaatatacagccttaaaatagaatgtggacctaaatacccagaagcacccccctttgtaagatttgtaacaaaaattaatatgaatggagtaaatagttctaatggagtggtggacccaagagccatatcagtgctagcaaaatggcagaattcatatagcatcaaagttgtcctgcaagagcttcggcgcctaatgatgtctaaagaaaatatgaaactccctcagccgcccgaaggacagtgttacagcaattaatcaaaaagaaaaaccacaggcccttccccttccccccaattcgatttaatcagtcttcattttccacagtagtaaattttctagatacgtcttgtagacctcaaagtaccggaaaggaagctcccattcaaaggaaatttatcttaagatactgtaaatgatactaattttttgtccatttgaaatatataagttgtgctataacaaatcatcctgtcaagtgtaaccactgtccacgtagttgaacttctgggatcaagaaagtctatttaaattgattcccatcataactggtggggcacatctaactcaactgtgaaaagacacatcacacaatcaccttgctgctgattacacggcctggggtctctgccttctccccttaccctcccgcctcccaccctccctgcaacaacagccctctagcctggggggcttgttagagtagatgtgaaggtttcaggtcgcagcctgtgggactactgctaggtgtgtggggtgtttcgcctgcacccctggtttctttaagtcttaagtgatgccccttccaaaccatcatcctgtccccacgctcctccactcccgcccttggccgaagcatagattgtaacccctccactcccctctgagattggccttcggtgaggaattcagggctttccccatatcttctctcccccacctttatcgaggggtgctgctttttctccctcctcctcaagttcctttttgcaccgtcaccacccaacaccttccatgacacttccttgctttggccagaagccatcaggtaaggttggaaagagcctctgacctcccttgtttagttttggaaccatactcactcactctccaccagcctgggaaatgaatattgggtcctcagccctgccaccctctgctgtcatcagctgatgcattgtttttagctcaggttttgataaggtgaaaagaatagtcaccagggttactcagacctgccagctctcggagtccttggtggttgaacttggagaaagaccgcatgaagatacttgtaagcacacatgatccctctgaattgttttactttcctgtaactgcttttgcttttaaaaattgaagaagttttaaacagggctttcatttggtcatccttgcaatccattggggtctagtttggaatctgacaactggaacaaaaagaaccttgaatccggtgcatgccttggttttggtgctgctgctgcttcccaagatcctcagcagggattaagaaggaacccggtgtgcacagcagatccccgaaattggtgggcttgacctcctggcaaattgctgcgtctttccacttgctgttcaggaccactaaatgctgaaatgtggatgcataccgaaataaaagcaattcattgtgtactaaaggttttttttttttttttaatttagtatttgtgtaaaaccaccttttgaagcagcaactatcaagtctgaaaagcaattgatgtttccattaatctttttctggggggaaaaccttagttctaaggatttaacatcctgtaagtgaagtttaacataacagtattccataagcagcctttttattgtcagaccattgcctgattttaatataataaaaaaaaagtgtgcgttaatatttaa

SEQ ID NO: 33591 - DNA, 2179 bp, Homo sapiens
  source 1..2179: mol_type = unassigned DNA
gcctaacctcttcctgcgatgagctcggcacgggaattattattgtcaattttacttgcaagaagtttcctacaagagccaaggaatccatgcgagtaaacatttacgggcaccatagataaaagcaatcctatgaggttgatactactatcctcatagaaggggaaactgatgccaggagaggttcaagcgtcttacctgaagtcacaaagcaaactgagtgatgaaggaagacttgaacctagaaaatttcactgcaaagacaatttatgaaaaccgaatatacagccttaaaatagaatgtggacctaaatacccagaagcacccccctttgtaagatttgtaacaaaaattaatatgaatggagtaaatagttctaatggagtggtggacccaagagccatatcagtgctagcaaaatggcagaattcatatagcatcaaagttgtcctgcaagagcttcggcgcctaatgatgtctaaagaaaatatgaaactccctcagccgcccgaaggacagtgttacagcaattaatcaaaaagaaaaaccacaggcccttccccttccccccaattcgatttaatcagtcttcattttccacagtagtaaattttctagatacgtcttgtagacctcaaagtaccggaaaggaagctcccattcaaaggaaatttatcttaagatactgtaaatgatactaattttttgtccatttgaaatatataagttgtgctataacaaatcatcctgtcaagtgtaaccactgtccacgtagttgaacttctgggatcaagaaagtctatttaaattgattcccatcataactggtggggcacatctaactcaactgtgaaaagacacatcacacaatcaccttgctgctgattacacggcctggggtctctgccttctccccttaccctcccgcctcccaccctccctgcaacaacagccctctagcctggggggcttgttagagtagatgtgaaggtttcaggtcgcagcctgtgggactactgctaggtgtgtggggtgtttcgcctgcacccctggtttctttaagtcttaagtgatgccccttccaaaccatcatcctgtccccacgctcctccactcccgcccttggccgaagcatagattgtaacccctccactcccctctgagattggccttcggtgaggaattcagggctttccccatatcttctctcccccacctttatcgaggggtgctgctttttctccctcctcctcaagttcctttttgcaccgtcaccacccaacaccttccatgacacttccttgctttggccagaagccatcaggtaaggttggaaagagcctctgacctcccttgtttagttttggaaccatactcactcactctccaccagcctgggaaatgaatattgggtcctcagccctgccaccctctgctgtcatcagctgatgcattgtttttagctcaggttttgataaggtgaaaagaatagtcaccagggttactcagacctgccagctctcggagtccttggtggttgaacttggagaaagaccgcatgaagatacttgtaagcacacatgatccctctgaattgttttactttcctgtaactgcttttgcttttaaaaattgaagaagttttaaacagggctttcatttggtcatccttgcaatccattggggtctagtttggaatctgacaactggaacaaaaagaaccttgaatccggtgcatgccttggttttggtgctgctgctgcttcccaagatcctcagcagggattaagaaggaacccggtgtgcacagcagatccccgaaattggtgggcttgacctcctggcaaattgctgcgtctttccacttgctgttcaggaccactaaatgctgaaatgtggatgcataccgaaataaaagcaattcattgtgtactaaaggttttttttttttttttaatttagtatttgtgtaaaaccaccttttgaagcagcaactatcaagtctgaaaagcaattgatgtttccattaatctttttctggggggaaaaccttagttctaaggatttaacatcctgtaagtgaagtttaacataacagtattccataagcagcctttttattgtcagaccattgcctgattttaatataataaaaaaaaagtgtgcgttaatatttaa

SEQ ID NO: 33592 - DNA, 1973 bp, Homo sapiens
  source 1..1973: mol_type = unassigned DNA
agcgacgcaagatggcagccaccacgggctcgggagtaaaagtccctcgcaatttccgactgttggaagaactcgaagaaggccagaaaggagtaggagatggcacagttagctggggtctagaagatgacgaagacatgacacttacaagatggacagggatgataattgggcctccaagagtggacccaagagccatatcagtgctagcaaaatggcagaattcatatagcatcaaagttgtcctgcaagagcttcggcgcctaatgatgtctaaagaaaatatgaaactccctcagccgcccgaaggacagtgttacagcaattaatcaaaaagaaaaaccacaggcccttccccttccccccaattcgatttaatcagtcttcattttccacagtagtaaattttctagatacgtcttgtagacctcaaagtaccggaaaggaagctcccattcaaaggaaatttatcttaagatactgtaaatgatactaattttttgtccatttgaaatatataagttgtgctataacaaatcatcctgtcaagtgtaaccactgtccacgtagttgaacttctgggatcaagaaagtctatttaaattgattcccatcataactggtggggcacatctaactcaactgtgaaaagacacatcacacaatcaccttgctgctgattacacggcctggggtctctgccttctccccttaccctcccgcctcccaccctccctgcaacaacagccctctagcctggggggcttgttagagtagatgtgaaggtttcaggtcgcagcctgtgggactactgctaggtgtgtggggtgtttcgcctgcacccctggtttctttaagtcttaagtgatgccccttccaaaccatcatcctgtccccacgctcctccactcccgcccttggccgaagcatagattgtaacccctccactcccctctgagattggccttcggtgaggaattcagggctttccccatatcttctctcccccacctttatcgaggggtgctgctttttctccctcctcctcaagttcctttttgcaccgtcaccacccaacaccttccatgacacttccttgctttggccagaagccatcaggtaaggttggaaagagcctctgacctcccttgtttagttttggaaccatactcactcactctccaccagcctgggaaatgaatattgggtcctcagccctgccaccctctgctgtcatcagctgatgcattgtttttagctcaggttttgataaggtgaaaagaatagtcaccagggttactcagacctgccagctctcggagtccttggtggttgaacttggagaaagaccgcatgaagatacttgtaagcacacatgatccctctgaattgttttactttcctgtaactgcttttgcttttaaaaattgaagaagttttaaacagggctttcatttggtcatccttgcaatccattggggtctagtttggaatctgacaactggaacaaaaagaaccttgaatccggtgcatgccttggttttggtgctgctgctgcttcccaagatcctcagcagggattaagaaggaacccggtgtgcacagcagatccccgaaattggtgggcttgacctcctggcaaattgctgcgtctttccacttgctgttcaggaccactaaatgctgaaatgtggatgcataccgaaataaaagcaattcattgtgtactaaaggttttttttttttttttaatttagtatttgtgtaaaaccaccttttgaagcagcaactatcaagtctgaaaagcaattgatgtttccattaatctttttctggggggaaaaccttagttctaaggatttaacatcctgtaagtgaagtttaacataacagtattccataagcagcctttttattgtcagaccattgcctgattttaatataataaaaaaaaagtgtgcgttaatatttaa

SEQ ID NO: 33593 - DNA, 612 bp, Homo sapiens
  source 1..612: mol_type = unassigned DNA
ccagtgtatgccccacccctgaccccgctcgcgacatgtccaccccggctcggcggcgcctcatgcgggacttcaagaggttgcaggaggatcctccagccggagtcagcggggctccgtccgagaacaacataatggtgtggaacgcggtcattttcgggcctgaagggaccccgtttgaggatgtctatgcagatggtagtatatgtctggacatacttcagaaccgttggagtccaacctatgatgtgtcttccattctaacatccatacagtctctgttggatgaacccaatcccaatagtccagcaaacagccaggctgctcagctgtaccaggagaacaaacgggaatatgaaaagcgtgtttctgcaatagtagaacaaagctggcgtgattgttgaccccgggtacagtttaaagaagctggccataagaaaaatatatattgatgtgtttgtcacctccctactcctgtcattacatttactttattaaaagcaaaataactgttgtgctgtttccatcttccttgccaagttttcctaccccttctaccctctccttaaacatcagaaaacaccctctatgaaatcaaatgtactgtacctg

SEQ ID NO: 33594 - DNA, 1796 bp, Homo sapiens
  source 1..1796: mol_type = unassigned DNA
actggggtggtgcttagccggcgccagaccgaccctcgacttcggagaggcagcgcggttcctctgggtgcttccgcctccccttctcctgcttctccagcctcttcggcctcctcgcccgccgcgggaacccgagaccccagtgtatgccccacccctgaccccgctcgcgacatgtccaccccggctcggcggcgcctcatgcgggacttcaagaggttgcaggaggatcctccagccggagtcagcggggctccgtccgagaacaacataatggtgtggaacgcggtcattttcgggcctgaagggaccccgtttgaggatggaacatttaaacttacaatagaattcactgaagaatatccaaataaaccacctacagttagatttgtctctaagatgttccatccaaatgtctatgcagatggtagtatatgtctggacatacttcagaaccgttggagtccaacctatgatgtgtcttccattctaacatccatacagtctctgttggatgaacccaatcccaatagtccagcaaacagccaggctgctcagctgtaccaggagaacaaacgggaatatgaaaagcgtgtttctgcaatagtagaacaaagctggcgtgattgttgaccccgggtacagtttaaagaagctggccataagaaaaatatatattgatgtgtttgtcacctccctactcctgtcattacatttactttattaaaagcaaaataactgttgtgctgtttccatcttccttgccaagttttcctaccccttctaccctctccttaaacatcagaaaacaccctctatgaaatcaaatgtactgtacctgggttacttgcaaaaattactaatgcttcagtttttctgttgtatttcatttccagttttcaggcagttatttttattattgtactttaagcttttaagatgaattgttatacaagaggtgcttatgcttagcttgatgaccaggatgttatttttaacaaaatgattgctgaagtgtttcatcctggctggtccttcacttgtgttggatttagaagtgaatgtgtttggaatatggcctacagagaatagaaacaaatccatgtaaacaattttgaaggaggcatgggagctaaaaatcctgtgatactaagatctcagtcatatgaattacaacgtagtatttactggcaagaaggagaaagttgaaggactcagctaaaggagtacagcaattgtagtaactgacacatcctctctttgcaagctgctgactgggcacactcatgccaagtttcagaattattggtcttctgggtttttgctttttaaaagaggtgtgggagcagaggaatggaaacaatcgtgagtttttgagctagggaaagttggagctcctttaatctttttaaaggatcagtgctgccctaagtgaataaactcaattgtccatctttattttagagttttaatgaattcaaggaagggagcatagcatatctgtggcaaactattttccactcaaatcctgagttattgctgcatgctttaatttcttccctttcagcatctgagaaccttaaagccaatgtctgcgatctttttttggatatttatacttttagatatatagtacctttaagtagcagtatgggacaaggcttgtaaatgttttgtctaatgttctattgtcaccttttatgcatttatcacttccaaatctaactttgcacaagtaacccatgtaaaaaaaaatgtacatttttcaaaagttgtaaataaaaataaccttaaaa

SEQ ID NO: 33595 - DNA, 2643 bp, Homo sapiens
  source 1..2643: mol_type = unassigned DNA
tagtcttctctctttcttaagcagtgataaaccttttaatgagaacaaaaaggaaataaattgctaactctgaaggaaccagtaagaaatacactgaagtatggtctgttgttttagaataatttgttaaatggaccagagtaatatagtggaacatgcatcaccttataccatatagtaactgattcttctaagtttacttgaacagatttcagtcaggaaaaaacattgctcaattgtgttcttcaatttattcaacaaacaattgaaaataatattttaaaggacataatctcttcatatcacatcttaacaattcttgaatgagatccagtttgtccatgccttgtaagtaagtttataacctactatgctttagggcctcctgctaccttaggttgacatatatttaagaaaaataatttcatttcaatagtagcataaacattagaaaaataaatttgctggaaacatgaatgcaatctaaaccaaatgtgattttaaaattatttctgccattaattccctccatatgtgtgaataattgagttgattttatagtgaagtaccttatgagccatacttaagggtttctgagagggactatgaagtttttcctggcttaaattcaattaagttttcattatagggtcactatgacatgaaaaggaaccagtatgaacacttttatacttattcccttctattttaaaaataacttgattatggatttgtattctggcattggtttttgaaccattgtgctttcattctttctagtctgtctaaaaatcactggagcgtttaagatggcagctgactaacataggcctttgaggtcttttggtcttctaaaggaagaaggccaaattttgggcccagtttcttaaggatgttttcaaaatgtacagtggctaaaatcttgtaagcagtaattttgtgtttatgatggctgtctccaagtttgggggaaaataatggcaaaacaaaaaatcacatttgagtagttcttagagcaattcctagagatgtatttcttacctggcctttcctctctaccctgtatctttgcattatttaatacttggaaaaacccacatagcattaaaaacaaagtactactgaacaaagtgataaatacattttcttaaatctttcttttctaaccacaggaacatttaaacttacaatagaattcactgaagaatatccaaataaaccacctacagttagatttgtctctaagatgttccatccaaatgtctatgcagatggtagtatatgtctggacatacttcagaaccgttggagtccaacctatgatgtgtcttccattctaacatccatacagtctctgttggatgaacccaatcccaatagtccagcaaacagccaggctgctcagctgtaccaggagaacaaacgggaatatgaaaagcgtgtttctgcaatagtagaacaaagctggcgtgattgttgaccccgggtacagtttaaagaagctggccataagaaaaatatatattgatgtgtttgtcacctccctactcctgtcattacatttactttattaaaagcaaaataactgttgtgctgtttccatcttccttgccaagttttcctaccccttctaccctctccttaaacatcagaaaacaccctctatgaaatcaaatgtactgtacctgggttacttgcaaaaattactaatgcttcagtttttctgttgtatttcatttccagttttcaggcagttatttttattattgtactttaagcttttaagatgaattgttatacaagaggtgcttatgcttagcttgatgaccaggatgttatttttaacaaaatgattgctgaagtgtttcatcctggctggtccttcacttgtgttggatttagaagtgaatgtgtttggaatatggcctacagagaatagaaacaaatccatgtaaacaattttgaaggaggcatgggagctaaaaatcctgtgatactaagatctcagtcatatgaattacaacgtagtatttactggcaagaaggagaaagttgaaggactcagctaaaggagtacagcaattgtagtaactgacacatcctctctttgcaagctgctgactgggcacactcatgccaagtttcagaattattggtcttctgggtttttgctttttaaaagaggtgtgggagcagaggaatggaaacaatcgtgagtttttgagctagggaaagttggagctcctttaatctttttaaaggatcagtgctgccctaagtgaataaactcaattgtccatctttattttagagttttaatgaattcaaggaagggagcatagcatatctgtggcaaactattttccactcaaatcctgagttattgctgcatgctttaatttcttccctttcagcatctgagaaccttaaagccaatgtctgcgatctttttttggatatttatacttttagatatatagtacctttaagtagcagtatgggacaaggcttgtaaatgttttgtctaatgttctattgtcaccttttatgcatttatcacttccaaatctaactttgcacaagtaacccatgtaaaaaaaaatgtacatttttcaaaagttgtaaataaaaataaccttaaaa

SEQ ID NO: 33596 - DNA, 2515 bp, Homo sapiens
  source 1..2515: mol_type = unassigned DNA
cgtccctctttctccaccccgccgagcctaaactagtgacggggagggagacgggatagtgtttctgtttcgtggtctttgaatccacaacctctagtctgaacacagagaacacaaatttgtctattacttcaggaagcccagggggaaccgcgccccgctgaagggctcggggaaggcgcgctcccgcgtcccgccccctcctcccccagcactcacactgtggtagcggcggagggcggagggatccggaggcggcggagggagacgtcattgcagggttgtttgtcagtctcggcggcggcggcggcggcggcggcggcggcgatccacagtgattcggccgccgcgccggggggtgggggggctgcgcgggactttttttttttcagactgaccgcggggcagctgcggagcatgtcgaccccggcccggaggaggctcatgcgggatttcaagcggttacaagaggacccacctgtgggtgtcagtggcgcaccatctgaaaacaacatcatgcagtggaatgcagttatatttggaccagaagggacaccttttgaagatggtacttttaaactagtaatagaattttctgaagaatatccaaataaaccaccaactgttaggtttttatccaaaatgtttcatccaaatgtgtatgctgatggtagcatatgtttagatatccttcagaatcgatggagtccaacatatgatgtatcttctatcttaacatcaattcagtctctgctggatgaaccgaatcctaacagtccagccaatagccaggcagcacagctttatcaggaaaacaaacgagaatatgagaaaagagtttcggccattgttgaacaaagctggaatgattcataatagacaactggtctgttaatctttttcatcattgttgtgtataatttacctctcattagaaaggctaacaaattttaagtgccacaggttttaaggattctgcagaaaaaaaagaaaaaagtccttcagtttagaacctacaaaagcttgtgtatcttgattaatgtactttttattgcatggtgtgaactaagttattgctgcataaatttgtaatatatcctgtttgtatttttttccaagtgtataatgttggtgtggagttttcatgacagaatatacacattttgtaaatctgtacttttttcaaatattgaatgccttatttttgaattctttagatttttaaattggagaaaagcacttaaagttttttatatatgaatattacatgtaaagctgttaaaatacataacttcagtgcaagagactttgtcacttatttccttatgtgtgtaggaggggttaataagtctctagctctccatctattgatagtttcatttacaatttcaaaagaacattcttatattttatcaaggaagtcttcaaatttgattctaaatagcgattataatctccaactttattttgaatgtacctctattagtttcaattgagtaattctagacataactggtttgactctgtccaactctgtatttaggccatttgttacagtttcttcatgcattacttactgttaaaactgtaccttttgcgatttcacagttggcacttctgccatgagcagagaactgatgcgacttgttttgctgcttggtagcactttaaaaaattttttgattaatgaagaaagtaaaaccataaacatttgccaaaaattcatgccccagtattagcaatgaattagttgcattggtttgagaaaggcacatattggagggaaatcttggtgtaacttaaatatttgaaaattacctttaatgcaatgcatatctgtttattctgggaaatgttttaatgccagggcctgctgagttgcttcttcttgtggagattttttttttaatctcctgagttgtataaaagttgtactgcatcttagtttactggataaatttaaaacacagtattgtagaaagctaatacaaaactatcctatgccttcaaatagtatagaaaatggaaaatatacaagtaaattctgttgaaccacctgtgtagtctctctagtagttaaaacagctattttagtaaccccaagagtttcttctcatatccataaaattggattacagtatggcaatatctacagcttctattcattatgcaacgtttaacattgattggataaatgcttataggctgggccaggtggctcccacctgtagtcccagcactttgggaggcaaaggcgggaggatcacttgaggccaggactttgagaccagccagggcaacataataagacttttctctactttaaattttttaaaaaattagttgggcatagtggcacttgcctgtagtctcagctacttaggaggctgaggtggcagaatagcttatgcctaggaggttgaggctgcagtgagctgtgattatgccattgcactccagcctgggtgacagagcaataccctgtctttaaaaataaaagctattacttggcaaa

SEQ ID NO: 33597 - DNA, 476 bp, Homo sapiens
  source 1..476: mol_type = unassigned DNA
gttctccgagttcctgtctctctgccaacgccgcccggatggcttcccaaaaccgcgacccagccgccactagcgtcgccgccgcccgtaaaggagctgagccgagcgggggcgccgcccggggtccggtgggcaaaaggctacagcaggagctgatgaccctcatgaacccaacattgatagtcccttgaacacacatgctgccgagctctggaaaaaccccacagcttttaagaagtacctgcaagaaacctactcaaagcaggtcaccagccaggagccctgacccaggctgcccagcctgtccttgtgtcgtctttttaatttttccttagatggtctgtcctttttgtgatttctgtataggactctttatcttgagctgtggtatttttgttttgtttttgtcttttaaattaagcctcggttgagcccttgtatattaaataaatgcatttttgtccttttttagacaa

SEQ ID NO: 33598 - DNA, 737 bp, Homo sapiens
  source 1..737: mol_type = unassigned DNA
cgcagtcctgcagttgcagtcgtgttctccgagttcctgtctctctgccaacgccgcccggatggcttcccaaaaccgcgacccagccgccactagcgtcgccgccgcccgtaaaggagctgagccgagcgggggcgccgcccggggtccggtgggcaaaaggctacagcaggagctgatgaccctcatgatgtctggcgataaagggatttctgccttccctgaatcagacaaccttttcaaatgggtagggaccatccatggagcagctggaacagcagtggggagcatcagaaccagctcaacagtttgtctactgtccggtcccagagaaactcaagattctagcaagccccttgtgtggggcttgggttgggacatgaggctgctgctggagcttactctgcaactgtttctccaaatgccagaacccaacattgatagtcccttgaacacacatgctgccgagctctggaaaaaccccacagcttttaagaagtacctgcaagaaacctactcaaagcaggtcaccagccaggagccctgacccaggctgcccagcctgtccttgtgtcgtctttttaatttttccttagatggtctgtcctttttgtgatttctgtataggactctttatcttgagctgtggtatttttgttttgtttttgtcttttaaattaagcctcggttgagcccttgtatattaaataaatgcatttttgtccttttttagacaa

SEQ ID NO: 33599 - DNA, 665 bp, Homo sapiens
  source 1..665: mol_type = unassigned DNA
tctctctgccaacgccgcccggatggcttcccaaaaccgcgacccagccgccactagcgtcgccgccgcccgtaaaggagctgagccgagcgggggcgccgcccggggtccggtgggcaaaaggctacagcaggagctgatgaccctcatggtatatgaagacctgaggtataagctctcgctagagttccccagtggctacccttacaatgcgcccacagtgaagttcctcacgccctgctatcaccccaacgtggacacccagggtaacatatgcctggacatcctgaaggaaaagtggtctgccctgtatgatgtcaggaccattctgctctccatccagagccttctaggagaacccaacattgatagtcccttgaacacacatgctgccgagctctggaaaaaccccacagcttttaagaagtacctgcaagaaacctactcaaagcaggtcaccagccaggagccctgacccaggctgcccagcctgtccttgtgtcgtctttttaatttttccttagatggtctgtcctttttgtgatttctgtataggactctttatcttgagctgtggtatttttgttttgtttttgtcttttaaattaagcctcggttgagcccttgtatattaaataaatgcatttttgtccttttttagacaa

SEQ ID NO: 33600 - DNA, 850 bp, Homo sapiens
  source 1..850: mol_type = unassigned DNA
gagccattgattggtcgacgcccccagagggttacaattcaaacgcgggcgggcgggcccgcagtcctgcagttgcagtcgtgttctccgagttcctgtctctctgccaacgccgcccggatggcttcccaaaaccgcgacccagccgccactagcgtcgccgccgcccgtaaaggagctgagccgagcgggggcgccgcccggggtccggtgggcaaaaggctacagcaggagctgatgaccctcatgatgtctggcgataaagggatttctgccttccctgaatcagacaaccttttcaaatgggtagggaccatccatggagcagctggaacagtatatgaagacctgaggtataagctctcgctagagttccccagtggctacccttacaatgcgcccacagtgaagttcctcacgccctgctatcaccccaacgtggacacccagggtaacatatgcctggacatcctgaaggaaaagtggtctgccctgtatgatgtcaggaccattctgctctccatccagagccttctaggagaacccaacattgatagtcccttgaacacacatgctgccgagctctggaaaaaccccacagcttttaagaagtacctgcaagaaacctactcaaagcaggtcaccagccaggagccctgacccaggctgcccagcctgtccttgtgtcgtctttttaatttttccttagatggtctgtcctttttgtgatttctgtataggactctttatcttgagctgtggtatttttgttttgtttttgtcttttaaattaagcctcggttgagcccttgtatattaaataaatgcatttttgtccttttttagacaa

SEQ ID NO: 33601 - DNA, 914 bp, Homo sapiens
  source 1..914: mol_type = unassigned DNA
ggtgagattcgagagatgggggacaggccaggagctcagaccgctctttgagactctcccgaaggagaatgggagggtaggggcgctgccagactccttccctggtgggcctagatgaagacgctcaaggaccctcgtgacttggccgagacaggggaagggagaagttgagtcgggcaaggaagagatgctaaagcctggggaattaagaacatgccagaatcatcccgagggagtctggaattagggagggtgaggactcgctaggatcgtcctgtggatctggctacagcaggagctgatgaccctcatgatgtctggcgataaagggatttctgccttccctgaatcagacaaccttttcaaatgggtagggaccatccatggagcagctggaacagtatatgaagacctgaggtataagctctcgctagagttccccagtggctacccttacaatgcgcccacagtgaagttcctcacgccctgctatcaccccaacgtggacacccagggtaacatatgcctggacatcctgaaggaaaagtggtctgccctgtatgatgtcaggaccattctgctctccatccagagccttctaggagaacccaacattgatagtcccttgaacacacatgctgccgagctctggaaaaaccccacagcttttaagaagtacctgcaagaaacctactcaaagcaggtcaccagccaggagccctgacccaggctgcccagcctgtccttgtgtcgtctttttaatttttccttagatggtctgtcctttttgtgatttctgtataggactctttatcttgagctgtggtatttttgttttgtttttgtcttttaaattaagcctcggttgagcccttgtatattaaataaatgcatttttgtccttttttagacaa

SEQ ID NO: 33602 - DNA, 1446 bp, Homo sapiens
  source 1..1446: mol_type = unassigned DNA
aaacgcgggcgggcgggcccgcagtcctgcagttgcagtcgtgttctccgagttcctgtctctctgccaacgccgcccggatggcttcccaaaaccgcgacccagccgccactagcgtcgccgccgcccgtaaaggagctgagccgagcgggggcgccgcccggggtccggtgggcaaaaggtgagtgatgcggcctaccactcgccgggcctgccatgccctaggcattggtacccagagcaaagatttctaggaccaccccccgccgccacctcctggagcgggagatctgcgggtgcaggagaacacaccaggagctcggggcctggcattcccctgggcatgggtgtcgagggcggagacttccgggactcccacctccttgcgcgggtgagattcgagagatgggggacaggccaggagctcagaccgctctttgagactctcccgaaggagaatgggagggtaggggcgctgccagactccttccctggtgggcctagatgaagacgctcaaggaccctcgtgacttggccgagacaggggaagggagaagttgagtcgggcaaggaagagatgctaaagcctggggaattaagaacatgccagaatcatcccgagggagtctggaattagggagggtgaggactcgctaggatcgtcctgtggatctggtgagtataccctgagctgagcctgaccttggtgatgtggggagcctccatgacggctccccctgagattcaggtgggagaagatgcaccgtctggaggcctggcccatccagactcccaggtaaccccgaatactcttttttcaggctacagcaggagctgatgaccctcatgatgtctggcgataaagggatttctgccttccctgaatcagacaaccttttcaaatgggtagggaccatccatggagcagctggaacagtatatgaagacctgaggtataagctctcgctagagttccccagtggctacccttacaatgcgcccacagtgaagttcctcacgccctgctatcaccccaacgtggacacccagggtaacatatgcctggacatcctgaaggaaaagtggtctgccctgtatgatgtcaggaccattctgctctccatccagagccttctaggagaacccaacattgatagtcccttgaacacacatgctgccgagctctggaaaaaccccacagcttttaagaagtacctgcaagaaacctactcaaagcaggtcaccagccaggagccctgacccaggctgcccagcctgtccttgtgtcgtctttttaatttttccttagatggtctgtcctttttgtgatttctgtataggactctttatcttgagctgtggtatttttgttttgtttttgtcttttaaattaagcctcggttgagcccttgtatattaaataaatgcatttttgtccttttttag

SEQ ID NO: 33603 - DNA, 155 bp, Homo sapiens
  source 1..155: mol_type = unassigned DNA
ggaacctccagcttggtccggtctgggactggaagcctgccatggcggcttctgcggcggagacgcgcgtgtttctggaggtgcggggacagctgcagagcgcgcttctgatcctgggagatagggtttcaccatattgcccatgctggtcttga

SEQ ID NO: 33604 - DNA, 1917 bp, Homo sapiens
  source 1..1917: mol_type = unassigned DNA
acaggcgcctgcgccgcagcggggctgccgctggttggtccgcacgtggaacctctcctggtcctgttgacccgggcccctcggaacctccagcttggtccggtctgggactggaagcctgccatggcggcttctgcggcggagacgcgcgtgtttctggaggtgcggggacagctgcagagcgcgcttctgatcctgggagaaccgaaagaaggaggtatgcccatgaatatttccataatgccatcttcactccagatgaaaacccctgaaggctgcacagaaatccagcttccagcagaggtcaggcttgtaccttcctcttgccgtgggctacagtttgttgttggagatggactgcacctgcgactgcagacgcaagcaaaattaggcacaaaactgatttcaatgtttaatcaaagctcgcaaacccaagaatgttgcacgttttattgccaatcctgcggtgaagtcataataaaagacaggaagctcctcagggtgctcccactgccgagtgagaactggggagctctagttggagaatggtgttgtcatcctgacccctttgctaataaatcacttcatccgcaagagaatgactgttttattggagactctttcttcttggtgaatttaagaaccagtttgtggcagcaaagacctgaactatccccagtggagatgtgctgtgtttcttctgacaaccattgtaaattggaaccaaaggcaaataccaaagtaatttgtaagcgttgcaaggtaatgttgggagagaccgtgtcatcagaaaccaccaagttttatatgacagagataattattcagtcatctgagaggagttttcctatcataccaaggtcttggtttgtccagagcgtgatcgcccagtgtctggtgcagctctcctctgctagaagcacttttagattcacgattcaaggtcaggatgacaaagtgtatatcttgctatggcttttaaattcagacagtttggtgattgaatctttgagaaattccaaatatatcaaaaaattccccttgttggaaaacacattcaaagccgattctagttctgcctggagtgctgtcaaggtcctctaccagccatgcatcaaaagcaggaatgaaaaacttgtcagcttgtgggaaagtgacatcagcgtccacccgctaaccctgccctctgcaacctgcttggagctgctgttgatattgtcaaagagtaatgccaatctgccttcatcccttcgccgtgtgaattcctttcaggtggcctttttgaagatgtaactattagagctgggcattctcctcccccggcagacagctctcaagcaggagcacaccgaggccagcagtcagctcaggaggcatcaattacaaagacaagaaccagagctatgggataagagcattgcattgaagttttaagtttacttgtttgcatgtattctctaagagaagagttaactttagatctttgaaaacccaggactgtgaagaaagtcatagtagcaggttgaggcaagtgtagaagttacatctctatttcccacagagaggaatattcacatatgtgcagtgtcagcaccacctggaaggttattacctaatggagatccatctgtcctgtgtggaatccagtgaggaattttattggtggaactgaatgttaactgctgtaaatcctaggaaataaacttttaaagagtttctcaggatgatttaaaacaaattttaaaaaagaaaagtagaaaacattttatactttattcagaggagatgctcaatagatgtttgttgaatgaatgattatcaaattaaaggatttcctatttatgcaaatctgcatgtttcttttgttatttcctttaccatacattattgcaaattaataaatatacctcactagca

SEQ ID NO: 33605 - DNA, 1549 bp, Homo sapiens
  source 1..1549: mol_type = unassigned DNA
aaacaaaagagtctcgccggcgtccccgcccgcacactcgcgcacactcgcgctcgggcgcacacggagcagggaccggcgcccggagcgagccagggagcggctaaccggggacccaccgcgcggagccagcctagctgccagcgagcccaacccgcgacgacccacgcccctgagccccgcagccgacccctgccggccggtgtccccaccgccatccctgacccatggcgctgaagaggattcagaaagaattgagtgatctacagcgcgatccacctgctcactgttcagctggacctgtgggagatgacttgttccactggcaagccactattatggggcctcctgatagcgcatatcaaggtggagtcttctttctcactgtacattttccgacagattatccttttaaaccaccaaagattgctttcacaacaaaaatttaccatccaaacataaacagtaatggaagtatttgtctcgatattctgaggtcacaatggtcaccagctctgactgtatcaaaagttttattgtccatatgttctctactttgtgatcctaatccagatgaccccttagtaccagatattgcacaaatctataaatcagacaaagaaaaatacaacagacatgcaagagaatggactcagaaatatgcaatgtaaaaatcaaaaacattttcatatataccagagtactgtaaaatctaggtttttttcaacattagcagtaaattgagcactgtttactgtttcattgtaccatgaaaccatttgatttttacccattttaaatgtgtttctgaagcaagacaaaacaaacttccaaaaatacccttaagactgtgatgagagcatttatcattttgtatgcattgagaaagacatttattatggtttttaagatacttggacatctgcatcttcagcttacaagatctacaatgcagctgaaaagcaaccaaattattttttgctgaaactagatgtttttacatgagaaatactgtatgtgttgtctaagatgtcagttttataaatctgtattcagatttcattctttgttagctcactttataatttgtatttttttactgtatagactaaatatattctatttacatgtatgtcaactcattacttttttcctgtgaacagtattgaaaaaccccaacggctgataattaagtgaattaactgtgtctcccttgtcttaggatattctgtagattgattgcagatttcttaaatctgaaatgatctttacactgtaattctcagcatactgattatggagaaacacttgttttgattttgttatacttgacttaactttattgcaatgtgaattaattgcactgctaagtaggaagatgtgtaacttttatttgttgctattcacatttgaattttttcctgtataggcaatattatattgacaccttttacagatcttactgtagctttttccatataaataaaatgctttttctactatttgtcttgattacttaaaaaaataaaaatataagtaaggatcaaaa

SEQ ID NO: 33606 - DNA, 2748 bp, Homo sapiens
  source 1..2748: mol_type = unassigned DNA
gacaggcgtggtcgggtgcgtggtgcgtgggtccggctttcggtgactagacggtccgcaggggacatcccgtccctggggcctccccagtctccctccccctcgcgcctgggcagctctctcccagggcttcggctcgagcctgcgacctgcacggacacccccccctcaggatctaaaatgtccactgaggcacaaagagttgatgacagtccaagcactagtggaggaagttccgatggagatcaacgtgaaagtgttcagcaagaaccagaaagagaacaagttcagcccaagaaaaaggagggaaaaatatccagcaaaaccgctgctaaattgtcaactagtgctaaaagaattcagaaggaacttgcagaaatcacattggaccctcctcccaactgtagtgctggacccaaaggagacaacatttatgaatggaggtcaactatattgggacccccaggatctgtctatgaaggaggggtgttctttcttgacattaccttttcaccagactatccgtttaaaccccctaaggttaccttccgaacaagaatctatcactgtaatattaacagccaaggtgtgatctgtctggacatcttaaaggacaactggagtccggctttaactatttctaaagttctcctctccatctgctcacttcttacagattgcaaccctgctgaccctctggtgggcagcatcgccacacagtacatgaccaacagagcagagcatgaccggatggccagacagtggaccaagcggtacgccacataggggcctgctgcctgccgccccgcgggacctgtgcaagcacattcaccaagtgcatcggtagccctgcccacccctccagacctcggttcttattttcctatttttattaaatttggaaccattttgtgatggtatgttgtccatcttcccatcccagttcttcctgccccccttcctctctcccacgctctcttttatctctcattttattcccttgttgatttctgttaacttgaaagatttgggattttttcccacctcatcatagatgggaacttttgttttcagtgcaaacaatgttggagctgtaatagtaagagctttcttacaaagctttgtattactgtgtggttttgttttttttgttgttgtttatttgattttgatttttttttcttttatgtgatctttgggaaaacacattcagaattatatctcgtttctacttaaatgtagtgcttagggttaattttttgtactgaagtctttattggtgggtgcatgctactgggaacaagtttttgtacaaaagcttcaatcagaatcactgtgcattactgagactctgtttatcactagccttctgtccctcccgcagaagactgttggattgaacaaaataatatgtattttgatttacttaaagtgcttgtaaatttcttagggacctgccacttttgactgtggatcagttgatgtacacttgtattattaaagcactcaataaatcactgtggctgataactgcacttctggtaacccgacatttgctttgtgtcctggtgaccgctgtagccctacgtgcagtgaggcttgtctaattcaattacaggttcaagtgtatttttcatctcaaacctctaatatttctttggagttgagttgcttagcatgtggaatttctccagctgtcagtagcctgatgattttatggttgttatagtaaattgctatcattttacatattgactgggcattctttctgttacagccttctttatcaacaattaaaatatgtaactccaaaaatagccttcttgtgaaagtgaagtctgagctaatcattgtgttcagccactttcaactttatttctctcaaaattgttacagtgattgccctcaagctttgtattgttcatttttgttgttgttgttgttgttgttgctgctcttttttctccatgattttagcaaaagaagtaaactcaactgtattggtcacggtcagcccattcaatgacaagggtgtctgtctggcttcaccttcaggctattttagtgtgcagctataggaggcagaggaaacgtgggtggtgtagtttctaaaacacgctgacttgctgattgataattcagggttattagtgtaacaaagcgtagtggaaactcctactcctgctgcaccatacagttacagaccctaccatactcttggtctcatttaaggaaccattaacaccttcactgctgaaaagcaggatttataagcataagtcatccacctctaaatattttaacatttaaaatgcctgattcaaaagatacagtttttgttgtttttaactagttaaaaataaatcctaagaaaatatatttaaatattgcaaatgccacttctaaaccaaaatacctgagaatattttttgtctttttaataacgattttaccattcattttatttaaaaacatttctcagcatagcagggcactgtatggtctctgatgcactactcaaccctctagttgtagtagagggagccacagacagtacataaatgcattgggcagagctatattccagtgaaactttatttaccaccataggcatgggatttggcccatgggttgtagtttgccaatccctgacacagaccaacatagactgggggctggatgaaaaacaaataacgatgtgtcatttctttctttaacataaaataaattcaatatggtacaacactg

SEQ ID NO: 33607 - DNA, 1248 bp, Homo sapiens
  source 1..1248: mol_type = unassigned DNA
gaggagggaggcgcgcggcgccgcatggccgacgtggggctcgcgctctcgcggtctctcccgggcgggcgcgcaggcacgcgcactcgcgggtgcgcgcgcggacggccgggcggcggcggctcccggaggtggtggcttcactttccaggactcaggggcagccacagcgacagccgcgggcagcagcctcaggagccggagctggaacggccgggggcggcggcagcggcggcgctgagggatctaaaatgtccactgaggcacaaagagttgatgacagtccaagcactagtggaggaagttccgatggagatcaacgtgaaagtgttcagcaagaaccagaaagagaacaagttcagcccaagaaaaaggagggaaaaatatccagcaaaaccgctgctaaattgtcaactagtgctaaaagaattcagaaggaacttgcagaaatcacattggaccctcctcccaactgtagtgctggacccaaaggagacaacatttatgaatggaggtcaactatattgggacccccaggatctgtctatgaaggaggggtgttctttcttgacattaccttttcaccagactatccgtttaaaccccctaaggttaccttccgaacaagaatctatcactgtaatattaacagccaaggtgtgatctgtctggacatcttaaaggacaactggagtccggctttaactatttctaaagttctcctctccatctgctcacttcttacagattgcaaccctgctgaccctctggtgggcagcatcgccacacagtacatgaccaacagagcagagcatgaccggatggccagacagtggaccaagcggtacgccacataggggcctgctgcctgccgccccgcgggacctgtgcaagcacattcaccaagtgcatcggtagccctgcccacccctccagacctcggttcttattttcctatttttattaaatttggaaccattttgtgatggtatgttgtccatcttcccatcccagttcttcctgccccccttcctctctcccacgctctcttttatctctcattttattcccttgttgatttctgttaacttgaaagatttgggattttttcccacctcatcatagatgggaacttttgttttcagtgcaaacaatgttggagctgtaatagtaagagctttcttacaaagctttgtattactgtgtggttttgttttttttgttgttgtttatttgattttgattttt

SEQ ID NO: 33608 - DNA, 1377 bp, Homo sapiens
  source 1..1377: mol_type = unassigned DNA
gcaggggccagcccgccgggtccccgccgcgctctttgtcctggccgcgcgcgggcggacgcgtgcacccccagggtgaggggaggtgtggagagcgcgcacgggagcgcgcgggaacagctcgcgcccgccgggcgtcggcggcgcgcgcccctccgccaggcaagcagcgagcacgcgcgtcgccgccgagttttccaagagataacttcaccaagatgtccagtgataggcaaaggtccgatgatgagagccccagcaccagcagtggcagttcagatgcggaccagcgagacccagccgctccagagcctgaagaacaagaggaaagaaaaccttctgccacccagcagaagaaaaacaccaaactctctagcaaaaccactgctaagttatccactagtgctaaaagaattcagaaggagctagctgaaataacccttgatcctcctcctaattgcagtgctgggcctaaaggagataacatttatgaatggagatcaactatacttggtccaccgggttctgtatatgaaggtggtgtgttttttctggatatcacattttcatcagattatccatttaagccaccaaaggttactttccgcaccagaatctatcactgcaacatcaacagtcagggagtcatctgtctggacatccttaaagacaactggagtcccgctttgactatttcaaaggttttgctgtctatttgttcccttttgacagactgcaaccctgcggatcctctggttggaagcatagccactcagtatttgaccaacagagcagaacacgacaggatagccagacagtggaccaagagatacgcaacataattcacataatttgtatgcagtgtgaaggagcagaaggcatcttctcactgtgctgcaaatctttatagcctttacaatacggacttctgtgtatatgttatactgattctactctgcttttatcctttggagcctgggagactccccaaaaaggtaaatgctatcaagagtagaactttgtagctgtagattagttatgtttaaaacgcctacttgcaagtcttgcttctttgggatatcaaaatgtattttgtgatgtactaaggatactggtcctgaagtctaccaaatattatagtgcattttagcctaattcattatctgtatgaagttataaaagtagctgtagatggctaggaattatgtcatttgtattaaacccagatctatttctgagtatgtggttcatgctgttgtgaaaaatgttttaccttttacctttgtcagtttgtaatgagaggatttccttttaccctttgtagctcagagagcacctgatgtatcatctcaaacacaataaacatgctcctgaagg

SEQ ID NO: 33609 - DNA, 1556 bp, Homo sapiens
  source 1..1556: mol_type = unassigned DNA
tcacttggcgcccggcgcggcgagcgctacccgcggcccccgcgcggccctccccacaaagggccgcggagctgcgtggccgccgccgccggccgtggctcgcctccgcgggcgcggaaatttgttgcacttcttggggctttgtttatttgtttgttttttctctgggtttcttatttttttcgttattttggacaaaatgtcggtccgtgatataaaaattgagcgaggaaccttggtggcattgggagctttgcagaaggtgcagtttgaattctgcttttcccagggtggcagctcggtcttggccggatgaatcttcgctgctggccgtggaaacagctagagcagctcttttccaagagataacttcaccaagatgtccagtgataggcaaaggtccgatgatgagagccccagcaccagcagtggcagttcagatgcggaccagcgagacccagccgctccagagcctgaagaacaagaggaaagaaaaccttctgccacccagcagaagaaaaacaccaaactctctagcaaaaccactgctaagttatccactagtgctaaaagaattcagaaggagctagctgaaataacccttgatcctcctcctaattgcagtgctgggcctaaaggagataacatttatgaatggagatcaactatacttggtccaccgggttctgtatatgaaggtggtgtgttttttctggatatcacattttcatcagattatccatttaagccaccaaaggttactttccgcaccagaatctatcactgcaacatcaacagtcagggagtcatctgtctggacatccttaaagacaactggagtcccgctttgactatttcaaaggttttgctgtctatttgttcccttttgacagactgcaaccctgcggatcctctggttggaagcatagccactcagtatttgaccaacagagcagaacacgacaggatagccagacagtggaccaagagatacgcaacataattcacataatttgtatgcagtgtgaaggagcagaaggcatcttctcactgtgctgcaaatctttatagcctttacaatacggacttctgtgtatatgttatactgattctactctgcttttatcctttggagcctgggagactccccaaaaaggtaaatgctatcaagagtagaactttgtagctgtagattagttatgtttaaaacgcctacttgcaagtcttgcttctttgggatatcaaaatgtattttgtgatgtactaaggatactggtcctgaagtctaccaaatattatagtgcattttagcctaattcattatctgtatgaagttataaaagtagctgtagatggctaggaattatgtcatttgtattaaacccagatctatttctgagtatgtggttcatgctgttgtgaaaaatgttttaccttttacctttgtcagtttgtaatgagaggatttccttttaccctttgtagctcagagagcacctgatgtatcatctcaaacacaataaacatgctcctgaaggcatagtttcctgtcgtaa

SEQ ID NO: 33610 - DNA, 1570 bp, Homo sapiens
  source 1..1570: mol_type = unassigned DNA
gaacttgctgactgcgcggccgggaggagccgagccgggcggcggcggcgggaggctacagcgcgcgggggtctcccgcgtcccctccgcctcgccgggagctcgcgccctcgcccagccgagctcccacccccgcttttttccgaaggcgctgggcggcgccaccctccggccggagcccggcactgcacaaccccctccgactttcaatgttccacactccccggccagagcctcctcggcttctttttttccctccccccccttcccccccccacagctgcctccatttccttaaggaagggtttttttctctctccctcccccacaccgtagcggcgcgcgagcgggccgggcgggcggccgagttttccaagagataacttcaccaagatgtccagtgataggcaaaggtccgatgatgagagccccagcaccagcagtggcagttcagatgcggaccagcgagacccagccgctccagagcctgaagaacaagaggaaagaaaaccttctgccacccagcagaagaaaaacaccaaactctctagcaaaaccactgctaagttatccactagtgctaaaagaattcagaaggagctagctgaaataacccttgatcctcctcctaattgcagtgctgggcctaaaggagataacatttatgaatggagatcaactatacttggtccaccgggttctgtatatgaaggtggtgtgttttttctggatatcacattttcatcagattatccatttaagccaccaaaggttactttccgcaccagaatctatcactgcaacatcaacagtcagggagtcatctgtctggacatccttaaagacaactggagtcccgctttgactatttcaaaggttttgctgtctatttgttcccttttgacagactgcaaccctgcggatcctctggttggaagcatagccactcagtatttgaccaacagagcagaacacgacaggatagccagacagtggaccaagagatacgcaacataattcacataatttgtatgcagtgtgaaggagcagaaggcatcttctcactgtgctgcaaatctttatagcctttacaatacggacttctgtgtatatgttatactgattctactctgcttttatcctttggagcctgggagactccccaaaaaggtaaatgctatcaagagtagaactttgtagctgtagattagttatgtttaaaacgcctacttgcaagtcttgcttctttgggatatcaaaatgtattttgtgatgtactaaggatactggtcctgaagtctaccaaatattatagtgcattttagcctaattcattatctgtatgaagttataaaagtagctgtagatggctaggaattatgtcatttgtattaaacccagatctatttctgagtatgtggttcatgctgttgtgaaaaatgttttaccttttacctttgtcagtttgtaatgagaggatttccttttaccctttgtagctcagagagcacctgatgtatcatctcaaacacaataaacatgctcctgaaggcatagtttcctgtcgtaa

SEQ ID NO: 33611 - DNA, 909 bp, Homo sapiens
  source 1..909: mol_type = unassigned DNA
cggccaagggcggcaggggccagcccgccgggtccccgccgcgctctttgtcctggccgcgcgcgggcggacgcgtgcacccccaggcggcgcgcgagcgggccgggcgggcggccgagttttccaagagataacttcaccaagatgtccagtgataggcaaaggtccgatgatgagagccccagcaccagcagtggcagttcagatgcggaccagcgagacccagccgctccagagcctgaagaacaagaggaaagaaaaccttctgccacccagcagaagaaaaacaccaaactctctagcaaaaccactgctaagttatccactagtgctaaaagaattcagaaggagctagctgaaataacccttgatcctcctcctaattgcagtgctgggcctaaaggagataacatttatgaatggagatcaactatacttggtccaccgggttctgtatatgaaggtggtgtgttttttctggatatcacattttcatcagattatccatttaagccaccaaaggttactttccgcaccagaatctatcactgcaacatcaacagtcagggagtcatctgtctggacatccttaaagacaactggagtcccgctttgactatttcaaaggttttgctgtctatttgttcccttttgacagactgcaaccctgcggatcctctggttggaagcatagccactcagtatttgaccaacagagcagaacacgacaggatagccagacagtggaccaagagatacgcaacataattcacataatttgtatgcagtgtgaaggagcagaaggcatcttctcactgtgctgcaaatctttatagcctttacaatacggacttctgtgtatatgttatactgattctactctgcttttatcctttggagcctgggaga

SEQ ID NO: 33612 - DNA, 752 bp, Homo sapiens
  source 1..752: mol_type = unassigned DNA
ccaagggcggcaggggccagcccgccgggtccccgccgcgctctttgtcctggccgcgcgcgggcggacgcgtgcacccccagggtgaggggaggtgtggagagcgcgcacgggagcgcgcgggaacagctcgcgcccgccgggcgtcggcggcgcgcgcccctccgccagcggcgcgcgagcgggccgggcgggcggccgagttttccaagagataacttcaccaagatgtccagtgataggcaaaggtccgatgatgagagccccagcaccagcagtggcagttcagatgcggaccagcgagacccagccgctccagagcctgaagaacaagaggaaagaaaaccttctgccacccagcagaagaaaaacaccaaactctctagcaaaaccactgctaagttatccactagtgctaaaagaattcagaaggagctagctgaaataacccttgatcctcctcctaattgcagtgctgggcctaaaggagataacatttatgaatggagatcaactatacttggtccaccgggttctgtatatgaaggtggtgtgttttttctggatatcacattttcatcagattatccatttaagccaccaaaggttactttccgcaccagaatctatcactgcaacatcaacagtcagggagtcatctgtctggacatccttaaagacaactggagtcccgctttgactatttcaaaggttttgctgtctatttgttcccttttgacagactgcaaccc

SEQ ID NO: 33613 - DNA, 766 bp, Homo sapiens
  source 1..766: mol_type = unassigned DNA
gccagcccgccgggtccccgccgcgctctttgtcctggccgcgcgcgggcggacgcgtgcacccccagggtgaggggaggtgtggagagcgcgcacgggagcgcgcgggaacagctcgcgcccgccgggcgtcggcggcgcgcgcccctccgccagttttccaagagataacttcaccaagatgtccagtgataggcaaaggtccgatgatgagagccccagcaccagcagtggcagttcagatgcggaccagcgagacccagccgctccagagcctgaagaacaagaggaaagaaaaccttctgccacccagcagaagaaaaacaccaaactctctagcaaaaccactgctaagttatccactagtgctaaaagaattcagaaggagctagctgaaataacccttgatcctcctcctaattgcagtgctgggcctaaaggagataacatttatgaatggagatcaactatacttggtccaccgggttctgtatatgaaggtggtgtgttttttctggatatcacattttcatcagattatccatttaagccaccaaaggttactttccgcaccagaatctatcactgcaacatcaacagtcagggagtcatctgtctggacatccttaaagacaactggagtcccgctttgactatttcaaaggttttgctgtctatttgttcccttttgacagactgcaaccctgcggatcctctggttggaagcatagccactcagtatttgaccaacagagcagaacacgac

SEQ ID NO: 33614 - DNA, 654 bp, Homo sapiens
  source 1..654: mol_type = unassigned DNA
caatatgaagagctacggccaagttcatgcagtcacaggcaatgacaactatatcaccaatgctgcctggctgagagtgatttaagacatcattgattggaagttttccaagagataacttcaccaagatgtccagtgataggcaaaggtccgatgatgagagccccagcaccagcagtggcagttcagatgcggaccagcgagacccagccgctccagagcctgaagaacaagaggaaagaaaaccttctgccacccagcagaagaaaaacaccaaactctctagcaaaaccactgctaagttatccactagtgctaaaagaattcagaaggagctagctgaaataacccttgatcctcctcctaattgcagtgctgggcctaaaggagataacatttatgaatggagatcaactatacttggtccaccgggttctgtatatgaaggtggtgtgttttttctggatatcacattttcatcagattatccatttaagccaccaaaggttactttccgcaccagaatctatcactgcaacatcaacagtcagggagtcatctgtctggacatccttaaagacaactggagtcccgctttgactatttcaaaggttttgctgtctatttgttcccttttgacagactgcaaccctg

SEQ ID NO: 33615 - DNA, 721 bp, Homo sapiens
  source 1..721: mol_type = unassigned DNA
tcgctcggcgcagctgttgcggggccatggcggggaccgcgctcaagaggctgatggccgagtacaaacccttgagaacgtgcagtgagagcttgaggaagaaggcctgacttgctgctgcggaattaggagggaaaagtgtatgcgttaaaaggggaaaggctcgttggtggagctttgaaagaattaacactgaatcctccggaaggaattgtagcaggccccatgaatgaagagaacttttttgaatgggaggcattgatcatgggcccagaagacacctgctttgagtttggtgtttttcctgccatcctgagtttcccacttgattacccgttaagtcccccaaagatgagatttacctgtgagatgtttcatcccaacatctaccctgatgggagagtctgcatttccatcctccacgcgccaggcgatgaccccatgggctacgagagcagcgcggagcggtggagtcctgtgcagagtgtggagaagatcctgctgtcggtggtgagcatgctggcagagcccaatgacgaaagtggagctaacgtggatgcgtccaaaatgtggcgcgatgaccgggagcagttctataagattgccaagcagatcgtccagaagtctctgggactgtgagacctggcctcgcacaggcgcgcacacaccgccaagcagctcagcattctcccccggcacacttagtgacagtgatgctctg

SEQ ID NO: 33616 - DNA, 3106 bp, Homo sapiens
  source 1..3106: mol_type = unassigned DNA
acaagaccaggaccctgaggcctctggaagtgccgggaccgaaccaaccccgcagagcgactaaggcgagggcaggagccaagagaatcgtagccgcggtcgcgggttgagctcccaccacccggacagcgcgcctcggcgatcgcgcacgcgccacgccccggaagagttcctgggcccgcgacggtggcccggaagcagtccccggtgtcggggcaggaggcacgcgcgcggctgaggcgaggtcgctcggcgcagctgttgcggggccatggcggggaccgcgctcaagaggctgatggccgagtacaaacaattaacactgaatcctccggaaggaattgtagcaggccccatgaatgaagagaacttttttgaatgggaggcattgatcatgggcccagaagacacctgctttgagtttggtgtttttcctgccatcctgagtttcccacttgattacccgttaagtcccccaaagatgagatttacctgtgagatgtttcatcccaacatctaccctgatgggagagtctgcatttccatcctccacgcgccaggcgatgaccccatgggctacgagagcagcgcggagcggtggagtcctgtgcagagtgtggagaagatcctgctgtcggtggtgagcatgctggcagagcccaatgacgaaagtggagctaacgtggatgcgtccaaaatgtggcgcgatgaccgggagcagttctataagattgccaagcagatcgtccagaagtctctgggactgtgagacctggcctcgcacaggcgcgcacacaccgccaagcagctcagcattctcccccggcacacttagtgacagtgatgctctgtgctggtaccaaacaaggcagacttgcaagaaccatggcatcttttttttttttcaaacctttcctacttcaaacaggcttctcttctgaaatgatgacttaatgtcgaatattgacagcttactgcagttttacagtattcctcacaaagggcttcaggtagattatcagagctgtcagcactacctctccccgctgaaaccagcagttcatggcttcctgtggattccctccctccctggagtgttgagggggttgtacctgccagacttccaggggacgatggaatacccagaacgctccttctgaagaaatggggccctgtagctgcagcacaggggaagggcccggcaccctttctgggtccttcctggttccctgtgggccccatgaggagtccattacttcctttcttccttcatattttacaggcagatgcttttcttataatctaattacatcttttcatttgttatatattacaaaccatcacacttagaaatacttccaggaaatgcttttttgaagtgtgaattaataagaaatggggtaaatagaaaagaaatttattgctgattggccaggtgcggtggttcgtgcctgtaatcccagctctttgggaggccaaggcaggtagatcacaaggtcaggaaattgagaccatcctggctaatacagtgaaaccccatgtctgctaaaattacaaaaaattagctgggcgtggtggtgcacgcctgtagtctcagctactcaggaggctgaggcaggagaatcgcttgaacccgggaggcagaggtagcagtgagctgaagtcccgccactgcactccagcctgggcaacagagcgagactcagtctcaaaaagaaaaaagaaatttattgctgatcacaaggacagacagttttttcccgaccatactcatcaaagatttacgtttgtatattagtaactagtgcattactagagcaggtgcaggtgaggtctttaaagtttcaatgaaagtttcttctggatctacagaaaaaatttttttttttcaatctaaaaactggaaattctagggtttttgtacattttggatgcactgggaatttattagcacaaaatcattctttgcaactcaaaattcagaagggactctaccatatcttagctcagagcacagaggagtgccttatccccacacttgactgggctgtggaggtgggcatgtgggcccctgggcccaggctggggacagagcccttgttttgtgacttaggattttgatgtggttcccatgttctctaacagggccagctgagcagcacaggccaggaggccacagtgtaagcaataacagatctgccacatgcagaagcaaatatcaggcctgtcgcacacgggcggcatttaaataggaatttctatttttgaaataagggatggtctatgaggcatacagtagatttgatgtgatccttttctccctcccttccataatggatcgtggtctgtgtgactgaacccacacagagtgtcatgggtgacagtttctggttgaagtagctccacgcctggcttctgtggacagcagattcttttccttctcacaaggggctcatttaaaatttggaggctgggtgctgtggctcacgcctgcaatcccagcactttgggagactgaggcgggcggatcatgaggtcaggagatcgcgaccatcctggctaacagtgaaaccctgtctccactaaaaatacaaaaaattagccgggcgtggtggcgggcgcctgtagtcccagctactctgaagactgaggcaggagaatggcgtgaacccaggaggcggagcttgcagtgagctgagatcacgccactgcactccagcctgggcaacagagtgagactctgtctcaaaaaaaaaaaaaaaaaaaatggaacgcagggcaagaactcgtatttggaaggagatgggggaaaggagcggtattatacctatgttgtatttgcaggcaaatgagatggagccctctctgtaaagaagagtcatttgtgcaagtagacggggtctgtgggtgcaggccctggaggggcacacaattgcctggaggcttctgtgagatcgggagagggaggagaggcagtctcttgacaaaataaagtatttttattcatttgtatttattaaatgaaaaaacaatcccatggtgtccctgttgtgtggtggaacctaatgactgttgaaataaagttctgtgttttccctgccctgca

SEQ ID NO: 33617 - DNA, 5151 bp, Homo sapiens
  source 1..5151: mol_type = unassigned DNA
ggggtagggaggccgactgagcaggagtcgtccgcttatagtggaggctgctaggagccggtcagagggtgagtggggagcaggcgagcgagccacagcaggcaggagggagcgtcgcgcggcgcagaggagcgccggggcagggccgcggcggaaccacagccggagaggggcagcccgagccgggcgccgcagggtccccacccccacccggccggacagtgcccggtgttcccccgtgcggggggcggcggcggcggctgacgggaccgccgggaccgcgggggtgttgccacctccaccgaggagccggcgcggccgcgggctcctcagagccggggccccgggcccgtgacagacgggccgaggaagggagagaggcggcggcgacaccatgtcatctcccagtccgggcaagaggcggatggacacggacgtggtcaagctcatcgagagtaaacatgaggttacgatcctgggaggacttaatgaatttgtagtgaagttttatggaccacaaggaacaccatatgaaggcggagtatggaaagttagagtggacctacctgataaataccctttcaaatctccatctataggattcatgaataaaattttccatcccaacattgatgaagcgtcaggaactgtgtgtctagatgtaattaatcaaacttggacagctctctatgatcttaccaatatatttgagtccttcctgcctcagttattggcctatcctaaccccatagatcctctcaatggtgacgctgcagccatgtacctccaccgaccagaagaatacaagcagaaaattaaagagtacatccagaaatacgccacggaggaggcgctgaaagaacaggaagagggtaccggggacagctcatcggagagctctatgtctgacttttccgaagatgaggcccaggatatggagttgtagtagaaaaagcacctgcttttcagaaagactattatttcctaaccatgagaagcagactataatattcatatttaaacaaagcaattttttttattactaaacaaggtttttatgaataatagcattgatatatatatattatatatcaccctttagatcttgatttcttggtcatttctcaacctgaggtgcatagcatattcccacattccatttggtagcaatatgcggtctgaatgcatgcattcatgagtccatgtggccaagtcagcctgtgtgctactgaactgtcgaaggaaatagccgctctgataggtagatgtgagtaaaaagaacaggaaaaaattgcttcttttattggtttccaaagaaacaaaccaaaccaaccagctcttggatgtgaagataaaatagtgcttttttgaaatggagaggaaaaacttggggaggaagaggcctgctgtgggggcatcggagccagccatgtaagaatcagagctgctccttcctgtgaatcctaggtggccctatgtcttctgtggagttacagtataaagcagggagctaattaagagtattaaaacttaaaaccattttttgactctgattttaagtacatttttatatgtcagttgctgcccttcacactaccaggccctgcagccacagtgttctgttggagaaacttggggaagtgttttctgaaccagttctttttcttggggtagagcgtgaaatccagacctgtttttgaaaggacagcacaggaggagaaaagtgactgggacgatgcttcctctcatccaaaacacatgcagagtcacatcctcatcctagtgtttggcagtttgagaccgctaccctgaacttaagagctttaaatatgagggttgtgtttctgggggggttatttttttggtgtgtgtgtgtgtgtattgtgcttagaaaggttgcagatttcatcttcacctaccaagaggcggccgcctccttggacaagccgctcatggaccattagacttgagaagacgacccacgtggtgactgcaaagccctgggtacttgccttcatgttctggtttggttttccctttttctgctgctcttggcagcagcctggtcatcatctgcttgtgggagtgggaaatgggtattttagacccaacacaggttctaaatttaaaacaaataataattggaacaaataaaggttcttgtacccagagtgattctacatgggaaaaacaaaccagcttttttcagagagtgaccgaataggaagaagggattcagaaatatgatgtagtagaacatgccctgcaggaagaaaatgttttctctcctgcgtatgttaagaggaaatcagtttaaaatgcctgctaatcaaatgtcgactcagctaaccatatgtccaggttgctgcagagtttctttcaaatctgagtgttgcctgctgaactcggaggggagtttggagaaattttagacagcagctctgtgttctttttttgccgcagccaataagataatagcagaattagccaatcctaaaaccttctaaagacgatttttgagcatcccactgggattatttaatttttctttttgacgtgtgtttttagtttagaagtgctgtattccacaaggtttaagtcagtgaggttggaagataccctatcttttttattcaaaaagcacaatcaatcttttgtttgaaaatctatataaagtacaacttgcttttagcatgattattttcctaaataaaaagacaaagaatttacttactttatgttaattacgggcatgaagcaaaaggttttctttaaaaaaaaaaaaaagtgcagtgatgtagggctgtggttagttaaccgtactgagttatccatctagcatctgtggcttgctggaagggtagtattaactatttaacatgtaatggtgtacttcactcttacctagcacgctgtcttctcattgctttgggggagggagggtctctctgctggcactgtctaacttgcttacctgctgactttgcagtttgcttgtgctatgacatttattgtaggtgctatttagggtaggcttaaagtgctgggtggtgatttgagttcaaacaataaaaaattgtattttttcaatattgtataaacaatagtgttctaattaccttaaaaaaaaataatgaccagttaagaattgcttttgatcttgtcaaaaaactgaatagaccccagtttcgggaaggtgtgtgagcagtgccatgactctgccccttacctaatcccacatctctctaatgataagacattggctcgcctctgaccagagccccagcaccagagagcggaagatgcagaattgtcaaatgacctgctgggggaggttgtaggagtttagcagatttgagtgtggctgcagagagagagagtgtgtgtatgtgtgcacatgtgtgagagtgtgagcgagagtgtgtgtgtgtccatctaagtgtgtgtgatgaaggtgggataaggctcctctgttagtgctggaagctcctgtaattgccgcatggatcccactgtgccctcttgttctgtgcaagtctgtcctgtctgggcactaaccttggtcccatgcatgtttatgttctgggtggggctttgcctctccactgggaaactgacttttgctgggttgaacagagtcccttatgctttttgtcctctccctgcgcctgggagaggtgggagtaggagcccaaacacacaggtacagaaagatctggaagaaggcctggcagtgaatccaaggactctgggcccccaacaatagatggtagcgtaagtctggagcagcggtgtttcaccaccaaatgcctttccaggctgcccttccaacactcaggagagcatccagatccctgggcagaggctctacattcttggctttagaggtggtggcagcggcagcaggtcagagccacttctggcggtttccctcccctttttagtgcccatagtttttggatcctcccttgagttttaccagcacaagccattctttgcccctgttcacataactgagctcaagctcttgccaaacaccaacaagcaagatggttgcaacctggcaacattgaatccaccacccttgggctccctctggaagccccagcaccggggggcttttgggcacagggtcagtggtagccatcttagacactgacatttggctttgtcgtcaatttcatcaccctccttgaggttactgtgcagtttcaaccagcattttatcctagtgaggtcattatcaggagttgccatatcatctctccagtacctaacatttctcatccacttcaaaagctgttctgactgccagctggctgatctaagctcctgaggaatgtctcctctcaaaggaatttttccctccaaaggccccctgaagtcctagttggcattggcctggcacatgctttatgttaggcctcccgttgggatggctgagaatcatgaaagacagatcctccgctagcctctgtgggtcaagtttctggacaccaagtctctgggaactagtgtttgattttaaatggcatgtggcccttccttgtttcagtgacttagaaaagtaaaagccatttaaaaaagttagcaagattttttatcgacttcccaactgggcttccagccttgttgaatgaaatcatctatctctgattgggcgcaacgaactgcatttctttggacttctgaatccatgtttgtgctttctctggcccgtgaacacctcggcgattctgttagggatgggatgagtgggaggaagccctttgagaagggggagccggccctgtcatgcgcaggttttccactcatctgaggaagagccagggctctgaatttagcctaacactcatcttggctgtgggcttgggaagaaatggccattatttacagattgtatttggtacatattgtgtgatacttgaaaagataaaagggactgccagcccctaactgaaatctgaagctttttatcgcttatttttcctcgccctgtctcctcccttccacctttctccttgcattgtgatgatctagtaggcacgtctgtcaacaggacacatgcctcctctgactataacctcttaatagttgtgtataatgaaaactgtaaacttttttaaataaacgtgtatataccttggcaaa

SEQ ID NO: 33618 - DNA, 535 bp, Homo sapiens
  source 1..535: mol_type = unassigned DNA
ccgcgggctcctcagagccggggccccgggcccgtgacagacgggccgaggaagggagagaggcggcggcgacaccatgtcatctcccagtccgggcaagaggcggatggacacggacgtggtcaagctcatcgagagtaaacatgaggttacgatcctgggaggacttaatgaatttgtagtgaagttttatggaccacaaggaacaccatatgaaggcggagtatggaaagttagagtggacctacctgataaataccctttcaaatctccatctatagatcttaccaatatatttgagtccttcctgcctcagttattggcctatcctaaccccatagatcctctcaatggtgacgctgcagccatgtacctccaccgaccagaagaatacaagcagaaaattaaagagtacatccagaaatacgccacggaggaggcgctgaaagaacaggaagagggtaccggggacagctcatcggagagctctatgtctgacttttccgaagatgaggcccaggatatggagttgtag

SEQ ID NO: 33619 - DNA, 2822 bp, Homo sapiens
  source 1..2822: mol_type = unassigned DNA
agcgtcaccgtcctgcgacgcttcagaggatccttaggcctcagtggtctttgacccccggccccaggacctgaccccaaggaaacctccgggacctgtggctggagagggactttgaacatgtcggggatcgccctcagcagactcgcccaggagaggaaagcatggaggaaagaccacccatttggtttcgtggctgtcccaacaaaaaatcccgatggcacgatgaacctcatgaactgggagtgcgccattccaggaaagaaagggactccgtgggaaggaggcttgtttaaactacggatgcttttcaaagatgattatccatcttcgccaccaaaatgtaaattcgaaccaccattatttcacccgaatgtgtacccttcggggacagtgtgcctgtccatcttagaggaggacaaggactggaggccagccatcacaatcaaacagatcctattaggaatacaggaacttctaaatgaaccaaatatccaagacccagctcaagcagaggcctacacgatttactgccaaaacagagtggagtacgagaaaagggtccgagcacaagccaagaagtttgcgccctcataagcagcgaccttgtggcatcgtcaaaaggaagggattggtttggcaagaacttgtttacaacatttttgcaaatctaaagttgctccatacaatgactagtcacctgggggggttgggcgggcgccatcttccattgccgccgcgggtgtgcggtctcgattcgctgaattgcccgtttccatacagggtctcttccttcggtcttttgtatttttgattgttatgtaaaactcgcttttattttaatattgatgtcagtatttcaactgctgtaaaattataaacttttatacttgggtaagtcccccaggggcgagttcctcgctctgggatgcaggcatgcttctcaccgtgcagagctgcacttggcctcagctggctgtatggaaatgcaccctccctcctgccgctcctctctagaaccttctagaacctgggctgtgctgcttttgagcctcagaccccaggtcagcatctcggttctgcgccacttcctttgtgtttatatggcgttttgtctgtgttgctgtttagagtaaataaactgtttatataaaggttttggttgcattattatcattgaaagtgagaggaggcggcctcccagtgcccggccctccccacccacctgcagccccaccgcgggccaggaccaggctctccatctgcttcggatgcacgcaggctgtgaggctctgtcttgccctggatctttgtaaacagggctgtgtacaaagtgctgctgaggtttctgtgctccccgcatctgcgggctgtagagcgctgggcagctaagatctgcataggtcgggattggcatcgagaccctggcaactgcaccggtgccagctgtcttgggggccacaaggccaggtccagaccagggctgggggctgcctgaggactcctatccgggcagcctgctggcgggggttcccctcttcagtggccaggtcacagggatggagctgcgctgtgcatagggtgccacctcaggtgtctgtcccttgtgtcctcaggaggcagccttgctaccacccgtggcaaacgccaggtgctttttctgggagagcccacagccgtggccctccagggcttccccgacccttagcgccaggtagagggccctgggcagcctgtgtctggaattcttcgtcctgaggccacctgagtgtggtctgtcctggggaggctgtgcgcctcagcagccgtcctgacgctgagccctctgcaaaggttgggccggccaggcctcttggggctgcctgagccactgcaggaagtggcctggctgggaagttgggtgccggtcacctcccagcaggaaggcacagtggacagagatgggaagccctgggggacacagcccggtgctcccagccctccaacctctggctcccaacccagtctccccatcctagcgagcttggccctcctcagtttcgtttcaagccttggggctggagctggccctgctgccctggcaccccccggtggctggagctgggtccccgtggcccaagtgcagggtcccaagagggcagggcggggctccccaaaggagcaaagaatgcagggagggcggtccagggccctgggaaggggagctcggcaccctccaggtccgtgtgggactccagccgctgttggctgggaatcgaagttagaggtgacttccaaaggccccccgagccggcagtgccccccaccacccctccagcgactctgcggtgccagtgccttgttggcttttccggctacgcaccctgcagtcactgagctctcggtctgacgtctgatgtttgtggtttgtttataacacggggccttacctggggaattcagctggtttgaatatttgtagcccgctcccagaatgtcttattttgtaatgactgaactacatttagtaatagttacacatgtatatggttaatacatatggaaattcaatatattttgtagttaacgtattctgaagtaacggatgtttctcgccaatcgtagtgacttcagctaacgaaatgttcttttgtagtaccacggtcctcggcctaacgaaggacgtgaaccttgtaagaggagagctctgaaacgcggtcacctttgtttagtggaagggaaagtgtgttcccggcatgaggtgcctcggaattagtaaagaattgtgggcaatggattaaccactgtatctaagaatccaccattaaagcatttgcacagac

SEQ ID NO: 33620 - DNA, 2967 bp, Homo sapiens
  source 1..2967: mol_type = unassigned DNA
gtcaccgtcctgcgacgcttcagaggatccttaggcctcagtggtctttgacccccggccccaggacctgaccccaaggaaacctccgggacctgtggctggagaggtgaccgccaggcatccggggagcctttggagatctcggcttcctttttcccccgctgcttgccggcgtgtcctcgggtggacgcgggcagcccgaaggggagtttacagacgctccctcacatcggggacgcggctcctttaagggcggactttgaacatgtcggggatcgccctcagcagactcgcccaggagaggaaagcatggaggaaagaccacccatttggtttcgtggctgtcccaacaaaaaatcccgatggcacgatgaacctcatgaactgggagtgcgccattccaggaaagaaagggactccgtgggaaggaggcttgtttaaactacggatgcttttcaaagatgattatccatcttcgccaccaaaatgtaaattcgaaccaccattatttcacccgaatgtgtacccttcggggacagtgtgcctgtccatcttagaggaggacaaggactggaggccagccatcacaatcaaacagatcctattaggaatacaggaacttctaaatgaaccaaatatccaagacccagctcaagcagaggcctacacgatttactgccaaaacagagtggagtacgagaaaagggtccgagcacaagccaagaagtttgcgccctcataagcagcgaccttgtggcatcgtcaaaaggaagggattggtttggcaagaacttgtttacaacatttttgcaaatctaaagttgctccatacaatgactagtcacctgggggggttgggcgggcgccatcttccattgccgccgcgggtgtgcggtctcgattcgctgaattgcccgtttccatacagggtctcttccttcggtcttttgtatttttgattgttatgtaaaactcgcttttattttaatattgatgtcagtatttcaactgctgtaaaattataaacttttatacttgggtaagtcccccaggggcgagttcctcgctctgggatgcaggcatgcttctcaccgtgcagagctgcacttggcctcagctggctgtatggaaatgcaccctccctcctgccgctcctctctagaaccttctagaacctgggctgtgctgcttttgagcctcagaccccaggtcagcatctcggttctgcgccacttcctttgtgtttatatggcgttttgtctgtgttgctgtttagagtaaataaactgtttatataaaggttttggttgcattattatcattgaaagtgagaggaggcggcctcccagtgcccggccctccccacccacctgcagccccaccgcgggccaggaccaggctctccatctgcttcggatgcacgcaggctgtgaggctctgtcttgccctggatctttgtaaacagggctgtgtacaaagtgctgctgaggtttctgtgctccccgcatctgcgggctgtagagcgctgggcagctaagatctgcataggtcgggattggcatcgagaccctggcaactgcaccggtgccagctgtcttgggggccacaaggccaggtccagaccagggctgggggctgcctgaggactcctatccgggcagcctgctggcgggggttcccctcttcagtggccaggtcacagggatggagctgcgctgtgcatagggtgccacctcaggtgtctgtcccttgtgtcctcaggaggcagccttgctaccacccgtggcaaacgccaggtgctttttctgggagagcccacagccgtggccctccagggcttccccgacccttagcgccaggtagagggccctgggcagcctgtgtctggaattcttcgtcctgaggccacctgagtgtggtctgtcctggggaggctgtgcgcctcagcagccgtcctgacgctgagccctctgcaaaggttgggccggccaggcctcttggggctgcctgagccactgcaggaagtggcctggctgggaagttgggtgccggtcacctcccagcaggaaggcacagtggacagagatgggaagccctgggggacacagcccggtgctcccagccctccaacctctggctcccaacccagtctccccatcctagcgagcttggccctcctcagtttcgtttcaagccttggggctggagctggccctgctgccctggcaccccccggtggctggagctgggtccccgtggcccaagtgcagggtcccaagagggcagggcggggctccccaaaggagcaaagaatgcagggagggcggtccagggccctgggaaggggagctcggcaccctccaggtccgtgtgggactccagccgctgttggctgggaatcgaagttagaggtgacttccaaaggccccccgagccggcagtgccccccaccacccctccagcgactctgcggtgccagtgccttgttggcttttccggctacgcaccctgcagtcactgagctctcggtctgacgtctgatgtttgtggtttgtttataacacggggccttacctggggaattcagctggtttgaatatttgtagcccgctcccagaatgtcttattttgtaatgactgaactacatttagtaatagttacacatgtatatggttaatacatatggaaattcaatatattttgtagttaacgtattctgaagtaacggatgtttctcgccaatcgtagtgacttcagctaacgaaatgttcttttgtagtaccacggtcctcggcctaacgaaggacgtgaaccttgtaagaggagagctctgaaacgcggtcacctttgtttagtggaagggaaagtgtgttcccggcatgaggtgcctcggaattagtaaagaattgtgggcaatggattaaccactgtatctaagaatccaccattaaagcatttgcacagac

SEQ ID NO: 33621 - DNA, 2977 bp, Homo sapiens
  source 1..2977: mol_type = unassigned DNA
gcgggcaacggggagcgctcggcggcgcgggaggcgctcggggccgggcggcaggagcggcgcgcgaggcaggcgtgcagagggcagccccgcgttaggccccgccccgcgcgccccgcccgcgccagggtcctcggagctgctctggctgcgcgcggagcgggctccggagggaagtcccgagacaaagggaagcgccgccgccgccgccccgctcggtcctccacctgtccgctacgctcgccggggctgcggccgcccgagggactttgaacatgtcggggatcgccctcagcagactcgcccaggagaggaaagcatggaggaaagaccacccatttggtttcgtggctgtcccaacaaaaaatcccgatggcacgatgaacctcatgaactgggagtgcgccattccaggaaagaaagggactccgtgggaaggaggcttgtttaaactacggatgcttttcaaagatgattatccatcttcgccaccaaaatgtaaattcgaaccaccattatttcacccgaatgtgtacccttcggggacagtgtgcctgtccatcttagaggaggacaaggactggaggccagccatcacaatcaaacagatcctattaggaatacaggaacttctaaatgaaccaaatatccaagacccagctcaagcagaggcctacacgatttactgccaaaacagagtggagtacgagaaaagggtccgagcacaagccaagaagtttgcgccctcataagcagcgaccttgtggcatcgtcaaaaggaagggattggtttggcaagaacttgtttacaacatttttgcaaatctaaagttgctccatacaatgactagtcacctgggggggttgggcgggcgccatcttccattgccgccgcgggtgtgcggtctcgattcgctgaattgcccgtttccatacagggtctcttccttcggtcttttgtatttttgattgttatgtaaaactcgcttttattttaatattgatgtcagtatttcaactgctgtaaaattataaacttttatacttgggtaagtcccccaggggcgagttcctcgctctgggatgcaggcatgcttctcaccgtgcagagctgcacttggcctcagctggctgtatggaaatgcaccctccctcctgccgctcctctctagaaccttctagaacctgggctgtgctgcttttgagcctcagaccccaggtcagcatctcggttctgcgccacttcctttgtgtttatatggcgttttgtctgtgttgctgtttagagtaaataaactgtttatataaaggttttggttgcattattatcattgaaagtgagaggaggcggcctcccagtgcccggccctccccacccacctgcagccccaccgcgggccaggaccaggctctccatctgcttcggatgcacgcaggctgtgaggctctgtcttgccctggatctttgtaaacagggctgtgtacaaagtgctgctgaggtttctgtgctccccgcatctgcgggctgtagagcgctgggcagctaagatctgcataggtcgggattggcatcgagaccctggcaactgcaccggtgccagctgtcttgggggccacaaggccaggtccagaccagggctgggggctgcctgaggactcctatccgggcagcctgctggcgggggttcccctcttcagtggccaggtcacagggatggagctgcgctgtgcatagggtgccacctcaggtgtctgtcccttgtgtcctcaggaggcagccttgctaccacccgtggcaaacgccaggtgctttttctgggagagcccacagccgtggccctccagggcttccccgacccttagcgccaggtagagggccctgggcagcctgtgtctggaattcttcgtcctgaggccacctgagtgtggtctgtcctggggaggctgtgcgcctcagcagccgtcctgacgctgagccctctgcaaaggttgggccggccaggcctcttggggctgcctgagccactgcaggaagtggcctggctgggaagttgggtgccggtcacctcccagcaggaaggcacagtggacagagatgggaagccctgggggacacagcccggtgctcccagccctccaacctctggctcccaacccagtctccccatcctagcgagcttggccctcctcagtttcgtttcaagccttggggctggagctggccctgctgccctggcaccccccggtggctggagctgggtccccgtggcccaagtgcagggtcccaagagggcagggcggggctccccaaaggagcaaagaatgcagggagggcggtccagggccctgggaaggggagctcggcaccctccaggtccgtgtgggactccagccgctgttggctgggaatcgaagttagaggtgacttccaaaggccccccgagccggcagtgccccccaccacccctccagcgactctgcggtgccagtgccttgttggcttttccggctacgcaccctgcagtcactgagctctcggtctgacgtctgatgtttgtggtttgtttataacacggggccttacctggggaattcagctggtttgaatatttgtagcccgctcccagaatgtcttattttgtaatgactgaactacatttagtaatagttacacatgtatatggttaatacatatggaaattcaatatattttgtagttaacgtattctgaagtaacggatgtttctcgccaatcgtagtgacttcagctaacgaaatgttcttttgtagtaccacggtcctcggcctaacgaaggacgtgaaccttgtaagaggagagctctgaaacgcggtcacctttgtttagtggaagggaaagtgtgttcccggcatgaggtgcctcggaattagtaaagaattgtgggcaatggattaaccactgtatctaagaatccaccattaaagcatttgcacagac

SEQ ID NO: 33622 - DNA, 3109 bp, Homo sapiens
  source 1..3109: mol_type = unassigned DNA
cagggtcctcggagctgctctggctgcgcgcggagcgggctccggagggaagtcccgagacaaagggaagcgccgccgccgccgccccgctcggtcctccacctgtccgctacgctcgccggggctgcggccgcccgaggctgccctgaggatctgtgtttggtgaaaaggagccaaattcacctgcagggcaggcggctctagcagcttcagaagcctggtgccctggcgacactggacctgccttggcttctttgatcccaaccccacccccgatttctgctctgctgactggggaagtcatcgtgccacccagaacctgagtgcgggcctctcagagctccttcgtccgtgggtctgccggggactgggccttgtctccctaacgagtgccagggactttgaacatgtcggggatcgccctcagcagactcgcccaggagaggaaagcatggaggaaagaccacccatttggtttcgtggctgtcccaacaaaaaatcccgatggcacgatgaacctcatgaactgggagtgcgccattccaggaaagaaagggactccgtgggaaggaggcttgtttaaactacggatgcttttcaaagatgattatccatcttcgccaccaaaatgtaaattcgaaccaccattatttcacccgaatgtgtacccttcggggacagtgtgcctgtccatcttagaggaggacaaggactggaggccagccatcacaatcaaacagatcctattaggaatacaggaacttctaaatgaaccaaatatccaagacccagctcaagcagaggcctacacgatttactgccaaaacagagtggagtacgagaaaagggtccgagcacaagccaagaagtttgcgccctcataagcagcgaccttgtggcatcgtcaaaaggaagggattggtttggcaagaacttgtttacaacatttttgcaaatctaaagttgctccatacaatgactagtcacctgggggggttgggcgggcgccatcttccattgccgccgcgggtgtgcggtctcgattcgctgaattgcccgtttccatacagggtctcttccttcggtcttttgtatttttgattgttatgtaaaactcgcttttattttaatattgatgtcagtatttcaactgctgtaaaattataaacttttatacttgggtaagtcccccaggggcgagttcctcgctctgggatgcaggcatgcttctcaccgtgcagagctgcacttggcctcagctggctgtatggaaatgcaccctccctcctgccgctcctctctagaaccttctagaacctgggctgtgctgcttttgagcctcagaccccaggtcagcatctcggttctgcgccacttcctttgtgtttatatggcgttttgtctgtgttgctgtttagagtaaataaactgtttatataaaggttttggttgcattattatcattgaaagtgagaggaggcggcctcccagtgcccggccctccccacccacctgcagccccaccgcgggccaggaccaggctctccatctgcttcggatgcacgcaggctgtgaggctctgtcttgccctggatctttgtaaacagggctgtgtacaaagtgctgctgaggtttctgtgctccccgcatctgcgggctgtagagcgctgggcagctaagatctgcataggtcgggattggcatcgagaccctggcaactgcaccggtgccagctgtcttgggggccacaaggccaggtccagaccagggctgggggctgcctgaggactcctatccgggcagcctgctggcgggggttcccctcttcagtggccaggtcacagggatggagctgcgctgtgcatagggtgccacctcaggtgtctgtcccttgtgtcctcaggaggcagccttgctaccacccgtggcaaacgccaggtgctttttctgggagagcccacagccgtggccctccagggcttccccgacccttagcgccaggtagagggccctgggcagcctgtgtctggaattcttcgtcctgaggccacctgagtgtggtctgtcctggggaggctgtgcgcctcagcagccgtcctgacgctgagccctctgcaaaggttgggccggccaggcctcttggggctgcctgagccactgcaggaagtggcctggctgggaagttgggtgccggtcacctcccagcaggaaggcacagtggacagagatgggaagccctgggggacacagcccggtgctcccagccctccaacctctggctcccaacccagtctccccatcctagcgagcttggccctcctcagtttcgtttcaagccttggggctggagctggccctgctgccctggcaccccccggtggctggagctgggtccccgtggcccaagtgcagggtcccaagagggcagggcggggctccccaaaggagcaaagaatgcagggagggcggtccagggccctgggaaggggagctcggcaccctccaggtccgtgtgggactccagccgctgttggctgggaatcgaagttagaggtgacttccaaaggccccccgagccggcagtgccccccaccacccctccagcgactctgcggtgccagtgccttgttggcttttccggctacgcaccctgcagtcactgagctctcggtctgacgtctgatgtttgtggtttgtttataacacggggccttacctggggaattcagctggtttgaatatttgtagcccgctcccagaatgtcttattttgtaatgactgaactacatttagtaatagttacacatgtatatggttaatacatatggaaattcaatatattttgtagttaacgtattctgaagtaacggatgtttctcgccaatcgtagtgacttcagctaacgaaatgttcttttgtagtaccacggtcctcggcctaacgaaggacgtgaaccttgtaagaggagagctctgaaacgcggtcacctttgtttagtggaagggaaagtgtgttcccggcatgaggtgcctcggaattagtaaagaattgtgggcaatggattaaccactgtatctaagaatccaccattaaagcatttgcacagac

SEQ ID NO: 33623 - DNA, 1137 bp, Homo sapiens
  source 1..1137: mol_type = unassigned DNA
gcctgctttttctcaggctgccctgaggatctgtgtttggtgaaaaggagccaaattcacctgcagggcaggcggctctagcagcttcagaagcctggtgccctggcgacactggacctgccttggcttctttgatcccaaccccacccccgatttctgctctgctgactggggaagtcatcgtgccacccagaacctgagtgcgggcctctcagagctccttcgtccggactttgaacatgtcggggatcgccctcagcagactcgcccaggagaggaaagcatggaggaaagaccacccatttggtttcgtggctgtcccaacaaaaaatcccgatggcacgatgaacctcatgaactgggagtgcgccattccaggaaagaaagggactccgtgggaaggaggcttgtttaaactacggatgcttttcaaagatgattatccatcttcgccaccaaaatgtaaattcgaaccaccattatttcacccgaatgtgtacccttcggggacagtgtgcctgtccatcttagaggaggacaaggactggaggccagccatcacaatcaaacagatcctattaggaatacaggaacttctaaatgaaccaaatatccaagacccagctcaagcagaggcctacacgatttactgccaaaacagagtggagtacgagaaaagggtccgagcacaagccaagaagtttgcgccctcataagcagcgaccttgtggcatcgtcaaaaggaagggattggtttggcaagaacttgtttacaacatttttgcaaatctaaagttgctccatacaatgactagtcacctgggggggttgggcgggcgccatcttccattgccgccgcgggtgtgcggtctcgattcgctgaattgcccgtttccatacagggtctcttccttcggtcttttgtatttttgattgttatgtaaaactcgcttttattttaatattgatgtcagtatttcaactgctgtaaaattataaacttttatacttgggtaagtcccccaggggcgagttcctcgctctgggatgcaggcatgcttctcaccgtgcagagctgcacttggcctcagctggctgtatggaaatgcaccctccctcctgccgctcctctctaga

SEQ ID NO: 33624 - DNA, 1842 bp, Homo sapiens
  source 1..1842: mol_type = unassigned DNA
gggaagcgagagctgtgagtcctcaagtcgcagctgggctgctccacgtgggagtggagggtggaggaacgtgtggagtttcggagtccagcccagtgcggagacagccttgaaaccgtggttggcgggcgctccactccgctctgggctcgaaccctgcctgaccatagctgtgccccccactttctccctgtctggcccctggctccccccccctcacttagaggagggcacggggaagggcaaacggtccagagggcgggcggcctgcgggctcctctgcatcatgtgaggagggcgtggggaaggacatcccggtggggcccggtctggggctgcctccagcccgggctgcctgtcttggacttagtcgtggacctggaggccagtgcccggctggcccctgtcaccctctcgctgtgacgccagcgcctgctgactggaggacccaggttccttcgcctgctttttctcaggctgccctgaggatctgtgtttggtgaaaaggagccaaattcacctgcagggcaggcggctctagcagcttcagaagcctggtgccctggcgacactggacctgccttggcttctttgatcccaaccccacccccgatttctgctctgctgactggggaagtcatcgtgccacccagaacctgagtgcgggcctctcagagctccttcgtccgtgggtctgccggggactgggccttgtctccctaacgagtgccaggtgaggctgcggcggctccgacgcaggtggagctgctgacctggcccctttctgcggctgcgagggactttgaacatgtcggggatcgccctcagcagactcgcccaggagaggaaagcatggaggaaagaccacccatttggtttcgtggctgtcccaacaaaaaatcccgatggcacgatgaacctcatgaactgggagtgcgccattccaggaaagaaagggactccgtgggaaggaggcttgtttaaactacggatgcttttcaaagatgattatccatcttcgccaccaaaatgtaaattcgaaccaccattatttcacccgaatgtgtacccttcggggacagtgtgcctgtccatcttagaggaggacaaggactggaggccagccatcacaatcaaacagatcctattaggaatacaggaacttctaaatgaaccaaatatccaagacccagctcaagcagaggcctacacgatttactgccaaaacagagtggagtacgagaaaagggtccgagcacaagccaagaagtttgcgccctcataagcagcgaccttgtggcatcgtcaaaaggaagggattggtttggcaagaacttgtttacaacatttttgcaaatctaaagttgctccatacaatgactagtcacctgggggggttgggcgggcgccatcttccattgccgccgcgggtgtgcggtctcgattcgctgaattgcccgtttccatacagggtctcttccttcggtcttttgtatttttgattgttatgtaaaactcgcttttattttaatattgatgtcagtatttcaactgctgtaaaattataaacttttatacttgggtaagtcccccaggggcgagttcctcgctctgggatgcaggcatgcttctcaccgtgcagagctgcacttggcctcagctggctgtatggaaatgcaccctccctcctgccgctcctctctagaaccttctagaacctgggctgtgctgcttttgagcctcagaccccaggtcagcatctcggttctgcgccacttcctttgtgtttatatggcgttttgtctgtgttgctgtttagagtaaataaactgtttatataaa

SEQ ID NO: 33625 - DNA, 3028 bp, Homo sapiens
  source 1..3028: mol_type = unassigned DNA
aaacgctgaggcccagtctgtgcggttcacttgcgttcctccacgcgccccccagcacagtgggaagcacacagtaggtgctccgctctgctcctgtgccccgccccgcggcccctcccccgctccaggaagtgcgggggctccagccgcccggccggccgcgatgcattctggggaaggagcagcaccaaatccaagatggcggccagcaggaggctgatgaaggagcttgaagaaatccgcaaatgtgggatgaaaaacttccgtaacatccaggttgatgaagctaatttattgacttggcaagggcttattgttcctgacaaccctccatatgataagggagccttcagaatcgaaatcaactttccagcagagtacccattcaaaccaccgaagatcacatttaaaacaaagatctatcacccaaacatcgacgaaaaggggcaggtctgtctgccagtaattagtgccgaaaactggaagccagcaaccaaaaccgaccaagtaatccagtccctcatagcactggtgaatgacccccagcctgagcacccgcttcgggctgacctagctgaagaatactctaaggaccgtaaaaaattctgtaagaatgctgaagagtttacaaagaaatatggggaaaagcgacctgtggactaaaatctgccacgattggttccagcaagtgtgagcagagaccccgtgcagtgcattcagacaccccgcaaagcaggactctgtggaaattgacacgtgccaccgcctggcgttcgcttgtggcagttactaactttctacagttttcttaatcaaaagtggtctaggtaacctgtaaagaaaggattaaaaatttaagatgttctagttctgctctctttgttttaaaaatcactgcttcaatctacttcaaaagaatggtgtttcttttcttgtccaattttatccaaaatcttcaagttacatttaacccataaggtttaaaaaaaaggaaaaaaaacggttgtggttccctttcttccctacccttgccactcccactttctggcaccgagtttatttttcacttacttacttccccagaccccgggctcgcctccacaaaggagaaaagactgccctggcggtcctggtggcttttcttagcatgtgtggcactgttgcccagtgtgggagttggtttaaattctcctgactccagtttataacatccttttaaaaaatttaaaaacaaacagccacacccctcctccagtccttctcctcagttcttgtgtgaaactccagctgatgttaccacagtaacatcagttaattgggcaagccctgatgtcagtgtgtgtaactgacctctggcctggcctgcacagagaagccctataatcacaggtctgtggtggccccgaaatggggggcctgctagtcaggaggatgctgtgcacactgtgtgtgatgaatctcgccagaaaggctcctgaggtcccaggttggcacttctccctgcagccattgtagaagatctgctggtccttgcaggcaaagctacagccagaatgtccgtttgaaactcctagctcatctgtcaccgagcttcatccgaatgtgccacggagcttgctctccacttcctccgtgcagtggccctgccacagccctccctcggcacactttgaccctttgtaggattggaattagcaggactcggctatttaaagcaccagtctggggtcgcctgggcccctgctgaccccctcctccagagcagccagcccagcccgggaacaagacggacttcctctcccttcggactcacagcctttgcagagtcaagctccacttgaagctcactcagtaatatcctttcaatgtgttttatattgttttgactgcctttttttgtagaaataaaaattgaccttagaatttatcgtcagataaacttgtaaagatttgaatattaatgtcttttcaaggcaaatgggattgtccccgcactagtagagaatccatgtcgctctgacaccccaaggaagccgacgatccaaatgccgtgtgtcaccaaccccgcttctgccactggcggcttcccttcttggctcttgggggggactagatcctgtggagaagatgacttaaactttgctttttgttttaattttaattctataacttgagatctttccggggcctacaggcgtgtaagacagcttggtctggtctgtgcagaagtggggagtgatgggcaggttcggcagcctaacattgttcaggcgcatggcccctgcggtgtgtacacgaactcggcttcttttgtcctaggtacgccaagggcaggtttctggagactcccttgtgcccgggatggcaagggcaccgggctggcgtttccacatctgtcttcattagcagaaaagtgatgatggattttatttcactcacactccagtttgtaataaaatgccaaattctgtcagctatccaaacaagccaccatttgttcttgttgcttctctggatccagaaatgttgccattcttggaaactgtcccattgcttcgtatttctgccaacgtagctctgcctgcctgtcaacccctcactgcactctgctcatcacgggaggatacctgtgtgccggcagcccctcagggactctcagccctggcactggcaccccagggttggccccgtcagcagaggcttggctttcgagccagtgggtgtctctcctttgggcctgggcggcttgctcctgccagccatgccttcagggtaggctctgagcaagctggcgaacagccctggctgctccaaaaccaaaaagctgggtcctctggaggaggggcgagctgtggagcagccacccactgctgccccaagctcactcaggaattcacacccgcctggtttcttgaagtgtgctgggtccttccctctgctccctactccccaccacggcagagaataggctttctaagatgctgcgatcccgttctgctgcccgtaataaaaatgctctcagacactg

SEQ ID NO: 33626 - DNA, 1225 bp, Homo sapiens
  source 1..1225: mol_type = unassigned DNA
agtatgcaggtcgctgcagggacccgaggcgacacgcgcctgcaggaggtggcactcctgccgcagctcttcgatctgcttgtccttggccagcggcgcgctcgcctgctccgacaggtcccgagcgcgctggcgggcaaagacttggcacagctccaggccggcgcaactctcgccgggtataggcgcgctcacggcccggaggagcttgaagaaatccgcaaatgtgggatgaaaaacttccgtaacatccaggttgatgaagctaatttattgacttggcaagggcttattgttcctgacaaccctccatatgataagggagccttcagaatcgaaatcaactttccagcagagtacccattcaaaccaccgaagatcacatttaaaacaaagatctatcacccaaacatcgacgaaaaggggcaggtctgtctgccagtaattagtgccgaaaactggaagccagcaaccaaaaccgaccaagtaatccagtccctcatagcactggtgaatgacccccagcctgagcacccgcttcgggctgacctagctgaagaatactctaaggaccgtaaaaaattctgtaagaatgctgaagagtttacaaagaaatatggggaaaagcgacctgtggactaaaatctgccacgattggttccagcaagtgtgagcagagaccccgtgcagtgcattcagacaccccgcaaagcaggactctgtggaaattgacacgtgccaccgcctggcgttcgcttgtggcagttactaactttctacagttttcttaatcaaaagtggtctaggtaacctgtaaagaaaggattaaaaatttaagatgttctagttctgctctctttgttttaaaaatcactgcttcaatctacttcaaaagaatggtgtttcttttcttgtccaattttatccaaaatcttcaagttacatttaacccataaggtttaaaaaaaaggaaaaaaaacggttgtggttccctttcttccctacccttgccactcccactttctggcaccgagtttatttttcacttacttacttccccagaccccgggctcgcctccacaaaggagaaaagactgccctggcggtcctggtggcttttcttagcatgtgtggcactgttgcccagtgtgggagttggtttaaattctcctgactccagtttataacatccttttaaaaaatttaaaaacaaacagccacaccc

SEQ ID NO: 33627 - DNA, 1057 bp, Homo sapiens
  source 1..1057: mol_type = unassigned DNA
aatccaagatggcggccagcaggaggctgatgaaggacaaccctccatatgataagggagccttcagaatcgaaatcaactttccagcagagtacccattcaaaccaccgaagatcacatttaaaacaaagatctatcacccaaacatcgacgaaaaggggcaggtctgtctgccagtaattagtgccgaaaactggaagccagcaaccaaaaccgaccaagtaatccagtccctcatagcactggtgaatgacccccagcctgagcacccgcttcgggctgacctagctgaagaatactctaaggaccgtaaaaaattctgtaagaatgctgaagagtttacaaagaaatatggggaaaagcgacctgtggactaaaatctgccacgattggttccagcaagtgtgagcagagaccccgtgcagtgcattcagacaccccgcaaagcaggactctgtggaaattgacacgtgccaccgcctggcgttcgcttgtggcagttactaactttctacagttttcttaatcaaaagtggtctaggtaacctgtaaagaaaggattaaaaatttaagatgttctagttctgctctctttgttttaaaaatcactgcttcaatctacttcaaaagaatggtgtttcttttcttgtccaattttatccaaaatcttcaagttacatttaacccataaggtttaaaaaaaaggaaaaaaaacggttgtggttccctttcttccctacccttgccactcccactttctggcaccgagtttatttttcacttacttacttccccagaccccgggctcgcctccacaaaggagaaaagactgccctggcggtcctggtggcttttcttagcatgtgtggcactgttgcccagtgtgggagttggtttaaattctcctgactccagtttataacatccttttaaaaaatttaaaaacaaacagccacacccctcctccagtccttctcctcagttcttgtgtgaaactccagctgatgttaccacagtaacatcagttaattgggcaagccctgatgtcagtgtgtgt

SEQ ID NO: 33628 - DNA, 1354 bp, Homo sapiens
  source 1..1354: mol_type = unassigned DNA
ttgtccggcgggtcgtccttcgacggcctcctggcctcgccggagcgggtgcggggaggcccacgcagcgacggctggaggaggggtgggcggggctgccgggggtggggtccccggggcggggcggggcgcgctgtgtcgcgggtcggagctcggtcctgctggaggccacgggtgccacacactcggtcccgacatgatggcgagcatgcgagtggtgaaggagctggaggatcttcagaagaagcctcccccatacctgcggaacctgtccagcgatgatgccaatgtcctggtgtggcacgctctcctcctacccgaccaacctccctaccacctgaaagccttcaacctgcgcatcagcttcccgccggagtatccgttcaagcctcccatgatcaaattcacaaccaagatctaccaccccaacgtggacgagaacggacagatttgcctgcccatcatcagcagtgagaactggaagccttgcaccaagacttgccaagtcctggaggccctcaatgtgctggtgaatagaccgaatatcagggagcccctgcggatggacctcgctgacctgctgacacagaatccggagctgttcagaaagaatgccgaagagttcaccctccgattcggagtggaccggccctcctaactcatgttctgaccctctgtgcactggatcctcggcatagcggacggacacacctcatggactgaggccagagccccctgtggcccattccccattcatttttcccttcttaggttgttagtcattagtttgtgtgtgtgtgtggtggagggaagggagctatgagtgtgtgtgttgtgtatggactcactcccaggttcacctggccacaggtgcacccttcccacaccctttacattccccagagccaagggagtttaagtttgcagttacaggccagttctccagctctccatcttagagagacaggtcaccttgcaggcctgcttgcaggaaatgaatccagcagccaactcgaatccccctagggctcaggcactgagggcctggggacagtggagcatatgggtgggagacagatggagggtaccctatttacaactgagtcagccaagccactgatgggaatatacagatttaggtgctaaaccatttattttccacggatgagtcacaatctgaagaatcaaacttccatcctgaaaatctatatgtttcaaaaccacttgccatcctgttagattgccagttcctgggaccaggcctcagactgtgaagtatatatcctccagcattcagtccagggggagccacggaaaccatgttcttgcttaagccattaaagtcagagatgaa

SEQ ID NO: 33629 - DNA, 1573 bp, Homo sapiens
  source 1..1573: mol_type = unassigned DNA
acaaaggatccccgactgccggggagcggtgctcggagggcacaggtctacgccatcccccacgcagtttcggagatggagcgctgggcccatggagggaaggcggcaggctcggcggctccggcagcttgctggggcaggggctcaaggcggcagtccgatagtggaggccgctgagaactgtcacggagctgcgtctgtacagcgagcatcccttatttattcagggcgagtgtgtatttggggcggcgtgcagggggctgacaaagaccggagagctcccggtgcggccgccggcggagcgaagactggaacccgtatgagcgccccccagcgcccctgagcgctcgccgccggtgcacggcgcaccccgcgggaggcagggatcagcaaagccgtgcgccccgaggcccgcccccgtctccgcacaaagaccgagctggaggatcttcagaagaagcctcccccatacctgcggaacctgtccagcgatgatgccaatgtcctggtgtggcacgctctcctcctacccgaccaacctccctaccacctgaaagccttcaacctgcgcatcagcttcccgccggagtatccgttcaagcctcccatgatcaaattcacaaccaagatctaccaccccaacgtggacgagaacggacagatttgcctgcccatcatcagcagtgagaactggaagccttgcaccaagacttgccaagtcctggaggccctcaatgtgctggtgaatagaccgaatatcagggagcccctgcggatggacctcgctgacctgctgacacagaatccggagctgttcagaaagaatgccgaagagttcaccctccgattcggagtggaccggccctcctaactcatgttctgaccctctgtgcactggatcctcggcatagcggacggacacacctcatggactgaggccagagccccctgtggcccattccccattcatttttcccttcttaggttgttagtcattagtttgtgtgtgtgtgtggtggagggaagggagctatgagtgtgtgtgttgtgtatggactcactcccaggttcacctggccacaggtgcacccttcccacaccctttacattccccagagccaagggagtttaagtttgcagttacaggccagttctccagctctccatcttagagagacaggtcaccttgcaggcctgcttgcaggaaatgaatccagcagccaactcgaatccccctagggctcaggcactgagggcctggggacagtggagcatatgggtgggagacagatggagggtaccctatttacaactgagtcagccaagccactgatgggaatatacagatttaggtgctaaaccatttattttccacggatgagtcacaatctgaagaatcaaacttccatcctgaaaatctatatgtttcaaaaccacttgccatcctgttagattgccagttcctgggaccaggcctcagactgtgaagtatatatcctccagcattcagtccagggggagccacggaaaccatgttcttgcttaagccattaaagtcagagatgaattctgg

SEQ ID NO: 33630 - DNA, 668 bp, Homo sapiens
  source 1..668: mol_type = unassigned DNA
ggtttcaatttcgcttttcctgcctgaaacttgtgataacaactgggtgcatctccagtgcaggaaaagtccttggcatcttggtgccaggcattctgctactgctggtggtgggttatgaacacagatgaccaggatgaagtccttgccttggaataagcccatagcccatcccataatttgatgcctgtattactagagtcctgagaaacacggaatgctgattagaatttgggacaaagttccctgagtattctctggaggaaaagatgcggaggtggacctggaaggcctcctggagagctggaggatcttcagaagaagcctcccccatacctgcggaacctgtccagcgatgatgccaatgtcctggtgtggcacgctctcctcctacccgaccaacctccctaccacctgaaagccttcaacctgcgcatcagcttcccgccggagtatccgttcaagcctcccatgatcaaattcacaaccaagatctaccaccccaacgtggacgagaacggacagatttgcctgcccatcatcagcagtgagaactggaagccttgcaccaagacttgccaagtcctggaggccctcaatgtgctggtgaatagaccgaatatcagggagcccctgcggatggacctcgctgacctgctgacacagaa

SEQ ID NO: 33631 - DNA, 3130 bp, Homo sapiens
  source 1..3130: mol_type = unassigned DNA
cgggcgcgcgcgctctggcctcgtgcacgcgctgaaaccggagcgcgcagggcgcgccagggtgagggggacgggggcggggtgggggcagccctttcccaggcggtagcgggggcggcgtcgctgttgcccttttaagccgcggggccgccgcctcctgccgctggagtcggttacaaaggaagcgccacccaggccgccacacgccgaggcttccgcgcccctcgccattttccagcagcgctcgacgaggcggagccgcgagagcgcggcccaggccggccccgcggggcggtcgcggccgtgacggcggctccgggcccggctccccttccgcgcccggctccccttccgcgcccctcccgccggagatgaggggaagatgtccgtgtcagggctcaaggccgagctgaagttcctggcgtccatcttcgacaagaaccacgagcgattccgcatcgtcagttggaagctggacgagctgcactgccagttcctggtgccgcagcagggcagcccgcactcgctgccgccgccactcacgctccactgcaacatcacggaatcctatccatcttcttcaccgatatggtttgtggattctgaagacccaaatctgacatcagttctggaacgtctagaagatactaagaacaacaatttgcttcgtcagcaattgaagtggttgatatgtgaactctgcagtttatataaccttcctaagcacctggatgttgagatgctagatcaaccactacccacgggtcagaatgggacaacagaagaagtgacttcagaagaagaggaagaagaagaagagatggctgaagatatagaagacttagatcactatgagatgaaggaagaagagcctattagtgggaaaaagtcagaggatgaaggaattgaaaaagaaaatttggcaatattagagaaaattaggaagactcaaaggcaagaccatttaaatggtgcagtgtctgggtcagtgcaagcttcagatagacttatgaaagagctcagggacatatacagatcacagagttataaaacagggatttattcagtggaactcataaatgacagtttatatgactggcatgttaaactgcagaaggttgaccctgatagtcctttgcacagtgatcttcagatcttaaaagaaaaagaaggcatagaatatattttgcttaacttctcttttaaggataactttccatttgatcctccatttgttcgagtggtgttacctgttctctcaggagggtatgtattgggtggaggagcattatgtatggaacttctcacaaaacagggctggagcagtgcctactcaatagaatcggtcatcatgcaaataaatgccaccttagtcaaaggcaaagccagagtgcagtttggagcaaataagaatcaatataatctagcaagagcccaacaatcctataattccattgtacagatacatgagaaaaatggctggtacacccctccaaaggaagatggctaaatgtgttgactgttgtatgtttggactaatgttgctttaaagaaaatctttctaacatgcagacaaaagctttgagtgcccctattacagcagtaccgaagatgttagttaatagatattttagtggataatctgtcatctgacatccagtataagttacagcctttgcattttgctcattttagatatcttggactgagcagtggggcctttactgtatttttcctgataaatacacatactggccactccttatctctttttcttgaaaagtgaactttttaaagcagccaagtcaacatcaggctactgaagttgaggctttagggtaactttcctatattgagcccatgggttacaaggatttgcaatatattgttccatttacagccaatacaggtttaatcgatgttcaatattggtttaggaaatttaaggccttctaaatcataatagctctttcatgtctaaaaccattttatgatattgccaaaatgtgataggaaacctactcattaaattgttaaactttttaatgactatgtgaagatatgaattgtttcctgaagataatactcttaattgagttgtattgtacttcttaggcaaagcagtgtaaaactgtatcaattaaggcttgtgagtagtgatttccactggggcatcagagtcttggctgggctgaatctgctgcttgttggttcagtgtttcttatgaacaagagccacagtacagagcttcaagttatttaaaatactaagtcatcttacgtttccattttattaacgggatgttgcaatcgtttgtaaactaataaacttataaagtgattggcacaaagactccttgagcaaaagctgtgcagttaagtacaaaaagatacttaatttggagactcttacagtaatttttgccatgtcaaaacaatggcttttacattgaaagattaatagaaactctacatatgttaatttttttatagaacctgactcaaatcaaggtactctccattttattgccttacctgaatcagtcctttttggttggtaatagatttttttatacacccacgtttgatttaaaagtaaattctagttcttaagcacttttaacaaatccagaagcacatttttctgcacaaacaagttacaaagttcaaaagtgtttcttgtgcattagctttgagattcagtttttaactttgtaaaccacatctgagagacttgtcatttctacattgtgtgtgtttaatttcttttgattccattttggttaagagagcagtaaatagattttctggtattcttgttcacttgattacatttgtataaagttctgattgccagttgctcagataacaagtgacaaggcagaattctttaaatcagtaaagttccttaagcctaaggctaaatcttgaatacattgttgaattctttaatatcctgatggcaagcagactgatagctgcacatttggcatgctttgtttaatggattttatttttaattgcagatttatttggcaatgtacagtaaattttgtaaacttgcatcaagtttatgaataaagaaccatttaaaaattttgtttgtgctgatcatggcaagcaaaaaaaa

SEQ ID NO: 33632 - DNA, 2883 bp, Homo sapiens
  source 1..2883: mol_type = unassigned DNA
cggccgggcgcgcgcgctctggcctcgtgcacgcgctgaaaccggagcgcgcagggcgcgccagggtgagggggacgggggcggggtgggggcagccctttcccaggcggtagcgggggcggcgtcgctgttgcccttttaagccgcggggccgccgcctcctgccgctggagtcggttacaaaggaagcgccacccaggccgccacacgccgaggcttccgcgcccctcgccattttccagcagcgctcgacgaggcggagccgcgagagcgcggcccaggccggccccgcggggcggtcgcggccgtgacggcggctccgggcccggctccccttccgcgcccggctccccttccgcgcccctcccgccggagatgaggggaagatgtccgtgtcagggctcaaggccgagctgaagttcctggcgtccatcttcgacaagaaccacgagcgattccgcatcgtcagttggaagctggacgagctgcactgccagttcctggtgccgcagcagggcagcccgcactcgctgccgccgccactcacgctccactgcaacatcacggaatcctatccatcttcttcaccgatatggtttgtggattctgaagacccaaatctgacatcagttctggaacgtctagaagatactaagaacaacaatttgcttcgtcagcaattgaagtggttgatatgtgaactctgcagtttatataaccttcctaagcacctggatgttgagatgctagatcaaccactacccacgggtcagaatgggacaacagaagaagtgacttcagaagaagaggaagaagaagaagagatggctgaagatatagaagacttagatcactatgagatgaaggaagaagagcctattagtgggaaaaagtcagaggatgaaggaattgaaaaagaaaatttggcaatattagagaaaattaggaagactcaaaggcaagaccatttaaatggtgcagtgtctgggtcagtgcaagcttcagatagacttatgaaagagctcagggacatatacagatcacagagttataaaacagggatttattcagtggaactcataaatgacagtttatatgactggcatgttaaactgcagaaggttgaccctgatagtcctttgcacagtgatcttcagatcttaaaagaaaaagaaggcatagaatatattttgcttaacttctcttttaaggataactttccatttgatcctccatttgttcgagtggtgttacctgttctctcaggagggctggtacacccctccaaaggaagatggctaaatgtgttgactgttgtatgtttggactaatgttgctttaaagaaaatctttctaacatgcagacaaaagctttgagtgcccctattacagcagtaccgaagatgttagttaatagatattttagtggataatctgtcatctgacatccagtataagttacagcctttgcattttgctcattttagatatcttggactgagcagtggggcctttactgtatttttcctgataaatacacatactggccactccttatctctttttcttgaaaagtgaactttttaaagcagccaagtcaacatcaggctactgaagttgaggctttagggtaactttcctatattgagcccatgggttacaaggatttgcaatatattgttccatttacagccaatacaggtttaatcgatgttcaatattggtttaggaaatttaaggccttctaaatcataatagctctttcatgtctaaaaccattttatgatattgccaaaatgtgataggaaacctactcattaaattgttaaactttttaatgactatgtgaagatatgaattgtttcctgaagataatactcttaattgagttgtattgtacttcttaggcaaagcagtgtaaaactgtatcaattaaggcttgtgagtagtgatttccactggggcatcagagtcttggctgggctgaatctgctgcttgttggttcagtgtttcttatgaacaagagccacagtacagagcttcaagttatttaaaatactaagtcatcttacgtttccattttattaacgggatgttgcaatcgtttgtaaactaataaacttataaagtgattggcacaaagactccttgagcaaaagctgtgcagttaagtacaaaaagatacttaatttggagactcttacagtaatttttgccatgtcaaaacaatggcttttacattgaaagattaatagaaactctacatatgttaatttttttatagaacctgactcaaatcaaggtactctccattttattgccttacctgaatcagtcctttttggttggtaatagatttttttatacacccacgtttgatttaaaagtaaattctagttcttaagcacttttaacaaatccagaagcacatttttctgcacaaacaagttacaaagttcaaaagtgtttcttgtgcattagctttgagattcagtttttaactttgtaaaccacatctgagagacttgtcatttctacattgtgtgtgtttaatttcttttgattccattttggttaagagagcagtaaatagattttctggtattcttgttcacttgattacatttgtataaagttctgattgccagttgctcagataacaagtgacaaggcagaattctttaaatcagtaaagttccttaagcctaaggctaaatcttgaatacattgttgaattctttaatatcctgatggcaagcagactgatagctgcacatttggcatgctttgtttaatggattttatttttaattgcagatttatttggcaatgtacagtaaattttgtaaacttgcatcaagtttatgaataaagaaccattt

SEQ ID NO: 33633 - DNA, 2971 bp, Homo sapiens
  source 1..2971: mol_type = unassigned DNA
gcgtctttccggcttctcgccaggggctggcttgggggcttctggcccatctcggtccccgtctcctagccccgaggggggagtccgcggcggcccaagcccttgtggggtccatggccgccctcagccggcctgctcccgggaccggggcggggcggggcggggcggcgcagctccggctgttgtttgagcccaggccggcaaggggaacggcccttaagttttaacgcctcatttttcagtcggattttccttcttcccgcttgttcagccaattgtttttaagtttgcgtttaaggagaaactgacaatgagaatggactcgttgacggaggaaaagttggaatgcagactctggtgctgtttgagcgacccctctcccccgggcctggctgcgcgctgctgtgttctggaaaggagcatagtaccgtcgttgcggcaggaatcctatccatcttcttcaccgatatggtttgtggattctgaagacccaaatctgacatcagttctggaacgtctagaagatactaagaacaacaatttgcttcgtcagcaattgaagtggttgatatgtgaactctgcagtttatataaccttcctaagcacctggatgttgagatgctagatcaaccactacccacgggtcagaatgggacaacagaagaagtgacttcagaagaagaggaagaagaagaagagatggctgaagatatagaagacttagatcactatgagatgaaggaagaagagcctattagtgggaaaaagtcagaggatgaaggaattgaaaaagaaaatttggcaatattagagaaaattaggaagactcaaaggcaagaccatttaaatggtgcagtgtctgggtcagtgcaagcttcagatagacttatgaaagagctcagggacatatacagatcacagagttataaaacagggatttattcagtggaactcataaatgacagtttatatgactggcatgttaaactgcagaaggttgaccctgatagtcctttgcacagtgatcttcagatcttaaaagaaaaagaaggcatagaatatattttgcttaacttctcttttaaggataactttccatttgatcctccatttgttcgagtggtgttacctgttctctcaggagggtatgtattgggtggaggagcattatgtatggaacttctcacaaaacagggctggagcagtgcctactcaatagaatcggtcatcatgcaaataaatgccaccttagtcaaaggcaaagccagagtgcagtttggagcaaataagaatcaatataatctagcaagagcccaacaatcctataattccattgtacagatacatgagaaaaatggctggtacacccctccaaaggaagatggctaaatgtgttgactgttgtatgtttggactaatgttgctttaaagaaaatctttctaacatgcagacaaaagctttgagtgcccctattacagcagtaccgaagatgttagttaatagatattttagtggataatctgtcatctgacatccagtataagttacagcctttgcattttgctcattttagatatcttggactgagcagtggggcctttactgtatttttcctgataaatacacatactggccactccttatctctttttcttgaaaagtgaactttttaaagcagccaagtcaacatcaggctactgaagttgaggctttagggtaactttcctatattgagcccatgggttacaaggatttgcaatatattgttccatttacagccaatacaggtttaatcgatgttcaatattggtttaggaaatttaaggccttctaaatcataatagctctttcatgtctaaaaccattttatgatattgccaaaatgtgataggaaacctactcattaaattgttaaactttttaatgactatgtgaagatatgaattgtttcctgaagataatactcttaattgagttgtattgtacttcttaggcaaagcagtgtaaaactgtatcaattaaggcttgtgagtagtgatttccactggggcatcagagtcttggctgggctgaatctgctgcttgttggttcagtgtttcttatgaacaagagccacagtacagagcttcaagttatttaaaatactaagtcatcttacgtttccattttattaacgggatgttgcaatcgtttgtaaactaataaacttataaagtgattggcacaaagactccttgagcaaaagctgtgcagttaagtacaaaaagatacttaatttggagactcttacagtaatttttgccatgtcaaaacaatggcttttacattgaaagattaatagaaactctacatatgttaatttttttatagaacctgactcaaatcaaggtactctccattttattgccttacctgaatcagtcctttttggttggtaatagatttttttatacacccacgtttgatttaaaagtaaattctagttcttaagcacttttaacaaatccagaagcacatttttctgcacaaacaagttacaaagttcaaaagtgtttcttgtgcattagctttgagattcagtttttaactttgtaaaccacatctgagagacttgtcatttctacattgtgtgtgtttaatttcttttgattccattttggttaagagagcagtaaatagattttctggtattcttgttcacttgattacatttgtataaagttctgattgccagttgctcagataacaagtgacaaggcagaattctttaaatcagtaaagttccttaagcctaaggctaaatcttgaatacattgttgaattctttaatatcctgatggcaagcagactgatagctgcacatttggcatgctttgtttaatggattttatttttaattgcagatttatttggcaatgtacagtaaattttgtaaacttgcatcaagtttatgaataaagaaccattt

SEQ ID NO: 33634 - DNA, 1582 bp, Homo sapiens
  source 1..1582: mol_type = unassigned DNA
gcgtctttccggcttctcgccaggggctggcttgggggcttctggcccatctcggtccccgtctcctagccccgaggggggagtccgcggcggcccaagcccttgtggggtccatggccgccctcagccggcctgctcccgggaccggggcggggcggggcggggcggcgcagctccggctgttgtttgagcccaggccggcaaggggaacggcccttaagttttaacgcctcatttttcagtcggattttccttcttcccgcttgttcagccaattgtttttaagtttgcgtttaaggagaaactgacaatgagaatggactcgttgacggaggaaaagttggaatgcagactctggtgctgtttgagcgacccctctcccccgggcctggctgcgcgctgctgtgttctggaaaggagcatagtaccgtcgttgcggcaggaatcctatccatcttcttcaccgatatggtttgtggattctgaagacccaaatctgacatcagttctggaacgtctagaagatactaagaacaacaatttgcttcgtcagcaattgaagtggttgatatgtgaactctgcagtttatataaccttcctaagcacctggatgttgagatgctagatcaaccactacccacgggtcagaatgggacaacagaagaagtgacttcagaagaagaggaagaagaagaagagatggctgaagatatagaagacttagatcactatgagatgaaggaagaagagcctattagtgggaaaaagtcagaggatgaaggaattgaaaaagaaaatttggcaatattagagaaaattaggaagactcaaaggcaagaccatttaaatggtgcagtgtctgggtcagtgcaagcttcagatagacttatgaaagagctcagggacatatacagatcacagagttataaaacagggatttattcagtggaactcataaatgacagtttatatgactggcatgttaaactgcagaaggttgaccctgatagtcctttgcacagtgatcttcagatcttaaaagaaaaagaaggcatagaatatattttgcttaacttctcttttaaggataactttccatttgatcctccatttgttcgagtggtgttacctgttctctcaggagggtatgtattgggtggaggagcattatgtatggaacttctcacaaaacagggctggagcagtgcctactcaatagaatcggtcatcatgcaaataaatgccaccttagtcaaaggcaaagccagagtgcagtttggagcaaataagaatcaatataatctagcaagagcccaacaatcctataattccattgtacagatacatgagaaaaatggctggtacacccctccaaaggaagatggctaaatgtgttgactgttgtatgtttggactaatgttgctttaaagaaaatctttctaacatgcagacaaaagctttgagtgcccctattacagcagtaccgaagatgttagttaatagatattttagtggataatctgtcatctgacatccagtataagttacagcctttgcattttgctcattttagatatctt

SEQ ID NO: 33635 - DNA, 4075 bp, Homo sapiens
  source 1..4075: mol_type = unassigned DNA
tcgtgtgtgaggaggaccccgggcgggcccacgggccgtgtggggcctggtctggcccgccgggtgtgtgaagaccggggcccggtgctgcccggccggagggcgagcggaggggaggggcctggtccggcccggccggtgcgtgaggactggggcccgggcccggcgccgccgccgccgccgccgccgcgatggcccagcagcagatgaccagctcgcagaaggccctgatgctcgagctgaaatccctgcaggaggaaccggtggagggcttccggatcaccctggtggacgagtccgacctctacaactgggaggtggccatcttcggaccccccaacaccctctacgaaggcggctacttcaaggcgcatattaaatttcctattgactacccctattcaccacctaccttcagattcttgaccaaaatgtggcaccccaacatttatgagaatggagatgtatgcatttcgattcttcatccgcctgtagatgacccacagagtggagaactgccttctgaaaggtggaatcctactcagaatgtgaggactatcctattaagtgtaatctcactgcttaatgagcccaacaccttctccccagccaatgtcgatgcttcagttatgttcaggaaatggagagacagtaaaggaaaagacaaagaatatgctgaaattattaggaaacaagtttcagccactaaggccgaagcagaaaaggatggagtgaaggtccccacaaccctggcggaatactgcatcaaaactaaagtgccttccaatgacaacagctcagatttgctttacgacgacttgtatgatgacgacattgatgatgaagatgaggaggaggaagatgccgactgttatgatgatgatgattctgggaatgaggagtcgtgacgtgctccttcagtgcccctgtactgccctgccatctcaggccaaagggaggggagcaagtggggacctggccatggcccctcagcaaaaacctattcacagcgggtggggaaacacacacagctcctgctgactccccttatggatctcagtttgctcctttttatggacctttaatggagagagagtaaccctccacagaatgtctgaattcttgcattctttacccttccatcactatattgattctttttttaaaaaatatgaacccaaactcccgcctcacttcgtctctacagaatgttcacagcaaaacacgtttggtctgtttttagattcttgaagaattcaatagtctttcaagatgtttaatgtgtttaaagctgggaacctgttgggagttcacaagtgctgcatatactgggtagcaaaagaaaatggaaaaaaacccacaaaacaaactttaaaaaaaaaaaaaaacaaatttgccaaggtttagctgctcatttacattagtgtgtgtgcattcgttcagccccatggtggtgaattctgtttctttcctttcctaaggctgggacatggtgggcatcagggactttgtgctaagcctgatgaaatgtgctccttcaatctccatgaaaccatcgtaacatggaggcctcagctgctctgaggagagaaatcagactttgttttttgaaatcgattgggatcgaaagcctgaaataaatattcatactttccatagaactgagcacttggttgctatttattttaaaggcagggttatttccccccagggagtggggcaagcggggaagttgggatgagtgcgtgtgggagcaaagagttaaaaatcactatgctaagtttggttgatgctactggggggaaaaagttgaaactactggtgaccactgttgggagaggaaacatctgttttatagatttagcatggccttcccatcaaaaatacactcgtaccatgacgttttgtttttgttttttaagtagccacttttaattactcagtattaatcctaggtgcatgtgttaagatttcggttttcatcgagctgcttatactgatagtgaaaaacttggatgtgtgtgagacgagttaccgccttcttcattggatgtgatctgaactttttttctcctttcaacatacttaggctgtggagtgcaagcagaattatgcatagaaattgtggcagggctgagggagttgactgcaggcagtttttaggccagataaggctagatcttcctgcaatgcacttgctgcagctttgattttccagatctcaatcgtgttgcttcaatcaatattgagatccagcagccttcaccatccaggagacttcagaacttgaaggtaatttttggttgttatgggggtgcaccagatcataggagggcattatttggaggaaaccgctataatgtaaaatcagatttcagaaggaaaatgcagcaaggactgactgtagtcctatttcagacccctgggcactagtgtcaactcctcctttggctcgtaactcagaaagaaccaaagggcagattagggacggggcaggagggatcctaggatggccagagtaggtgacgcttacttccttagctcctccttccattctgatctcagggttttcactcttcaaactcccaaacacatgacttcttcccagcagcccttcccggcctctaaagtttggtcccagcagcccttcccagcctctaaagtttggtctggtatgaaatgggactgtttaacaagcaaggctcttaggggacactgttgagcctggtcccagaatctgtgatctccacagggccagggttgctacttgcacccagaatctagtgattttagtcagatccatggaacagagcagcttcgtaatacattgtcaagttacctgattacaaactctcatagatgttggaactacctttttactccccatactttgtaagtaatgcttccagattaacctgcaaatcttgtggagccaaagcctctcacagtgctgatttacctcccccaaaatgcccccaaacccccatgcaagtttacagccagtagcttggtcttattctcttggagccctaaaattaagcctttcattcccctttgctaaagcatctcactcccagggcagccccagcaccctggcattgcgggaggtgctctgctgcacagctgttccatcaggccctattggcctctgttagacattgactcagggagccggagcgccaagtggaggttgtacctttcagccctttggggtgttaaaagtgtcaagggctgggtttgcctctgatgagtacaatcagttccagaagactgggtaagtctcttgctagcaggtggacattctggtattttagactgactgaacgaaacccagaggctggttccagagctctgtccctgagaacacatccctgtggaaaatacttgagtttgtaattttttttcccccttctgggagtggaggtctcaggctcaatccggaaccatgtacgtacagttttgcttattatttgatgtgacatgaactcaaaatcctgcatttttagattccttttagttctaattgaggcctcactagatgctcttcagttctgtgtattttgaggctgggtggagaagtatatgattctgctgttgattctttcagtcttccccccttctccttttatcaatcattccagagttattttctattagtcaaacttttttgtagaaccttctttcccttaccctggcaaattgcttctttacttgctggtttccttacgtttggggcacatgttgtaagaaactgattggaaggggaaatgtgcagctctccactggaaaggaactctccacccctcccatcctgataaaacaaacaaggtttacatttacaactaaaaggattcagatgcaattttcaactattctgaaaccagcaggacacacctgactttaatagttttagctgaaattgtagatgttttgcttcagtttaacttatgagaaaagattatctgacggattttgtgttgacttcccctttagtggtttattttgtctttttctgcccatctgtctactaataaaatgtgaaataaaatacctgtattgctacttccccatgaaa

SEQ ID NO: 33636 - DNA, 1189 bp, Homo sapiens
  source 1..1189: mol_type = unassigned DNA
cctctccgccacttccctcgcttctgaccatagtttgcggggaagggagcgagcgcgtcgaaaaccaaggaacgtgcgcgctgacgtcacggttgaggctcggagctgaggggccgcggagggcgtggcctgcgggcggttataaagaggcagtggtgcgcgcgcggccggctcagtgctgccgggcaccggggcggcgggttggtctacgctgtgcgcggcggacgtcggaggcagcggggagcggagcggggccgccggggcctctccagggccgcagcggcagcagttgggccccccgccccggccggcggaccgaagaacgcaggaagggggccggggggacccgcccccggccggccgcagccatgaactccaacgtggagaacctacccccgcacatcatccgcctggtgtacaaggaggtgacgacactgaccgcagacccacccgatggcatcaaggtctttcccaacgaggaggacctcaccgacctccaggtcaccatcgagggccctgaggggaccccatatgctggaggtctgttccgcatgaaactcctgctggggaaggacttccctgcctccccacccaagggctacttcctgaccaagatcttccacccgaacgtgggcgccaatggcgagatctgcgtcaacgtgctcaagagggactggacggctgagctgggcatccgacacgtactgctgaccatcaagtgcctgctgatccaccctaaccccgagtctgcactcaacgaggaggcgggccgcctgctcttggagaactacgaggagtatgcggctcgggcccgtctgctcacagagatccacgggggcgccggcgggcccagcggcagggccgaagccggtcgggccctggccagtggcactgaagcttcctccaccgaccctggggccccagggggcccgggaggggctgagggtcccatggccaagaagcatgctggcgagcgcgataagaagctggcggccaagaaaaagacggacaagaagcgggcgctgcggcggctgtagtgggctctcttcctccttccaccgtgaccccaacctctcctgtcccctccctccaactctgtctctaagttatttaaattatggctggggtcggggagggtacagggggcactgggacctggatttgtttttctaaataaagttggaaaagc

SEQ ID NO: 33637 - DNA, 922 bp, Homo sapiens
  source 1..922: mol_type = unassigned DNA
ggagccacgccaacagtcagaggtcgcgcaggcgctggtaccccgttggtccgcgcgttgctgcgttgtgaggggtgtcagctcagtgcatcccaggcagctcttagtgtggagcagtgaactgtgtgtggttccttctacttggggatcatgcagagagcttcacgtctgaagagagagctgcacatgttagccacagagccacccccaggcatcacatgttggcaagataaagaccaaatggatgacctgcgagctcaaatattaggtggagccaacacaccttatgagaaaggtgtttttaagctagaagttatcattcctgagaggtacccatttgaacctcctcagatccgatttctcactccaatttatcatccaaacattgattctgctggaaggatttgtctggatgttctcaaattgccaccaaaaggtgcttggagaccatccctcaacatcgcaactgtgttgacctctattcagctgctcatgtcagaacccaaccctgatgacccgctcatggctgacatatcctcagaatttaaatataataagccagccttcctcaagaatgccagacagtggacagagaagcatgcaagacagaaacaaaaggctgatgaggaagagatgcttgataatctaccagaggctggtgactccagagtacacaactcaacacagaaaaggaaggccagtcagctagtaggcatagaaaagaaatttcatcctgatgtttaggggacttgtcctggttcatcttagttaatgtgttctttgccaaggtgatctaagttgcctaccttgaatttttttttaaatatatttgatgacataatttttgtgtagtttatttatcttgtacatatgtattttgaaatcttttaaacctgaaaaataaatagtcatttaatgttga

SEQ ID NO: 33638 - DNA, 2281 bp, Homo sapiens
  source 1..2281: mol_type = unassigned DNA
agctcctccccctgcgtctctggcctcgccggtcttggggggatggttccatcatggcgtcaatgcagaccacaggaaggagggtggaagtatggtttccaaaacgactacagaaagaactgttggctttgcaaaatgacccacctcctggaatgaccttaaatgagaagagtgttcaaaattcaattacacagtggattgtagacatggaaggtgcaccaggtaccttatatgaaggggaaaaatttcaacttctatttaaatttagtagtcgatatccttttgactctcctcaggtcatgtttactggtgaaaatattcctgttcatcctcatgtttatagcaatggtcatatctgtttatccattctaacagaagactggtccccagcgctctcagtccaatcagtttgtcttagcattattagcatgctttccagctgcaaggaaaagagacgaccaccggataattctttttatgtgcgaacatgtaacaagaatccaaagaaaacaaaatggtggtatcatgatgatacttgttgatgccactgttatcatcctcctagcagaagatagtcctactgagaaaatgagcactttgatcattcagtctttgaactttaacctttgactggaagtgacctataggcaatgaagactacttccttttactgcatttttactcgtgtgcattctgggcgcatgttgatcgctggttcagtccaggcaactgacatgcttttattagtcatacagtattaatgcaggtgtcaggaaatgtcaaatataattccattttttatttttatttttttaagcttttggaaaagctccaggtcctcatgtattgtgcaataacaatgacttccttggcggttttggtacgttcattgccggcaatgggcgttgtaacaggaaaagttttcattaactcctgccattcaatgattaatgcatgatagggcctatgaaatgaacttactggttatagtgggaatataaataaagtgagggatccaacattactttaaaagtcaccccaactgtttatatttggattctatgcactgtgatcctaaggttaacagcatgaattaacatgcgtctttaaaggactgtaatgaaagatcattgcatatttattgaattgtttatatctactgtcaagttgttttgacatggaagattttcaagtaacattggcagagaggtacagtatgttatccctatggtgaaaataaattaatttgttgtatatagttcctcaatctctgaagtaaaggtatgagtaatatagggtatgaatggtttaatcaaggctttattttggaagtaagaaaaatggcagtgatgattaaattgctgcagtccataatttgggcttgttatttgtacattaaagattttttccaagtaagttacactctgttaacttcctgctagccatcagcatgagccctactgcctaaacactatttcatttatttatgtttggaaaccccgtaaacatttttgtttgcaatcttgtttcttttgttataagtcaagtttgaatgttacaatacttttattgaaacttttgttaagttttttcttgtaaattttctttacttgtgagtatcatcttgtcctttaatcctgtaccctaaaataagaaatacatttttgacagaggcttaatgttttaacaaaagagtgtggacatttttattttaaaatttaggcaaaagtcactatcaaatggttgcttatttgtctcacacagccatatagtttttcctggagggttttgttttgttgttgttgaaaagactttgcttacagctagatgaaactttctatagaaaaaaaaaattgttgaaaggtccagttctcagtaccatgtgagttaatgatactacaactaagttctttttaaaaagtgattaatgtattttataaattaccttttcacatatgcaaaatctgtttctactacaatgttatttttactaatgccttattgttgcactctttttgaaatatcctgcagtgaatatatgaatcaatttgggcttaaaactgaaagccagttggctgaaaggtttgaaatacgtaccccagtaaaaccattcaatcaataattggtaaataatattttaaaattgtttttaatctgtatagatgacattttgtagctttgtacatgttgttaattaagggcatataattttacactcaaagtataattgctgaactcaggggtgggtagacttcaaaaatatgtctgctatagaaataac

SEQ ID NO: 33639 - DNA, 866 bp, Homo sapiens
  source 1..866: mol_type = unassigned DNA
atcatggcgtcaatgcagaaacgactacagaaagaactgttggctttgcaaaatgacccacctcctggaatgaccttaaatgagaagagtgttcaaaattcaattacacagtggattgtagacatggaaggtgcaccaggtaccttatatgaaggggaaaaatttcaacttctatttaaatttagtagtcgatatccttttgactctcctcaggtcatgtttactggtgaaaatattcctgttcatcctcatgtttatagcaatggtcatatctgtttatccattctaacagaagactggtccccagcgctctcagtccaatcagtttgtcttagcattattagcatgctttccagctgcaaggaaaagagacgaccaccggataattctttttatgtgcgaacatgtaacaagaatccaaagaaaacaaaatggtggtatcatgaactgaaatctgccttcatactatctattacggattgaatcatgtcctccaataagatgtgttgaagtcttaactcccagtacctcaaattgtgaccctatttggaaatagagtcattgcagatgtcattagttgaggtgaggttataccgaagtagaatgtggccttaatccaatataactggtgtcctaagaattggagaagagactcagacacatggggagaagaccatgcagtcatggggtgatgtatcaacaagccagcaaatgccagggattgctgggaacatcagaggctggaagaggcagggaaatgttcttccctagagctgtgggagagaacatgattctgctgacaccttgatcatggacttccagcctccagaactgtgagacaataaatgtctggtttcttttaagtc

SEQ ID NO: 33640 - DNA, 8426 bp, Homo sapiens
  source 1..8426: mol_type = unassigned DNA
gatgttgagcccccgcggcgtgacgcgagcacggcagctcctccccctgcgtctctggcctcgccggtcttggggggatggttccatcatggcgtcaatgcagaaacgactacagaaagaactgttggctttgcaaaatgacccacctcctggaatgaccttaaatgagaagagtgttcaaaattcaattacacagtggattgtagacatggaaggtgcaccaggtaccttatatgaaggggaaaaatttcaacttctatttaaatttagtagtcgatatccttttgactctcctcaggtcatgtttactggtgaaaatattcctgttcatcctcatgtttatagcaatggtcatatctgtttatccattctaacagaagactggtccccagcgctctcagtccaatcagtttgtcttagcattattagcatgctttccagctgcaaggaaaagagacgaccaccggataattctttttatgtgcgaacatgtaacaagaatccaaagaaaacaaaatggtggtatcatgatgatacttgttgatgccactgttatcatcctcctagcagaagatagtcctactgagaaaatgagcactttgatcattcagtctttgaactttaacctttgactggaagtgacctataggcaatgaagactacttccttttactgcatttttactcgtgtgcattctgggcgcatgttgatcgctggttcagtccaggcaactgacatgcttttattagtcatacagtattaatgcaggtgtcaggaaatgtcaaatataattccattttttatttttatttttttaagcttttggaaaagctccaggtcctcatgtattgtgcaataacaatgacttccttggcggttttggtacgttcattgccggcaatgggcgttgtaacaggaaaagttttcattaactcctgccattcaatgattaatgcatgatagggcctatgaaatgaacttactggttatagtgggaatataaataaagtgagggatccaacattactttaaaagtcaccccaactgtttatatttggattctatgcactgtgatcctaaggttaacagcatgaattaacatgcgtctttaaaggactgtaatgaaagatcattgcatatttattgaattgtttatatctactgtcaagttgttttgacatggaagattttcaagtaacattggcagagaggtacagtatgttatccctatggtgaaaataaattaatttgttgtatatagttcctcaatctctgaagtaaaggtatgagtaatatagggtatgaatggtttaatcaaggctttattttggaagtaagaaaaatggcagtgatgattaaattgctgcagtccataatttgggcttgttatttgtacattaaagattttttccaagtaagttacactctgttaacttcctgctagccatcagcatgagccctactgcctaaacactatttcatttatttatgtttggaaaccccgtaaacatttttgtttgcaatcttgtttcttttgttataagtcaagtttgaatgttacaatacttttattgaaacttttgttaagttttttcttgtaaattttctttacttgtgagtatcatcttgtcctttaatcctgtaccctaaaataagaaatacatttttgacagaggcttaatgttttaacaaaagagtgtggacatttttattttaaaatttaggcaaaagtcactatcaaatggttgcttatttgtctcacacagccatatagtttttcctggagggttttgttttgttgttgttgaaaagactttgcttacagctagatgaaactttctatagaaaaaaaaaattgttgaaaggtccagttctcagtaccatgtgagttaatgatactacaactaagttctttttaaaaagtgattaatgtattttataaattaccttttcacatatgcaaaatctgtttctactacaatgttatttttactaatgccttattgttgcactctttttgaaatatcctgcagtgaatatatgaatcaatttgggcttaaaactgaaagccagttggctgaaaggtttgaaatacgtaccccagtaaaaccattcaatcaataattggtaaataatattttaaaattgtttttaatctgtatagatgacattttgtagctttgtacatgttgttaattaagggcatataattttacactcaaagtataattgctgaactcaggggtgggtagacttcaaaaatatgtctgctatagaaataacttgaaaaaaaaaattaaaaccgtggccagccaccaaattgtggacactgtttatatactgctagttaacaattaccacttttaaaaaattataaccgtttttgttctatcttgactagataaattctcacaatgatctctgtcagttttattagttggcctgtttaaccaagacagaaagtctttgaattactcatagttttaaactgcttttaatatgaaaattgcagctgtaaattatgtattttcatattttgcgtaactgctctacactactgtttgacttgatcttcttctgggggttagggagaaatctgtctccatattgctggttctcttaccaaaatgcttttataaagaaatgaccggtgacatttattcaccaaaggaattaatatactgagtcaaagattaacaatgctatactatagagtaataggtcatatatagcctcaattgagttttttatgacaatattttaacatacctctctctctacatataaataccataaagtaaactaaaatgacacagaggaaagtagaggaaaatgaaataatttcggtacatcttatggtttaaagagtagaaaataagatgaaatatcctaaaatataggagcacagacatttaaaattcataatcaggctaacaacactctcttgaatttaggaatcattgaaaactccttgcacttagatttaatttatatgttagttacattattaaaagtcataaggcatttatctgagtcattgctctacagagagcaattaatggcttgtaataataaaaagaatatttctctgtaatgcattgttgaaagacaaccagaatatcaagaaaatgtatataggaatatgctacttgcctcctccctgcatttcctcgtggggcactatttgcgacataggcctacagaattagactttcatacttagaagataaggtacactcttcttcttttatttatttatttatttatttttaggccattcttctggtttgccaaattctattaagacagtgatacatttgcttccttatttatgcatgcttagatcatgaacatgatgcccttcttttttttttttttctttggtcaagtagggattaatgccataggtttagagagaaggattgttttcagtttttaagagaattttttaaaaatacattttatggttctcttaaggaattaatattcacttctgaaggacttacttgtaatatataatttatcattttagccagcagggaaataaatcatttttaatccccagaagaaagtgctggaaatagcttctatatagtcagcagttcacctggagaaagatcttaattccttgttgttttgactaggaatatcaatatttggtataaaataactagaatagtttattaccttttccctcatgaaattttaaatatatgcaaatatatatatcattagattcctgtggtggataataatttcttcagattctaaaacaggtgtctagtgactgcttaattgtttccaagttgcatcaaagatgaattggtaaataatggaaatgagtagtgatatgaaaatggttatgtaactacatattacttgtttctggtaatcaagtcttattttttaaaagcctattgtttttcagaattgagatatttaaaacttgttataacttcttcctaaaaatagaagagaagaggaggtactgtgtgttacaaaaatttttttaaataaagaattcagtgtcactagttctaagcctttatggttactgctgcttatatttcttgatctcactttcattaatttttttgtacatatcttagctgaatgcttaaaatttacaattatttgtaattgtgtatgtaaattgcttttcaaaaagaactgaagcttaaccatattcttcttttctgaggattcattatcagaatcagctactatactgttctgtgttatagtaatgccgttactgcctgtgcatgattgaggtctgtgaagaaggtgtcttttaatctgcaccaactggccccaatcctctttgtagtcctttttaaattgttttaaatctgtcctttatttttcttcctatttttctgcctcttcccactgatgtccaatgtgtcagtcttccgcagtttccttttctcacttctaatttattctctcttttttttttctgaggttagggattctacagaaggacgattattaaaattatgccatgaatttttgaaaaatttaaaatgctctcctacaaataaaatacatggagtttctgatactaatttcagtttgtcagtagatggctaaatttgttgaataattgactacttggtaaatgagctgttagctgtaattagttctttagtactaatattaaggaaattttgttattttcggatgaggactctcccaaagccaaattattgtccaagcaaattatttattttttccatttaaatttctaagtcattttgagatgtggaatgattatttttattatttatttatttatttatttttgagacggagtcttgctctgtcacccgggctttagtgcagtgcacgatcttggctcatttcaatctccacctcctgggtctaagcgattctcctgcctcagcctcttgagtagctgggattacaggcatgtgctgccacacctgactaatttttagtagagacaaggtttcaccgtgttggccaggctggtgttgaactcctgacttcaagtgatctgcccacctcagcctcccaaagtgctgcgattacaggcatgacccaccacacccagcctggaatcattttttaaaaataatttgtgggagacttgctttctcaacataaattgtgtgtgggttgttttttgttttttgagacggtcttcctctgttgcccaggctggagtgtgcagtggaacagtcattgcagccttgaccaccttggctcaagcaatcctcctgcctcccgggtagctgagtctacaggtgtgtgccaccatgcctggatggatagaatttttttttttttttttttttttttttttttttttaaagacacgaggtctcaccatgttgcccaggctgatcttgaattcctgggctcaagcattcctcctgcctcagcctcccaaaatgctgggattacaggtgcaagccaccatgcctcgtctgtttgccgatttaagacaggtttatgtacatcattatcattagaggcacatagaatctagacatgtacttgaaacttagctctctatcctgaaagttgaagttagggttctttgatcctggtgagatgttaattgtaattttaattttcatatgttaatattgtgacttgtattttgtgatgagtctctagaatgattaaatgactatttttttatgaaaaattttttgttaataaaatatctgagggtattttgagtatgtggaaggaatgcctgaatagaagctgatctatcttaacatacctcaagaactccagttttaatatggtgagtgaggagttgactgggaaaaggagagatccaattcttgttctagtccttggcacatacactctctgggttttgagaaaaggatggtcctacaacgattctaagttgttttctcattggtcctacaacaattctaagttgttttctcaaaggcaaaagcatgatttcaaaatgacatcacttgtcagattttctggtgtatggaaagatttaataatcctgcctcttttgaagcctgaaacttacaatttaaagcctgaaatctaccataaggaacttggtaaattgtgtcagataccatgaaaatgcatcttttcatagttaaccacagattgtttatgtaaaggcaaattggtggtcaggttcaaggtaaaatggattattgggttgattagtagccaaaaactaaatgcatgttcaggtcaaaatgaatttgtttgttttagttggtgccattttccttttattattcagaactacagagtgtgcattttattaataggaatgaaagctcatgcttgaggatttgaatagggtggatgtatatattttataaactcaagttgcaaaatatgtaaagtcactactttttaaatagaatataaatgttaaaacagacaaatctatgttatatattttttaatacatgtatcagacttgttagttgaatgcagattactttgctttatggaatttcataacttttaataataaagcagttgttattggattttttctgtagacttgaatactaaatgggatagataccagacctctttttggtttatgacgtaaaagtatttgtacagtagtttctcttcacaaaagactgaattttaaaggattatagaaacaggaacatgtccatttccaaaatgagtgcaacagaatgaagatagtcacttaaaccatctatttaacacatcacctttatgtaatatgtagctagttttagtgttttaataagtcccaactaaagactgagtgttttcagtgaagatggaaatggagacccaggcacttgcttagagttatcgtgagtccgatgttcctgaacttcaagttgtacaattaagggcatactctaagaacttctggatgctttctggagtatacaaacagatcaactaatgacttaaatgagtgactcttgaagctgcaagaagaggaaagaaataaccacaagaaggggctatctcagcatctgttattcctgacaggaggaattaaatatgctctgctggtaattctaagcttttctgcaggggatctgcttgccccaggagcaccttagtcctcattgaggcagccattctgccataaaaacgatcatgtctcaagctgttcctgccgtcctacacaactatgttagtagatggttagataaatatatgaaccatcttttgtactttgatgatgcccttttcctttattataatccttaatttctactttccatagtaggatttgacttttctccattagtttaagctaccctggataagtgactctgtttatgtcctccctatatttcttactcattttcacactaacataacacgtaacaaaattaaacataagctaaattgaagaagcaagtgagacagctaagagttttgtgtacttggacaacaaagctcaaagccactgtggttatctgtcctgttgggagcccctttcaaccatttttttagttgcctgtaagatttatttttaatgtttgcctgcataatgcaaaatacataagtgggaatccctacgccctttacagttaagtggattatggaaataataaggaaagtttatcaactaaggtaggaaatatcttctcatgtctgtatctggccttcagggacttaatgtgggtgaatatatgtcattagacaagatcctaatatagatggctgtatcctgcagatagccaattcaacattaaaattttatgtttccatacctcaatgaaaacatatttcttttatcctgttataatttaatgacattcccatccaacttaatcaagcaatgatactcagtagtcctctccttgcatttttcaagtcctgttgagtgtaactttaaaatgtctctgagatttctaccttctctccagtctccttaccattagggcctttcactacctggccttggtgtccctaggctgctcttcagctgtccacaaaccttgtttcataagcagtagcaatgcaagcttccactgccgtctgctaatgttcttccctcctagaatgttcatgatctgcgtttctacctgaaaggtctagttcaaaggtagctgaaaggttatcatccttgtcctttcttctctccctaccagtcatctatcctgaactttttaacagtagggacagtgttgcaattgtgtttgtgtccccagcacgtagcacacagtacctagtatacagtacctgtagcacataggcatttaataagtgtgtattgaattaacttggttatgcttgtatttttatcctagctttctcaaagaaacttaggtgctagctattttgaaacatatatccagaaccaccacctgagtaaaatgtataacaggaccctgctctttctatcccagagagtttgagaaaactacttttaaataaatcattaatcattcttc

SEQ ID NO: 33641 - DNA, 4384 bp, Homo sapiens
  source 1..4384: mol_type = unassigned DNA
ggagggaggacgaggacgggggcggcggctgctgcgagggggggcccgtgctctccccgtttcccttagtcgcactcaggcagccgccgccgccgccgctgccgccatgttggtttgagaggcgatgacaggaggcggccgcggcgtgtgggactgaaaagtgaaggaggaggaggagaaacaaagctctgagaggaaaccattcccgggctgaggagaaggaggacccggcctcttccggggaccagccgaagtcggcgtcgcccggagctcgcgaggccggggaggggaggggaagggaaggcggagaccggggaggcggcggcggggaaggcggaggcagaagaggagtggcgaggagccggagacgatgcgccccgaccccagctgctgtccggaggcgcccgcggcctgagcccagaggggctgtggagtgtcccggccggccccgagcacccccgcgctgtcggtcccccgctccggtctttcgctttggcttccaactagttaaatgcccttgagcgcgggtttccgcggcccggctcttcgcccccgcggcgcgagttgagccgtttccccgcgctgtccgcgcgggcgctccgacagcggctctgcagggtccgcggccagcgtccggccaccgctcggccgccactcaaggctcacgcgtcgatgtgtagctacatagttatctgtgtacatccacgctggggcatttttctcctgcttaatgaggacttgactcgggagcaagtgtgaatcattgccggggctgggaaaggaggaaggcgcatttaaccccctcccacccctctccatgtccgtgtgtcactcggctcggtccacctggcgcggccggtcctggggctgctgctgctgttgacgacgacgacgacgacgggggctgcctctgctgtcccgggagtttcctcctgctccggccacacagctcctggggattgttcctcttcgaaccagaacctcggcctgaccggcactttggctccaaaataactttatttttgggggagaaagcacatcacgaaccagtcaaaatcgtggtttatttctgtaacgtgaagacttctgctcttttttctttgtttgtttttttcgtaaacatctgggtgtatatcaaacggcaagatgtccagtaatgtcccggcggatatgataaatttgcgcctcattttggtaagcggaaaaacaaaagagttcctgttttctcctaacgattctgcttctgacattgcaaagcatgtatatgacaattggccaatggactgggaagaagagcaggtcagcagtccaaatattctacgacttatttatcaaggacgatttctacatggaaatgtcacattaggagcattaaaacttccttttggcaaaacaacagtgatgcatttggtggccagagagacattaccagagccaaactctcaaggtcagaggaatcgtgagaagactggagagagtaattgttgtgtaatcctgtaaacactgtctgcctagtgtgatgtgatatagtctttgtctttcatgctgctgggacagaaaagacccgacattgcttcagaaaccgttcagaacagtctgcctgtaaacacatggaactgaattaccacatgaacactgtcatcttttctcatgaaagtaaaaagaaccaagaacatttttcactctgattttttatttcttgtattttttgttgagctgttttaacacatattggtttttgaatgcagtcaatctccaggggaaaagttaacaagttatctttcgtagcagaaaccattttgctgccacaaaattttcatcatcagaactaataaatcaagtgttccaaatacaatttgcattaaaaagattggcattattttcctcatcagcagaatttataacagtgtgtggtatctagaaatacttatatatacaattccacactggaagacactcagcaattaatgaagttaattactgggccaacttgagaggaaaaaatggaaaagaaactaaaatgttgggtgaattctaccaaagtcagccgtggtggctgcactggcacagaatactaaactgagtgtgactattttcactgcaacaaatgaaaaaacaaaatgtgcctgtttaaagcactcagtagagggctgatgaaactaattttttttcctttaagacatgcactcttgagtcctacagtaactgagtgtttgtttagacagcacaagaaggggtgagagtgcgtctcctagccttaatgtgggagggtagtttcagtcactcatcggctttcattattgtgcagaaatattagaaaacctcattgatcaattttatgtatttgaatatcagcaaattgaaattttccataattatcattaatttgtaaccacatccagtgtcatgcttactccttagagttcagatgaattcttaaaattaaaaaaaaactccatagtactaattttgtttctttatatagtttgcgtttgatattagtgcttgcaattgtattaaagtcaaaagctgatttttatggcatacacaagaatgccactttttcttttatttcataccaataatttaaagattgatatgctaaaaacaatttgcacagcactaaagcatgagctactttcatctaaacctgtaaaaatatgaaagatttttatattttttcactgggaagaaattcttcctggatgaaattacaaatatgtgtagaatatatttaataaaagacttataaaatacctaactacaggacttaaaatatagattggcgcgtagtatacagaacaatattccatataaataagtttagcctttataaaaatgaagttgcaggctgacattacattctgtactaagtgtcaacagcccttacaaacattaaatgtaaatggtttcaaatggtcagcgttgtttaaatgtaatcatgttattttattcattgttaatgctttgatgaaaaggctttatatgcagtagatctacgaaaatattgttcatactgatcagaattaaatttgtatagagcagagttttaaaatgaatgtaaatagcactaaacgttttctttctgcaacctgtacttacagattcttcctgtaaactaaataaaaaaaaaatgatagtgcattttggtggtaattttaaaggtcttgattaggtcaataattgtttaagcaccgtctcattcatgttttctactttcatttcttaagcttttaaaattcatttaattaatattctgttgttgttttggggagtattcccaatgtatctttgatatttaacctggttaatttgtggacagtcacaacaatggatagaattatgtagtctccgttatcactaaaatgttatcttcaagagatgttaaatatttatatgctttgttgactagctgaaatgtgaattctgttagtgttgactaaagaatctggtagttgcttaattgggcaattaaacaatttatggctctattttgtaaaacaaactactggtaattatttttaatacctattttcattctgattactctttttttaagttaaagactatcagttaattaagattgagtttttatgatggttaaaaataattctctattggtttttcaatatatttttctgtgtgttctcagattatatatttccctcaatttagagtttgctaagtgaaataaactggttcactagtagagaaagaattacgtcgcttaatacctaatatcatagttgtacaatatgaaaaaaaagaataaaaagtagcagtaaaattatatactgaaaacaccaaaaatttagatgccttaatagtatatacgtgaaatactcagctgtccctttaaaaataattccttggactgcctggtggttaaaatacgattcctcatatccaaggctacttttgaagatccctctgccaaaaatatagctcacttatctaaaggtgagagctgcatagatccagtaatgtacataaagcctgaatgatgagcctatgtccctgcctaacgctggtgtctcactcatctcttttacctaaattgtcctgaactttgttaagtgttctggacaaggccaagcttttctttattaaaacctcagcatgtctccctgatctgaactatttgctttctcttcaagataagttgtattttaccatggaaaaatacagtatctaacattaccattcacgttaaatgaagtttcctcataacatttatctttagttttatgaagtcatcgtgaccaatgttacagtaatttctgttagctgattgtggtaaacaatgtttaatgtgaaaagaaattaaaactttcttcatctgttgtagaatatttctcttctttaaaatggcttctattcataa

SEQ ID NO: 33642 - DNA, 2382 bp, Homo sapiens
  source 1..2382: mol_type = unassigned DNA
ggttccagcgcgcgcccggggcggcggcgcgcggcggggggtggttggggtgcgcgccggcccgagtggacgccgtcgcgaccgccatgcagctgacggtgaaggcgctgcagggccgcgagtgcagcctgcaggtgccagaggacgagctggtgtccacgctgaagcagctggtctccgagaagctgaacgtcccagtgcgccagcagcggctgctgttcaagggcaaggccctggcagatgggaaacgactctcggattatagcatcgggcccaactccaagctcaacctagtggtcaaacccctggagaaggtgctactagaagaaggcgaggcccagaggctggccgactccccacccccgcaggtctggcagctgatctccaaagtcttggcccgccacttcagtgcggcagatgccagcagggtcctggaacagctacagagggattacgagaggtccctgagtcgcctgacgctggacgacatcgaacggttggccagccgcttcctgcaccctgaagtgactgagacaatggagaagggcttctccaaatagaattctcggagcatggggaggtgcccaacgccaggctaccgctgcatgtcgcactaagtgtgttctcctgttgcagttgggctcatcatcgtcatagctggcatgtacctggctctggccaggtgctaggcactcctcacagcttgacctgggtttgcttccacaccctcagaagaggagagccggcacagcagaggcaccggcgatgaagtggcacagccccagtcggaatccagcggcttctgaaagtgccttggtgtgagaaggaggaaggggccgcttggagagctgggctctcgcatgtcatgtttagcccactgagaatataccctcaggtgactccctcccgatcctgaaagggaaagcagctgtcacctgacttctggcgggtccaacatagccctcagcttacctctgcaggaggccgagtgacagccagccctggaaccccccgacccccgcagctgctgcagccagtgtgccagtgtgcgttcgacaaatggaaaagcagattggggccagggagtcagcaaggcaccccagctctgtgatgtgactttgggcgagtctcagtgccacttggtccccagccatggactctatacagtgagggccactcaccgacctgagtcagtgtcctctgtctcacagggcccctctcccttctgttcagtaaacaaactgaagccaaaaatgaagccgtggccaagcgtgacccagagatggggtgtcctggcccttagtgacacagctcctctctggggcaccctatctgcttgtctcgtccaggaagcgttagggctgatgggtgactcagcaaggcagtgtcagagctgggactgggcgtaggcctttgtcctcatccccagcactggcctccctgtggaagatgaacatatcccagccacctgtgtacaggggctcactttgtgtgctccttgttgcctgagaagaaaccttggggtgccagggtgggggcagaagcatgggctgggttccggttcatcctcctccaccctgccgtgtgtgtgggcacaagaggacatctaaccacctgctccttggaggaggcccccaggggtggtagaggctggaaggaagccacatcaggaggacgccactccggcccttcacccttgccaagtgagctgctcacagtgtggtcagggctgcgcgtgctggaggccctcctgcctgggccttgtggggcaaatattgggtccccaggctggaaagatggacagaggcccaatgggtgaaggctttgaagagcacacagaagcccctggccccccacgagagctggagagccatgtatatggcttcaaagccacctacggcagggacacactcgtgagcatgtgtggcctgcagttcaggtgatacatttaccagtgttcttgtttgtgtggtgccaggaaattgattttggaaaaagtgaaataacattaaaggtgaatgtgaggcttctacttttatccaaaaggagctatattagctaggctgtttctgatatccaatcattggtttaacaataaaggcaatttgtttaatcagttaacggaaatttcttggcttatgaaagtgaaaagtccagtggtattggcattggcagcaggtgagcaatttcacccagtgtcttctgcctccctctgcgttggtatctgctacatcccaggccaccacctccgaggatgaaaagatggctgcctgcagcttccacggaatccctccctcactgccagagcagcatcttctctgtgtaccacctctgctgtctcagatgcccccagcaaataaacactcttctcgttggtcagaa

SEQ ID NO: 33643 - DNA, 1508 bp, Homo sapiens
  source 1..1508: mol_type = unassigned DNA
tttgttgatagggagaagccaacatctcccgcaggaccccctaatcttcagggcagctcccagagcatggatccctcctgattccactcagcccgatgttcctcacagtcaagctgctcctgggccagagatgcagtctgaaggtgtcagggcaagagagtgtagccacgctgaagagactggtgtccaggcggctgaaggtgcctgaggagcagcagcacctgcttttccgtggccagctcctggaggatgacaagcacctctctgactactgcattgggcccaatgcctctatcaatgtcatcatgcagcccttggagaagatggcgctaaaggaggcccaccagccgcagacccagcccctgtggcaccagctgggactggtcctagctaaacactttgaaccacaggatgccaaggccgtgctgcagctgctaaggcaggagcacgaggagcgcctgcagaagataagcctggagcacctggagcagctggcccagtacctcctggcagaggagcctcacgtggagccagctggagagagggagcttgaggcgaaggcacggcctcagagctcctgtgacatggaggagaaggaggaggcagcagctgatcagtaaacgggccatcctacccatttgcatgctaaaattctcccggcctcatccttacgtgttccctggtgacttttcctactacttcctgctgatgtggatgcgtccacacccctttttgaaccttccaagcagctggagggtttttggatccctgtcccctcttgggcctgaggtcctccctctgaaatgcagagtgaaccaaccctcatcaccatgcttcccctagaagggttctgatcaccggagggcagccccaaaggccacagtcccctcctgtgctggcagctttgcccacacatacccagcagctccccaggctgaaagcagccctggcccagggtctccatggttctaggcagaccctctttctccttcgggacagaaagacaatgtgagttcattttcctccatcctcagaccgtgacatctcccctaggctccccagcagccaagaggagaggaatgtcaggtagctgccccttgccttctgggtgaggctgcccctgctgttctcctgcttgtgcttccagcttaagggacaggcacagcagaggtgagagtgggaggagggcacgtaccgggtgccagccctggagccctcagggagacagacacagaccaagaatagcaggaaactgagcctcaggcagaaaaaaagttcagcaaagtcatacactccctgtggccagcgtgaacagagccatgccccaccctcccagactgatcagtcagtaggtatcacagctcacattacctgcccagcgctgcccaaggctccctggaaggaaaaatggtatctgtcaatgaggatccttgccctcacagagcacgcagcctagatgcagagagctgctatacatgtgaaaagtaaagtggtgacatgaaactaga

SEQ ID NO: 33644 - DNA, 519 bp, Homo sapiens
  source 1..519: mol_type = unassigned DNA
aacttccgcttccggttcctagcgttaactgcgaccggggttcagcgctcgggtgaggagctggtggcgtcggcaggttcgaggcgattcgaggtgagggggtcaagcggagaggctcggagtcggagaaagctgtcgcgacccagccacccagggtctggggtcggtgggagctccagctaggatgatcgaggttgtttgcaacgaccgtctggggaagaaggtccgcgttaaatgcaacacggatgataccatcggggaccttaagaagctgattgcagcccaaactggtacccgttggaacaagattgtcctgaagaagtggtacacgatttttaaggaccacgtgtctctgggggactatgaaatccacgatgggatgaacctggagctttattatcaatagatgagaatcctcatcttcctgccccgctttcctctcccatcctcatcccccacactgggatagatgcttgtttgtaaaaactcaccttaataaagacttagatgttgctttgt

SEQ ID NO: 33645 - DNA, 432 bp, Homo sapiens
  source 1..432: mol_type = unassigned DNA
aacttccgcttccggttcctagcgttaactgcgaccggggttcagcgctcgggtgaggagctggtggcgtcggcaggttcgaggcgattcgagctccagctaggatgatcgaggttgtttgcaacgaccgtctggggaagaaggtccgcgttaaatgcaacacggatgataccatcggggaccttaagaagctgattgcagcccaaactggtacccgttggaacaagattgtcctgaagaagtggtacacgatttttaaggaccacgtgtctctgggggactatgaaatccacgatgggatgaacctggagctttattatcaatagatgagaatcctcatcttcctgccccgctttcctctcccatcctcatcccccacactgggatagatgcttgtttgtaaaaactcaccttaataaagacttagatgtt

SEQ ID NO: 33646 - DNA, 1360 bp, Homo sapiens
  source 1..1360: mol_type = unassigned DNA
tccggtttccggcgagagggccagagtgagtgtttacaccggcggcagtgcggccgggttccttccgcgggacggggagaaagagagagcgcgaaagagagaggatgtctctctcagactggcacctggcggtgaagctggctgaccagccacttactccaaagtctattcttcggttgccagagacagaactgggagaatactcgctagggggctatagtatttcatttctgaagcagcttattgctggcaaactccaggagtctgttccagaccctgagctgattgatctgatctactgtggtcggaagctaaaagatgaccagacacttgacttctatggcattcaacctgggtccactgtccatgttctgcgaaagtcctggcctgaacctgatcagaaaccggaacctgtggacaaagtggctgccatgagagagttccgggtgttgcacactgccctgcacagcagctcctcttacagggaggcggtctttaagatgctcagcaataaggagtctctggatcagatcattgtggccaccccaggcctcagcagtgaccctattgctcttggggttctccaggacaaggacctcttctctgtcttcgctgatcccaatatgcttgatacgttggtgcctgctcacccagccctcgtcaatgccattgtcctggttctgcactccgtagcaggcagtgccccaatgcctgggactgactcctcttcccggagcatgccctccagctcataccgggatatgccaggtggcttcctgtttgaagggctctcagatgatgaggatgactttcacccaaacaccaggtccacaccctctagcagtactcccagctcccgcccagcctccctggggtacagtggagctgctgggccccggcccatcacccagagtgagctggccaccgccttggccctggccagcactccggagagcagctctcacacaccgactcctggcacccagggtcattcctcagggacctcaccaatgtcctctggtgtccagtcagggacgcccatcaccaatgatctcttcagccaagccctacagcatgcccttcaggcctctgggcagcccagccttcagagccagtggcagccccagctgcagcagctacgtgacatgggcatccaggacgatgagctgagcctgcgggccctgcaggccaccggtggggacatccaagcagccctggagctcatctttgctggaggagccccatgaactccctgcttcccctgaacccccagcaagttgcagaggctactgcccttgggaggcactcatgaaggtgcctccatctctcccttccccaatatacctgatggtcaactctc

SEQ ID NO: 33647 - DNA, 1427 bp, Homo sapiens
  source 1..1427: mol_type = unassigned DNA
gtttccggcgagagggccagagtgagtgtttacaccggcggcagtgcggccgggttccttccgcgggacgggtgagggcgctggggccctgggcagcgcgggctcgatgtgtgtcagccaagtagctggtcccactggagcgggagaaagagagagcgcgaaagagagaggatgtctctctcagactggcacctggcggtgaagctggctgaccagccacttactccaaagtctattcttcggttgccagagacagaactgggagaatactcgctagggggctatagtatttcatttctgaagcagcttattgctggcaaactccaggagtctgttccagaccctgagctgattgatctgatctactgtggtcggaagctaaaagatgaccagacacttgacttctatggcattcaacctgggtccactgtccatgttctgcgaaagtcctggcctgaacctgatcagaaaccggaacctgtggacaaagtggctgccatgagagagttccgggtgttgcacactgccctgcacagcagctcctcttacagggaggcggtctttaagatgctcagcaataaggagtctctggatcagatcattgtggccaccccaggcctcagcagtgaccctattgctcttggggttctccaggacaaggacctcttctctgtcttcgctgatcccaatatgcttgatacgttggtgcctgctcacccagccctcgtcaatgccattgtcctggttctgcactccgtagcaggcagtgccccaatgcctgggactgactcctcttcccggagcatgccctccagctcataccgggatatgccaggtggcttcctgtttgaagggctctcagatgatgaggatgactttcacccaaacaccaggtccacaccctctagcagtactcccagctcccgcccagcctccctggggtacagtggagctgctgggccccggcccatcacccagagtgagctggccaccgccttggccctggccagcactccggagagcagctctcacacaccgactcctggcacccagggtcattcctcagggacctcaccaatgtcctctggtgtccagtcagggacgcccatcaccaatgatctcttcagccaagccctacagcatgcccttcaggcctctgggcagcccagccttcagagccagtggcagccccagctgcagcagctacgtgacatgggcatccaggacgatgagctgagcctgcgggccctgcaggccaccggtggggacatccaagcagccctggagctcatctttgctggaggagccccatgaactccctgcttcccctgaacccccagcaagttgcagaggctactgcccttgggaggcactcatgaaggtgcctccatctctcccttccccaatatacctgatggtcaactctc

SEQ ID NO: 33648 - DNA, 2388 bp, Homo sapiens
  source 1..2388: mol_type = unassigned DNA
agagcggccacccagggatcggcgctatctgcacagcggttacagtctcggaaaggcctggcttcttcgtggctttgtggagatcccttacagcggccatttgattagcacccgaagagattcaaaggaagcagttgttccgtccccaacatatttccgtttcaaaccacccacttccggtttttcagccggttccggtcccgcccttcacttccggtcgctttcggtctctcagcggccggtttctgcgtccgctgccgcaggttccaccgcgctccaggtatttttttttctgaaggaaagctgcttcctcatatgtttcaagaatggctctccctatcattgtaaaatggggtggacaggagtattcagtgaccacactttcagaagatgatactgtgctcgatctcaaacagtttctcaagacccttacaggagttcttccagaacgccaaaagttacttggactcaaagttaaaggcaaacctgcagaaaatgatgttaagcttggagctctcaaactgaaaccaaatactaaaatcatgatgatgggaactcgtgaggagagcttggaagatgtcttaggtccaccccctgacaatgatgatgttgttaatgactttgatattgaagatgaagtagttgaagtagaaaatagggaagaaaacctactgaaaatttctcgcagagtgaaagagtacaaagtggaaattttgaatcctcccagggaagggaaaaagcttttggtgctagatgttgattatacattatttgaccacaggtcttgtgcagagactggggtagaattaatgcggccatatcttcatgaatttctaacatctgcctatgaagattatgacattgttatttggtctgcaacaaatatgaagtggattgaagctaaaatgaaagagctgggagtgagcacaaatgcaaattataagattactttcatgttggatagtgctgctatgataacagtacatactccaaggagaggattaatagacgtaaagcctcttggtgttatatggggaaagttttcggagttttacagcaagaaaaacaccattatgtttgatgacatagggagaaattttctaatgaacccacagaatggactaaagataaggccttttatgaaagcgcacctaaatcgtgataaagacaaagaacttttaaaattaactcagtacctcaaggagatagcaaaattagatgactttttggatctaaatcacaaatattgggaaagatatctctcaaagaagcaaggacagtagttacaagttatactggcagttattgaagatacttaagatccaagaacttcttgcttttatgctagaaatcattatgatagtgctggacactgaagcaaataccatactgcttatacttggtcttccagttttttgtaaatttaattttatattttttgaagatgatagcaatatgctaaaaaatgcttgtcccctatatgaatattctgttacgcttgaaaaatattttctccagcgttggttactgaccaccccaccctcccaccacacacacacacacacacacacacacacacacacacacacacacacaaagtggagaaaaatgtatactcaacaatgtcattttgtgactttggaaacaagttatgttttgtgtttttgtctcattgtgttattgtctgactaaatctaaaaccaaacccatgttgaaactagtacttttccctttaaaaacaaaccaaaaaaaaaaacaaaaaaaaactttttaattaaagaacctagtttgctatgcttaaaattaccaagaattttttatttctttgtcatagacacaatttctcttctgtatgccactagttacatttctaaattctgagcggtctcagttaggcctgtatgtgtgtacatgtccaagtaaagctggaaaatgtcagtcttgacacagctgtgtcttagtatgagaaacagaagactgaagaataaaaactaaggaacaagaatgagtctctttttggtggctaagtagaatcttcctaaaaccattgtcataaaagcagttaaaggcaataaatttttaaaagggacatatcactgattcattcctaaaaagcatgaacaaaaagtttttgttctgttccagctatatcttgtctaagtgctaacactgtttcagtgaaaatatctagccataagattaaaaaaatatattatttgcaatgcttaagcctgcagatacgtaatgtgaccactgttttgtgttgacaatattgctttatacagttcttgtatttgaaaggaattgatccttttaaagaaacatggtgtatattgttcttacaggactaatttcagtggtgtaaataataaatatcttttcttaaaa

SEQ ID NO: 33649 - DNA, 2662 bp, Homo sapiens
  source 1..2662: mol_type = unassigned DNA
ccccacccgcttccggccgcggctcggttctcccgcctccgcctccgccgcggctcgtggttgtcccgccatggcactgtcgcgggggctgccccgggagctggctgaggcggtggccgggggccgggtgctggtggtgggggcgggcggcatcggctgcgagctcctcaagaatctcgtgctcaccggtttctcccacatcgacctgattgatctggatactattgatgtaagcaacctcaacagacagtttttgtttcaaaagaaacatgttggaagatcaaaggcacaggttgccaaggaaagtgtactgcagttttacccgaaagctaatatcgttgcctaccatgacagcatcatgaaccctgactataatgtggaatttttccgacagtttatactggttatgaatgctttagataacagagctgcccgaaaccatgttaatagaatgtgcctggcagctgatgttcctcttattgaaagtggaacagctgggtatcttggacaagtaactactatcaaaaagggtgtgaccgagtgttatgagtgtcatcctaagccgacccagagaacctttcctggctgtacaattcgtaacacaccttcagaacctatacattgcatcgtttgggcaaagtacttgttcaaccagttgtttggggaagaagatgctgatcaagaagtatctcctgacagagctgaccctgaagctgcctgggaaccaacggaagccgaagccagagctagagcatctaatgaagatggtgacattaaacgtatttctactaaggaatgggctaaatcaactggatatgatccagttaaactttttaccaagctttttaaagatgacatcaggtatctgttgacaatggacaaactatggcggaaaaggaaacctccagttccgttggactgggctgaagtacaaagtcaaggagaagaaacgaatgcatcagatcaacagaatgaaccccagttaggcctgaaagaccagcaggttctagatgtaaagagctatgcacgtcttttttcaaagagcatcgagactttgagagttcatttagcagaaaagggggatggagctgagctcatatgggataaggatgacccatctgcaatggattttgtcacctctgctgcaaacctcaggatgcatattttcagtatgaatatgaagagtagatttgatatcaaatcaatggcagggaacattattcctgctattgctactactaatgcagtaattgctgggttgatagtattggaaggattgaagattttatcaggaaaaatagaccagtgcagaacaatttttttgaataaacaaccaaacccaagaaagaagcttcttgtgccttgtgcactggatcctcccaaccccaattgttatgtatgtgccagcaagccagaggtgactgtgcggctgaatgtccataaagtgactgttctcaccttacaagacaagatagtgaaagaaaaatttgctatggtagcaccagatgtccaaattgaagatgggaaaggaacaatcctaatatcttccgaagagggagagacggaagctaataatcacaagaagttgtcagaatttggaattagaaatggcagccggcttcaagcagatgacttcctccaggactatactttattgatcaacatccttcatagtgaagacctaggaaaggacgttgaatttgaagttgttggtgatgccccggaaaaagtggggcccaaacaagctgaagatgctgccaaaagcataaccaatggcagtgatgatggagctcagccctccacctccacagctcaagagcaagatgacgttctcatagttgattcagatgaagaagattcttcaaataatgccgacgtcagtgaagaagagagaagccgcaagaggaaattagatgagaaagagaatctcagtgcaaagaggtcacgtatagaacagaaggaagagcttgatgatgtcatagcattagattgaacagaaatgcctctaaacagaaccctcttactatttagtttatctgggcagaaccagattgttatgtcctttgttccaaagggaaaaaattgacagcagtgacttgaaaatgattctgctccctttgaaagcattcattttgctagaactgttagacacattgcagtatgctgtattgaaagtaggaatatagttttaaaaaccctttgaacaaagtgtgtgcataaccagtcatgagataaaacaacacaatgcatgttgcctttttaatgtaaatacccgtaggtatcattaatagtttcaaaatattgtggtttagtaaagttgatacctggttataaatattatgcctttatttttggctagaagaagaattatttttagcctagatctaaccattttcatactcttaactgattgaaacagattcaaagaagtatcgagtgctatgcattgaaacttgtttttaaatgttagatggcactatgtatattaatgtaaaacaatgttaatttactcaagttttcagtttgtaccgcctggtatgtctgtgtaagaagccaatttttgtgtattgttacagtttcaggttatttatattcgatgttttgtaaaactcaaataacgactatacttatggaccaaataaatggcatctgcattcttgtt

SEQ ID NO: 33650 - DNA, 2802 bp, Homo sapiens
  source 1..2802: mol_type = unassigned DNA
aaaacaaattcccggctgttaggagatgcgggagaggattgagtccctcgcggatgttgtgactttaattttgaggtccctgtcgtaactccgaagtaacgacgcggggcggaggatggcaatgatagcgaccaacgcgtcccgagcgctggtcacgagcgggtttacacacggaacgcgcaccatcttcataccacccgaggagtgcaaacgctatttccaccctgctttatttttaacagatgaggaaagggagacgcaatggggttgagtaacttaccctgggtcacggagcgagtggcagggctcccgcaggctgcgtgactgtcattgctctcacagtagacgattgatctggatactattgatgtaagcaacctcaacagacagtttttgtttcaaaagaaacatgttggaagatcaaaggcacaggttgccaaggaaagtgtactgcagttttacccgaaagctaatatcgttgcctaccatgacagcatcatgaaccctgactataatgtggaatttttccgacagtttatactggttatgaatgctttagataacagagctgcccgaaaccatgttaatagaatgtgcctggcagctgatgttcctcttattgaaagtggaacagctgggtatcttggacaagtaactactatcaaaaagggtgtgaccgagtgttatgagtgtcatcctaagccgacccagagaacctttcctggctgtacaattcgtaacacaccttcagaacctatacattgcatcgtttgggcaaagtacttgttcaaccagttgtttggggaagaagatgctgatcaagaagtatctcctgacagagctgaccctgaagctgcctgggaaccaacggaagccgaagccagagctagagcatctaatgaagatggtgacattaaacgtatttctactaaggaatgggctaaatcaactggatatgatccagttaaactttttaccaagctttttaaagatgacatcaggtatctgttgacaatggacaaactatggcggaaaaggaaacctccagttccgttggactgggctgaagtacaaagtcaaggagaagaaacgaatgcatcagatcaacagaatgaaccccagttaggcctgaaagaccagcaggttctagatgtaaagagctatgcacgtcttttttcaaagagcatcgagactttgagagttcatttagcagaaaagggggatggagctgagctcatatgggataaggatgacccatctgcaatggattttgtcacctctgctgcaaacctcaggatgcatattttcagtatgaatatgaagagtagatttgatatcaaatcaatggcagggaacattattcctgctattgctactactaatgcagtaattgctgggttgatagtattggaaggattgaagattttatcaggaaaaatagaccagtgcagaacaatttttttgaataaacaaccaaacccaagaaagaagcttcttgtgccttgtgcactggatcctcccaaccccaattgttatgtatgtgccagcaagccagaggtgactgtgcggctgaatgtccataaagtgactgttctcaccttacaagacaagatagtgaaagaaaaatttgctatggtagcaccagatgtccaaattgaagatgggaaaggaacaatcctaatatcttccgaagagggagagacggaagctaataatcacaagaagttgtcagaatttggaattagaaatggcagccggcttcaagcagatgacttcctccaggactatactttattgatcaacatccttcatagtgaagacctaggaaaggacgttgaatttgaagttgttggtgatgccccggaaaaagtggggcccaaacaagctgaagatgctgccaaaagcataaccaatggcagtgatgatggagctcagccctccacctccacagctcaagagcaagatgacgttctcatagttgattcagatgaagaagattcttcaaataatgccgacgtcagtgaagaagagagaagccgcaagaggaaattagatgagaaagagaatctcagtgcaaagaggtcacgtatagaacagaaggaagagcttgatgatgtcatagcattagattgaacagaaatgcctctaaacagaaccctcttactatttagtttatctgggcagaaccagattgttatgtcctttgttccaaagggaaaaaattgacagcagtgacttgaaaatgattctgctccctttgaaagcattcattttgctagaactgttagacacattgcagtatgctgtattgaaagtaggaatatagttttaaaaaccctttgaacaaagtgtgtgcataaccagtcatgagataaaacaacacaatgcatgttgcctttttaatgtaaatacccgtaggtatcattaatagtttcaaaatattgtggtttagtaaagttgatacctggttataaatattatgcctttatttttggctagaagaagaattatttttagcctagatctaaccattttcatactcttaactgattgaaacagattcaaagaagtatcgagtgctatgcattgaaacttgtttttaaatgttagatggcactatgtatattaatgtaaaacaatgttaatttactcaagttttcagtttgtaccgcctggtatgtctgtgtaagaagccaatttttgtgtattgttacagtttcaggttatttatattcgatgttttgtaaaactcaaataacgactatacttatggaccaaataaatggcatctgcattcttgtt

SEQ ID NO: 33651 - DNA, 1459 bp, Homo sapiens
  source 1..1459: mol_type = unassigned DNA
cttcccccacccgcttccggccgcggctcggttctcccgcctccgcctccgccgcggctcgtggttgtcccgccatggcactgtcgcgggggctgccccgggagctggctgaggcggtggccgggggccgggtgctggtggtgggggcgggcggcatcggctgcgagctcctcaagaatctcgtgctcaccggtttctcccacatcgacctgctgcccgaaaccatgttaatagaatgtgcctggcagctgatgttcctcttattgaaagtggaacagctgggtatcttggacaagtaactactatcaaaaagggtgtgaccgagtgttatgagtgtcatcctaagccgacccagagaacctttcctggctgtacaattcgtaacacaccttcagaacctatacattgcatcgtttgggcaaagtacttgttcaaccagttgtttggggaagaagatgctgatcaagaagtatctcctgacagagctgaccctgaagctgcctgggaaccaacggaagccgaagccagagctagagcatctaatgaagatggtgacattaaacgtatttctactaaggaatgggctaaatcaactggatatgatccagttaaactttttaccaagctttttaaagatgacatcaggtatctgttgacaatggacaaactatggcggaaaaggaaacctccagttccgttggactgggctgaagtacaaagtcaaggagaagaaacgaatgcatcagatcaacagaatgaaccccagttaggcctgaaagaccagcaggttctagatgtaaagagctatgcacgtcttttttcaaagagcatcgagactttgagagttcatttagcagaaaagggggatggagctgagctcatatgggataaggatgacccatctgcaatggattttgtcacctctgctgcaaacctcaggatgcatattttcagtatgaatatgaagagtagatttgatatcaaatcaatggcagggaacattattcctgctattgctactactaatgcagtaattgctgggttgatagtattggaaggattgaagattttatcaggaaaaatagaccagtgcagaacagatttttttgaataaacaaccaaacccaagaaagaagcttcttgtgccttgtgcactggatcctcccaaccccaattgttatgtatgtgccagcaagccagaggtgactgtgcggctgaatgtccataaagtgactgttctcaccttacaagacaagatagtgaaagaaaaatttgctatggtagcaccagatgtccaaattgaagatgggaaaggaacaatcctaatatcttccgaagagggagagacggaagctaataatcacaagaagttgtcagaatttggaattagaaatggcagccggcttcaagcagatgacttcctccaggactatactttattgatcaacatccttcatag

SEQ ID NO: 33652 - DNA, 2850 bp, Homo sapiens
  source 1..2850: mol_type = unassigned DNA
gaggtgataagatagcatctgctgtggccaggcatccctgacacctgacaagaaagtaaagccaaaagtcagctgaagataatggccatggagatgtctgtggagagccgtaaaagccaatcatggctgagatgcctgcagaatctctgcccatgagaactctgaggcctcctttcctttggctgtggtaagccctctgggaaaagagcagctacccaccaccagccgcttgatggcattgaaacgaatgggaattgtaagcgactatgagaaaatccgtacctttgccgtagcaatagtaggtgttggtggagtaggtagtgtgactgctgaaatgctgacaagatgtggcattggtaagttgctactctttgattatgacaaggtggaactagccaatatgaatagacttttcttccaacctcatcaagcaggattaagtaaagttcaagcagcagaacatactctgaggaacattaatcctgatgttctttttgaagtacacaactataatataaccacagtggaaaactttcaacatttcatggatagaataagtaatggtgggttagaagaaggaaaacctgttgatctagttcttagctgtgtggacaattttgaagctcgaatgacaataaatacagcttgtaatgaacttggacaaacatggatggaatctggggtcagtgaaaatgcagtttcagggcatatacagcttataattcctggagaatctgcttgttttgcgtgtgctccaccacttgtagttgctgcaaatattgatgaaaagactctgaaacgagaaggtgtttgtgcagccagtcttcctaccactatgggtgtggttgctgggatcttagtacaaaacgtgttaaagtttctgttaaattttggtactgttagtttttaccttggatacaatgcaatgcaggatttttttcctactatgtccatgaagccaaatcctcagtgtgatgacagaaattgcaggaagcagcaggaggaatataagaaaaaggtagcagcactgcctaaacaagaggttatacaagaagaggaagagataatccatgaagataatgaatggggtattgagctggtatctgaggtttcagaagaggaactgaaaaatttttcaggtccagttccagacttacctgaaggaattacagtggcatacacaattccaaaaaagcaagaagattctgtcactgagttaacagtggaagattctggtgaaagcttggaagacctcatggccaaaatgaagaatatgtagataatggactgggatatattgtatttctcatgttaaagcctcttcccttgaaattaaaaaaaaattttaactgataaaacttagggcaacattaattaatgtatattcttacctgaattgttatactttttgaaaatcctgtgacttgcctgtttctccccgctccaacgaaatcattaactctcctaaaatgtgtttcattctagtaagaaaacctcaaaggatattgtaggatataaatcttacttgaaaacatagctgttgaaatgttttggccttttggagtgggggaaggacaaatctgatcctgtaatctttttctttccagtaatcccttgtgtctgttgcatgaggacatggacaataaagtagtatatgatcctcagatacagggagaaggacaaggcatacagcttattgattagagctggcaagcatctgctcattatgtttggaattgctttctataagaaaattgcccactactactaacttgatcaacaatgaattcaaaatagttaacctatgaaataacatcctctcaaatgtttgctgatgaagtacaagttgaaatgtagttattggaaaagtctgtaacctgtggatcatatatattcaaagtgagacaaaggcaaataaaaagcagctattttcatgaatagacaaagttgatttcaggaagtataaattatattctgcaccgaacaaggaacagaaattattgcatctgtggaacatatatctggagttactatactttactgaagagcaaggcataaatttagactaaaatccatccagattacactcattctttaggctactcctggatacttcatttaaatttgattttcgaggtagtgagatgtcggcaaggtttgtcctgtatattaggaataaaggaaaagttctaaactgcctctgcaatgacttgtagtcagtggaagagtatcactttcccctgatcatgaccactaaactgtaaattgatataaattagttttctctcgagttacacccaagtaatgaagacttaagagaaccttggttgaaataaatttccaatagtttggagactcataaataccatgcaggtgtaaccactgccaataggctgtttctatgcttatttcctattttgatttttactttgaagataggaatatctaaattatatctctagggagaaaatgttgtaaaaaattaaaagtacatccctgattgtaaaataaagttcaaaaaactgatttcagaaagtctcaactaccaaatgttttcaatatattagttttgagatgctaggattatactgtgattcttatgtttatagtaaagtctggaaagcagaaggatagtttttttagcctggaaacttatttatgttgccttggtgagtcttctatcattttttaaaaatttagcttattgaactgtaaaatagcttttctagtatgagagatgttttgaatttaaaaaatgaaatgcagtttttcaaaaataaatttcctttggaaattcttgcatatcaatttagtaaggttttataaaattttacaatttgataaagtatc

SEQ ID NO: 33653 - DNA, 3705 bp, Homo sapiens
  source 1..3705: mol_type = unassigned DNA
atgcctgtagggtgcgtccactgactgcaggaaaagcaatcagggtgggagaaacttaggaaaccacccagggccaaaggaaggaaaactcaatgtacaaatttttttccgctggaggcaaaggctgacatccatacctgtactgggcaatggtcagcgtagcctcacgttcggccccaaagccagacaagtgctggtttaggtaggcctccagggacttgctgtcgaacttgtgctggggcagcacttcggccaaatcggactcgccagtagcacctggcttcatgatcacccccgcaggccacagcaacgcggcatccacaggtctcgagtgccgaagtccttcaggattggggcaacgtcccctctagagcatgggccgaggccggggtggggtctggctccagccaaccgcacacagcctacgcgccgttgctgagcaacgcttgcccgctgaatcccgaggttttagctctagtcaagtgccaaaagagcccaatgtgtgttcgggtttcaattctccagtcagcgtcagagttggaggcctcaattttaaagaaggcaaagccatggtcatcgttgcgggtaaggaacaacgcagaagcctcttccacccccaaatttaatgcaacagcaggcggaagacctgcagggtcccgttcagaaaaagggccgtcagactgtcgagcctaagaataaaaagaccctgtttctcttagatacccggttagcaaggcaacatcgctggcctcctgccctggacacttatcaccccggtgctgctgcggccgggtttagccggcccagcgaggaaggaagccgaaagagccaggtttttgatgagggggagcgatgtctgcgacgcaccggaagcggctccgaggaaggcctgtgggagtctcggagacgtgtctgtctgtgaggcgctgggtgcacgtccccagggctctgggctaggaaggcagcggcgaggtgcctccccacgtacccctcgcgggcccagccgagcaacgtggggcgaaggcggcggcgaaggcccgggctgggagcgttggcggccggagtcccagccatggcggagtctgtggagcgcctgcagcagcgggtccaggagctggagcgggaacttgcccaggagaggagtctgcaggtcccgaggagcggcgacggagggggcggccgggtccgcatcgagaagatgagctcagaggtggtggattcgaatccctacagccgcttgatggcattgaaacgaatgggaattgtaagcgactatgagaaaatccgtacctttgccgtagcaatagtaggtgttggtggagtaggtagtgtgactgctgaaatgctgacaagatgtggcattggtaagttgctactctttgattatgacaaggtggaactagccaatatgaatagacttttcttccaacctcatcaagcaggattaagtaaagttcaagcagcagaacatactctgaggaacattaatcctgatgttctttttgaagtacacaactataatataaccacagtggaaaactttcaacatttcatggatagaataagtaatggtgggttagaagaaggaaaacctgttgatctagttcttagctgtgtggacaattttgaagctcgaatgacaataaatacagcttgtaatgaacttggacaaacatggatggaatctggggtcagtgaaaatgcagtttcagggcatatacagcttataattcctggagaatctgcttgttttgcgtgtgctccaccacttgtagttgctgcaaatattgatgaaaagactctgaaacgagaaggtgtttgtgcagccagtcttcctaccactatgggtgtggttgctgggatcttagtacaaaacgtgttaaagtttctgttaaattttggtactgttagtttttaccttggatacaatgcaatgcaggatttttttcctactatgtccatgaagccaaatcctcagtgtgatgacagaaattgcaggaagcagcaggaggaatataagaaaaaggtagcagcactgcctaaacaagaggttatacaagaagaggaagagataatccatgaagataatgaatggggtattgagctggtatctgaggtttcagaagaggaactgaaaaatttttcaggtccagttccagacttacctgaaggaattacagtggcatacacaattccaaaaaagcaagaagattctgtcactgagttaacagtggaagattctggtgaaagcttggaagacctcatggccaaaatgaagaatatgtagataatggactgggatatattgtatttctcatgttaaagcctcttcccttgaaattaaaaaaaaattttaactgataaaacttagggcaacattaattaatgtatattcttacctgaattgttatactttttgaaaatcctgtgacttgcctgtttctccccgctccaacgaaatcattaactctcctaaaatgtgtttcattctagtaagaaaacctcaaaggatattgtaggatataaatcttacttgaaaacatagctgttgaaatgttttggccttttggagtgggggaaggacaaatctgatcctgtaatctttttctttccagtaatcccttgtgtctgttgcatgaggacatggacaataaagtagtatatgatcctcagatacagggagaaggacaaggcatacagcttattgattagagctggcaagcatctgctcattatgtttggaattgctttctataagaaaattgcccactactactaacttgatcaacaatgaattcaaaatagttaacctatgaaataacatcctctcaaatgtttgctgatgaagtacaagttgaaatgtagttattggaaaagtctgtaacctgtggatcatatatattcaaagtgagacaaaggcaaataaaaagcagctattttcatgaatagacaaagttgatttcaggaagtataaattatattctgcaccgaacaaggaacagaaattattgcatctgtggaacatatatctggagttactatactttactgaagagcaaggcataaatttagactaaaatccatccagattacactcattctttaggctactcctggatacttcatttaaatttgattttcgaggtagtgagatgtcggcaaggtttgtcctgtatattaggaataaaggaaaagttctaaactgcctctgcaatgacttgtagtcagtggaagagtatcactttcccctgatcatgaccactaaactgtaaattgatataaattagttttctctcgagttacacccaagtaatgaagacttaagagaaccttggttgaaataaatttccaatagtttggagactcataaataccatgcaggtgtaaccactgccaataggctgtttctatgcttatttcctattttgatttttactttgaagataggaatatctaaattatatctctagggagaaaatgttgtaaaaaattaaaagtacatccctgattgtaaaataaagttcaaaaaactgatttcagaaagtctcaactaccaaatgttttcaatatattagttttgagatgctaggattatactgtgattcttatgtttatagtaaagtctggaaagcagaaggatagtttttttagcctggaaacttatttatgttgccttggtgagtcttctatcattttttaaaaatt

SEQ ID NO: 33654 - DNA, 3895 bp, Homo sapiens
  source 1..3895: mol_type = unassigned DNA
atcagagcagctggcagcgcggcgggcagcgtttgccgagcgggcgctccgggtcgcacgcaagtccgcgcggggtccgggccacgcacgcggtttcatcgccatccccagccgggccacgcgcgcaggcagacaagctgttcgcggcgaccggagagcgccgacaccatgtggatccaggttcggaccatggacgggaggcagacccacacggtggactcgctgtccaggctgaccaaggtggaggagctgaggcggaagatccaggagctgttccacgtggagccaggcctgcagaggctgttctacaggggcaaacagatggaggacggccataccctcttcgactacgaggtccgcctgaatgacaccatccagctcctggtccgccagagcctcgtgctcccccacagcaccaaggagcgggactccgagctctccgacaccgactccggctgctgcctgggccagagtgagtcagacaagtcctccacccacggtgaggcggccgccgagactgacagcaggccagccgatgaggacatgtgggatgagacggaattggggctgtacaaggtcaatgagtacgtcgatgctcgggacacgaacatgggggcgtggtttgaggcgcaggtggtcagggtgacgcggaaggccccctcccgggacgagccctgcagctccacgtccaggccggcgctggaggaggacgtcatttaccacgtgaaatacgacgactacccggagaacggcgtggtccagatgaactccagggacgtccgagcgcgcgcccgcaccatcatcaagtggcaggacctggaggtgggccaggtggtcatgctcaactacaaccccgacaaccccaaggagcggggcttctggtacgacgcggagatctccaggaagcgcgagaccaggacggcgcgggaactctacgccaacgtggtgctgggggatgattctctgaacgactgtcggatcatcttcgtggacgaagtcttcaagattgagcggccgggtgaagggagccccatggttgacaaccccatgagacggaagagcgggccgtcctgcaagcactgcaaggacgacgtgaacagactctgccgggtctgcgcctgccacctgtgcgggggccggcaggaccccgacaagcagctcatgtgcgatgagtgcgacatggccttccacatctactgcctggacccgcccctcagcagtgttcccagcgaggacgagtggtactgccctgagtgccggaatgatgccagcgaggtggtactggcgggagagcggctgagagagagcaagaagaaggcgaagatggcctcggccacatcgtcctcacagcgggactggggcaagggcatggcctgtgtgggccgcaccaaggaatgtaccatcgtcccgtccaaccactacggacccatcccggggatccccgtgggcaccatgtggcggttccgagtccaggtcagcgagtcgggtgtccatcggccccacgtggctggcatacacggccggagcaacgacggagcgtactccctagtcctggcggggggctatgaggatgatgtggaccatgggaattttttcacatacacgggtagtggtggtcgagatctttccggcaacaagaggaccgcggaacagtcttgtgatcagaaactcaccaacaccaacagggcgctggctctcaactgctttgctcccatcaatgaccaagaaggggccgaggccaaggactggcggtcggggaagccggtcagggtggtgcgcaatgtcaagggtggcaagaatagcaagtacgcccccgctgagggcaaccgctacgatggcatctacaaggttgtgaaatactggcccgagaaggggaagtccgggtttctcgtgtggcgctaccttctgcggagggacgatgatgagcctggcccttggacgaaggaggggaaggaccggatcaagaagctggggctgaccatgcagtatccagaaggctacctggaagccctggccaaccgagagcgagagaaggagaacagcaagagggaggaggaggagcagcaggaggggggcttcgcgtcccccaggacgggcaagggcaagtggaagcggaagtcggcaggaggtggcccgagcagggcgggtccccgccggacatccaagaaaaccaaggtggagccctacagtctcacggcccagcagagcagcctcatcagagaggacaagagcaacgccaagctgtggaatgaggtcctggcgtcactcaaggaccggccggcgagcggcagcccgttccagttgttcctgagtaaagtggaggagacgttccagtgtatctgctgtcaggagctggtgttccggcccatcacgaccgtgtgccagcacaacgtgtgcaaggactgcctggacagatcctttcgggcacaggtgttcagctgccctgcctgccgctacgacctgggccgcagctatgccatgcaggtgaaccagcctctgcagaccgtcctcaaccagctcttccccggctacggcaatggccggtgatctccaagcacttctcgacaggcgttttgctgaaaacgtgtcggagggctcgttcatcggcactgattttgttcttagtgggcttaacttaaacaggtagtgtttcctccgttccctaaaaaggtttgtcttcctttttttttttatttttatttttcaaatctatacattttcaggaatttatgtattctggctaaaagttggacttctcagtattgtgtttagttctttgaaaacataaaagcctgcaatttctcgacaaaacaacacaagattttttaaagatggaatcagaaactacgtggtgtggaggctgttgatgtttctggtgtcaagttctcagaagttgctgccaccaactctttaagaaggcgacaggatcagtccttctctcgggttctggcccccaaggtcagagcaagcatcttcctgacagcattttgtcatctaaagtccagtgacatggttccccgtggtggcccgtggcagcccgtggcatggcgtggctcagctgtctgttgaagttgttgcaaggaaaagaggaaacatctcgggcctagttcaaacctttgcctcaaagccatcccccaccagactgcttagcgtctgagatccgcgtgaaaagtcctctgcccacgagagcagggagttggggccacgcagaaatggcctcaaggggactctgctccacgtggggccaggcgtgtgactgacgctgtccgacgaaggcggccacggacggacgccagcacacgaagtcacgtgcaagtgcctttgattcgttccttctttctaaagacgacagtctttgttgttagcactgaattattgaaaatgtcaaccagattctagaaactgcggtcatccagttcttcctgacaccggatgggtgcttgggaaccgtttgagccttatagatcatttacattcaatttttttaactcagcaagtgagaacttacaagagggtttttttaaaatttttttttctcttaatgaacacattttctaaatgaattttttttgtagttactgtatatgtaccaagaaagatataacgttagggtttggttgtttttgtttttgtattttttttcttttgaaagggtttgttaatttttctaattttaccaaagtttgcagcctatacctcaataaaacagggatattttaaatcacatacctgcagacaaactggagcaatgttatttttaaagggtttttttcacctccttattcttagattattaatgtattagggaagaatgagacaattttgtgtaggctttttctaaagtccagtactttgtccagattttagattctcagaataaatgtttttcacagat

SEQ ID NO: 33655 - DNA, 1856 bp, Homo sapiens
  source 1..1856: mol_type = unassigned DNA
atcagagcagctggcagcgcggcgggcagcgtttgccgagcgggcgctccgggtcgcacgcaagtccgcgcggggtccgggccacgcacgcggtttcatcgccatccccagccgggccacgcgcgcaggcagacaagctgttcgcggcgaccggagagcagtgttcccagcgaggacgagtggtactgccctgagtgccggaatgatgccagcgaggtggtactggcgggagagcggctgagagagagcaagaagaaggcgaagatggcctcggccacatcgtcctcacagcgggactggggcaagggcatggcctgtgtgggccgcaccaaggaatgtaccatcgtcccgtccaaccactacggacccatcccggggatccccgtgggcaccatgtggcggttccgagtccaggtcagcgagtcgggtgtccatcggccccacgtggctggcatacacggccggagcaacgacggagcgtactccctagtcctggcggggggctatgaggatgatgtggaccatgggaattttttcacatacacgggtagtggtggtcgagatctttccggcaacaagaggaccgcggaacagtcttgtgatcagaaactcaccaacaccaacagggcgctggctctcaactgctttgctcccatcaatgaccaagaaggggccgaggccaaggactggcggtcggggaagccggtcagggtggtgcgcaatgtcaagggtggcaagaatagcaagtacgcccccgctgagggcaaccgctacgatggcatctacaaggttgtgaaatactggcccgagaaggggaagtccgggtttctcgtgtggcgctaccttctgcggagggacgatgatgagcctggcccttggacgaaggaggggaaggaccggatcaagaagctggggctgaccatgcagtatccagaaggctacctggaagccctggccaaccgagagcgagagaaggagaacagcaagagggaggaggaggagcagcaggaggggggcttcgcgtcccccaggacgggcaagggcaagtggaagcggaagtcggcaggaggtggcccgagcagggcgggtccccgccggacatccaagaaaaccaaggtggagccctacagtctcacggcccagcagagcagcctcatcagagaggacaagagcaacgccaagctgtggaatgaggtcctggcgtcactcaaggaccggccggcgagcggcagcccgttccagttgttcctgagtaaagtggaggagacgttccagtgtatctgctgtcaggagctggtgttccggcccatcacgaccgtgtgccagcacaacgtgtgcaaggactgcctggacagatcctttcgggcacaggtgttcagctgccctgcctgccgctacgacctgggccgcagctatgccatgcaggtgaaccagcctctgcagaccgtcctcaaccagctcttccccggctacggcaatggccggtgatctccaagcacttctcgacaggcgttttgctgaaaacgtgtcggagggctcgttcatcggcactgattttgttcttagtgggcttaacttaaacaggtagtgtttcctccgttccctaaaaaggtttgtcttcctttttttttttatttttatttttcaaatctatacattttcaggaatttatgtattctggctaaaagttggacttctcagtattgtgtttagttctttgaaaacataaaagcctgcaatttctcgacaaaacaacacaagattttttaaagatggaatcagaaactacgtggtgtggaggctgttgatgtttctggtgtcaagttctcagaagttgctgccaccaactctttaag

SEQ ID NO: 33656 - DNA, 4059 bp, Homo sapiens
  source 1..4059: mol_type = unassigned DNA
ggccacttggcccgggcctcctttctcctctggtcgtggggaaggagggatgggttggaccttctgcttttctttcaattccctcttttcattctccttcctcctcaatcttcaacacttggctagtcgttaatgccttaagtgcttaatttgttgtgtctggtcctggccagggtctggctgtacaggaggactggaagggcatcctgggagtttcctggtgtccacaggccggacaaaagcaaccccgactccttagagcatggcatggctcagaggtgctggtaaaactgatgggggtttttgctgtccctcccctcagcgccgacaccatgtggatccaggttcggaccatggacgggaggcagacccacacggtggactcgctgtccaggctgaccaaggtggaggagctgaggcggaagatccaggagctgttccacgtggagccaggcctgcagaggctgttctacaggggcaaacagatggaggacggccataccctcttcgactacgaggtccgcctgaatgacaccatccagctcctggtccgccagagcctcgtgctcccccacagcaccaaggagcgggactccgagctctccgacaccgactccggctgctgcctgggccagagtgagtcagacaagtcctccacccacggtgaggcggccgccgagactgacagcaggccagccgatgaggacatgtgggatgagacggaattggggctgtacaaggtcaatgagtacgtcgatgctcgggacacgaacatgggggcgtggtttgaggcgcaggtggtcagggtgacgcggaaggccccctcccgggacgagccctgcagctccacgtccaggccggcgctggaggaggacgtcatttaccacgtgaaatacgacgactacccggagaacggcgtggtccagatgaactccagggacgtccgagcgcgcgcccgcaccatcatcaagtggcaggacctggaggtgggccaggtggtcatgctcaactacaaccccgacaaccccaaggagcggggcttctggtacgacgcggagatctccaggaagcgcgagaccaggacggcgcgggaactctacgccaacgtggtgctgggggatgattctctgaacgactgtcggatcatcttcgtggacgaagtcttcaagattgagcggccgggtgaagggagccccatggttgacaaccccatgagacggaagagcgggccgtcctgcaagcactgcaaggacgacgtgaacagactctgccgggtctgcgcctgccacctgtgcgggggccggcaggaccccgacaagcagctcatgtgcgatgagtgcgacatggccttccacatctactgcctggacccgcccctcagcagtgttcccagcgaggacgagtggtactgccctgagtgccggaatgatgccagcgaggtggtactggcgggagagcggctgagagagagcaagaagaaggcgaagatggcctcggccacatcgtcctcacagcgggactggggcaagggcatggcctgtgtgggccgcaccaaggaatgtaccatcgtcccgtccaaccactacggacccatcccggggatccccgtgggcaccatgtggcggttccgagtccaggtcagcgagtcgggtgtccatcggccccacgtggctggcatacacggccggagcaacgacggagcgtactccctagtcctggcggggggctatgaggatgatgtggaccatgggaattttttcacatacacgggtagtggtggtcgagatctttccggcaacaagaggaccgcggaacagtcttgtgatcagaaactcaccaacaccaacagggcgctggctctcaactgctttgctcccatcaatgaccaagaaggggccgaggccaaggactggcggtcggggaagccggtcagggtggtgcgcaatgtcaagggtggcaagaatagcaagtacgcccccgctgagggcaaccgctacgatggcatctacaaggttgtgaaatactggcccgagaaggggaagtccgggtttctcgtgtggcgctaccttctgcggagggacgatgatgagcctggcccttggacgaaggaggggaaggaccggatcaagaagctggggctgaccatgcagtatccagaaggctacctggaagccctggccaaccgagagcgagagaaggagaacagcaagagggaggaggaggagcagcaggaggggggcttcgcgtcccccaggacgggcaagggcaagtggaagcggaagtcggcaggaggtggcccgagcagggcgggtccccgccggacatccaagaaaaccaaggtggagccctacagtctcacggcccagcagagcagcctcatcagagaggacaagagcaacgccaagctgtggaatgaggtcctggcgtcactcaaggaccggccggcgagcggcagcccgttccagttgttcctgagtaaagtggaggagacgttccagtgtatctgctgtcaggagctggtgttccggcccatcacgaccgtgtgccagcacaacgtgtgcaaggactgcctggacagatcctttcgggcacaggtgttcagctgccctgcctgccgctacgacctgggccgcagctatgccatgcaggtgaaccagcctctgcagaccgtcctcaaccagctcttccccggctacggcaatggccggtgatctccaagcacttctcgacaggcgttttgctgaaaacgtgtcggagggctcgttcatcggcactgattttgttcttagtgggcttaacttaaacaggtagtgtttcctccgttccctaaaaaggtttgtcttcctttttttttttatttttatttttcaaatctatacattttcaggaatttatgtattctggctaaaagttggacttctcagtattgtgtttagttctttgaaaacataaaagcctgcaatttctcgacaaaacaacacaagattttttaaagatggaatcagaaactacgtggtgtggaggctgttgatgtttctggtgtcaagttctcagaagttgctgccaccaactctttaagaaggcgacaggatcagtccttctctcgggttctggcccccaaggtcagagcaagcatcttcctgacagcattttgtcatctaaagtccagtgacatggttccccgtggtggcccgtggcagcccgtggcatggcgtggctcagctgtctgttgaagttgttgcaaggaaaagaggaaacatctcgggcctagttcaaacctttgcctcaaagccatcccccaccagactgcttagcgtctgagatccgcgtgaaaagtcctctgcccacgagagcagggagttggggccacgcagaaatggcctcaaggggactctgctccacgtggggccaggcgtgtgactgacgctgtccgacgaaggcggccacggacggacgccagcacacgaagtcacgtgcaagtgcctttgattcgttccttctttctaaagacgacagtctttgttgttagcactgaattattgaaaatgtcaaccagattctagaaactgcggtcatccagttcttcctgacaccggatgggtgcttgggaaccgtttgagccttatagatcatttacattcaatttttttaactcagcaagtgagaacttacaagagggtttttttaaaatttttttttctcttaatgaacacattttctaaatgaattttttttgtagttactgtatatgtaccaagaaagatataacgttagggtttggttgtttttgtttttgtattttttttcttttgaaagggtttgttaatttttctaattttaccaaagtttgcagcctatacctcaataaaacagggatattttaaatcacatacctgcagacaaactggagcaatgttatttttaaagggtttttttcacctccttattcttagattattaatgtattagggaagaatgagacaattttgtgtaggctttttctaaagtccagtactttgtccagattttagattctcagaataaatgtttttcacagat

SEQ ID NO: 33657 - DNA, 2614 bp, Homo sapiens
  source 1..2614: mol_type = unassigned DNA
agtgcgggagggacgccgagggtccagggtttggaggggcgcgagctgccgggggttggaggtcgagcgccgacaccatgtggatccaggttcggaccatggacgggaggcagacccacacggtggactcgctgtccaggctgaccaaggtggaggagctgaggcggaagatccaggagctgttccacgtggagccaggcctgcagaggctgttctacaggggcaaacagatggaggacggccataccctcttcgactacgaggtccgcctgaatgacaccatccagctcctggtccgccagagcctcgtgctcccccacagcaccaaggagcgggactccgagctctccgacaccgactccggctgctgcctgggccagagtgagtcagacaagtcctccacccacggtgaggcggccgccgagactgacagcaggccagccgatgaggacatgtgggatgagacggaattggggctgtacaaggtcaatgagtacgtcgatgctcgggacacgaacatgggggcgtggtttgaggcgcaggtggtcagggtgacgcggaaggccccctcccgggacgagccctgcagctccacgtccaggccggcgctggaggaggacgtcatttaccacgtgaaatacgacgactacccggagaacggcgtggtccagatgaactccagggacgtccgagcgcgcgcccgcaccatcatcaagtggcaggacctggaggtgggccaggtggtcatgctcaactacaaccccgacaaccccaaggagcggggcttctggtacgacgcggagatctccaggaagcgcgagaccaggacggcgcgggaactctacgccaacgtggtgctgggggatgattctctgaacgactgtcggatcatcttcgtggacgaagtcttcaagattgagcggccgggtgaagggagccccatggttgacaaccccatgagacggaagagcgggccgtcctgcaagcactgcaaggacgacgtgaacagactctgccgggtctgcgcctgccacctgtgcgggggccggcaggaccccgacaagcagctcatgtgcgatgagtgcgacatggccttccacatctactgcctggacccgcccctcagcagtgttcccagcgaggacgagtggtactgccctgagtgccggaatgatgccagcgaggtggtactggcgggagagcggctgagagagagcaagaagaaggcgaagatggcctcggccacatcgtcctcacagcgggactggggcaagggcatggcctgtgtgggccgcaccaaggaatgtaccatcgtcccgtccaaccactacggacccatcccggggatccccgtgggcaccatgtggcggttccgagtccaggtcagcgagtcgggtgtccatcggccccacgtggctggcatacacggccggagcaacgacggagcgtactccctagtcctggcggggggctatgaggatgatgtggaccatgggaattttttcacatacacgggtagtggtggtcgagatctttccggcaacaagaggaccgcggaacagtcttgtgatcagaaactcaccaacaccaacagggcgctggctctcaactgctttgctcccatcaatgaccaagaaggggccgaggccaaggactggcggtcggggaagccggtcagggtggtgcgcaatgtcaagggtggcaagaatagcaagtacgcccccgctgagggcaaccgctacgatggcatctacaaggttgtgaaatactggcccgagaaggggaagtccgggtttctcgtgtggcgctaccttctgcggagggacgatgatgagcctggcccttggacgaaggaggggaaggaccggatcaagaagctggggctgaccatgcagtatccagaaggctacctggaagccctggccaaccgagagcgagagaaggagaacagcaagagggaggaggaggagcagcaggaggggggcttcgcgtcccccaggacgggcaagggcaagtggaagcggaagtcggcaggaggtggcccgagcagggcgggtccccgccggacatccaagaaaaccaaggtggagccctacagtctcacggcccagcagagcagcctcatcagagaggacaagagcaacgccaagctgtggaatgaggtcctggcgtcactcaaggaccggccggcgagcggcagcccgttccagttgttcctgagtaaagtggaggagacgttccagtgtatctgctgtcaggagctggtgttccggcccatcacgaccgtgtgccagcacaacgtgtgcaaggactgcctggacagatcctttcgggcacaggtgttcagctgccctgcctgccgctacgacctgggccgcagctatgccatgcaggtgaaccagcctctgcagaccgtcctcaaccagctcttccccggctacggcaatggccggtgatctccaagcacttctcgacaggcgttttgctgaaaacgtgtcggagggctcgttcatcggcactgattttgttcttagtgggcttaacttaaacaggtagtgtttcctccgttccctaaaaaggtttgtcttcctttttttttttatttttatttttc

SEQ ID NO: 33658 - DNA, 2660 bp, Homo sapiens
  source 1..2660: mol_type = unassigned DNA
gaggggtcccggggtccgcggatctcgggtggggtttttccctctcagtggcacttggttgagttcccccgggacttctgaagttccggcccgcgctggacttctgggattccctcttcccgccgacaccatgtggatccaggttcggaccatggacgggaggcagacccacacggtggactcgctgtccaggctgaccaaggtggaggagctgaggcggaagatccaggagctgttccacgtggagccaggcctgcagaggctgttctacaggggcaaacagatggaggacggccataccctcttcgactacgaggtccgcctgaatgacaccatccagctcctggtccgccagagcctcgtgctcccccacagcaccaaggagcgggactccgagctctccgacaccgactccggctgctgcctgggccagagtgagtcagacaagtcctccacccacggtgaggcggccgccgagactgacagcaggccagccgatgaggacatgtgggatgagacggaattggggctgtacaaggtcaatgagtacgtcgatgctcgggacacgaacatgggggcgtggtttgaggcgcaggtggtcagggtgacgcggaaggccccctcccgggacgagccctgcagctccacgtccaggccggcgctggaggaggacgtcatttaccacgtgaaatacgacgactacccggagaacggcgtggtccagatgaactccagggacgtccgagcgcgcgcccgcaccatcatcaagtggcaggacctggaggtgggccaggtggtcatgctcaactacaaccccgacaaccccaaggagcggggcttctggtacgacgcggagatctccaggaagcgcgagaccaggacggcgcgggaactctacgccaacgtggtgctgggggatgattctctgaacgactgtcggatcatcttcgtggacgaagtcttcaagattgagcggccgggtgaagggagccccatggttgacaaccccatgagacggaagagcgggccgtcctgcaagcactgcaaggacgacgtgaacagactctgccgggtctgcgcctgccacctgtgcgggggccggcaggaccccgacaagcagctcatgtgcgatgagtgcgacatggccttccacatctactgcctggacccgcccctcagcagtgttcccagcgaggacgagtggtactgccctgagtgccggaatgatgccagcgaggtggtactggcgggagagcggctgagagagagcaagaagaaggcgaagatggcctcggccacatcgtcctcacagcgggactggggcaagggcatggcctgtgtgggccgcaccaaggaatgtaccatcgtcccgtccaaccactacggacccatcccggggatccccgtgggcaccatgtggcggttccgagtccaggtcagcgagtcgggtgtccatcggccccacgtggctggcatacacggccggagcaacgacggagcgtactccctagtcctggcggggggctatgaggatgatgtggaccatgggaattttttcacatacacgggtagtggtggtcgagatctttccggcaacaagaggaccgcggaacagtcttgtgatcagaaactcaccaacaccaacagggcgctggctctcaactgctttgctcccatcaatgaccaagaaggggccgaggccaaggactggcggtcggggaagccggtcagggtggtgcgcaatgtcaagggtggcaagaatagcaagtacgcccccgctgagggcaaccgctacgatggcatctacaaggttgtgaaatactggcccgagaaggggaagtccgggtttctcgtgtggcgctaccttctgcggagggacgatgatgagcctggcccttggacgaaggaggggaaggaccggatcaagaagctggggctgaccatgcagtatccagaaggctacctggaagccctggccaaccgagagcgagagaaggagaacagcaagagggaggaggaggagcagcaggaggggggcttcgcgtcccccaggacgggcaagggcaagtggaagcggaagtcggcaggaggtggcccgagcagggcgggtccccgccggacatccaagaaaaccaaggtggagccctacagtctcacggcccagcagagcagcctcatcagagaggacaagagcaacgccaagctgtggaatgaggtcctggcgtcactcaaggaccggccggcgagcggcagcccgttccagttgttcctgagtaaagtggaggagacgttccagtgtatctgctgtcaggagctggtgttccggcccatcacgaccgtgtgccagcacaacgtgtgcaaggactgcctggacagatcctttcgggcacaggtgttcagctgccctgcctgccgctacgacctgggccgcagctatgccatgcaggtgaaccagcctctgcagaccgtcctcaaccagctcttccccggctacggcaatggccggtgatctccaagcacttctcgacaggcgttttgctgaaaacgtgtcggagggctcgttcatcggcactgattttgttcttagtgggcttaacttaaacaggtagtgtttcctccgttccctaaaaaggtttgtcttcctttttttttttattttt

SEQ ID NO: 33659 - DNA, 4325 bp, Homo sapiens
  source 1..4325: mol_type = unassigned DNA
gctcatcgtttgttgtttagataatatcatgaactgataaatgcagttgccacgttgattccctagggcctggcttaccgactgaggtcataagatattatgccttctctttagacttggtcagtggagaggaaatgggcaaagaaccagcctatggaggtgacaaggccttagggccaaaagtcttgagggtgaaggtttagggcctgcgcagcttccctgccatgccccgcaaggtctcgcattcgcaaggcttgtgacagtgggagcctcattacggactctcctaaagtccatggtgtcctcttttcgcatttgcgccccgtgggtgatgcccgatgccgcccttcccatcgctctcttccccttcaagcgtatcgcaactgcaaaaacacccagcacagacactccattttctatcttaatgcatttaactagcacaacctacaggttgttccatcccagagactacccttttctccatagacgtgaccatcaaccaaccagcggtcagaatcagtcagcctctgtcatgttcctaggtccttggcgaactggctgggcggggtcccagcagcctaggagtacagtggagcaatgcctgacgtaagtcaacaaagatcacgtgagacgaatcagtcgcctagattggctacaactaagtggttgggagcggggaggtcgcggcggctgcgtggggttcgcccgtgacacaattacaactttgtgctggtgctggcaaagtttgtgattttaagaaattctgctgtgctctccagcactgcgagcttctgccttccctgtagtttcccagatgtgatccaggtagccgagttccgctgcccgtgcttcggtagcttaagtctttgcctcagcttttttccttgcagccgctgaggaggcgataaaattggcgtcacagtctcaagcagcgattgaaggcgtcttttcaactactcgattaaggttgggtatcgtcgtgggacttggaaatttgttgtttccatgaaatcctgcgcagtgtcgctcactaccgccgctgttgccttcggtgatgaggcaaagaaaatggcggaaggaaaagcgagccgcgagagtgaagaggagtctgttagcctgacagtcgaggaaagggaggcgcttggtggcatggacagccgtctcttcgggttcgtgaggcttcatgaagatggcgccagaacgaagaccctactaggcaaggctgttcgctgctacgaatctttaatcttaaaagctgaaggaaaagtggagtctgacttcttttgccaattaggtcacttcaacctcttgttggaagattattcaaaagcattatctgcatatcagagatattacagtttacaggctgactactggaagaatgctgcgtttttatatggccttggtttggtctacttctactacaatgcatttcattgggcaattaaagcatttcaagatgtcctttatgttgaccccagcttttgtcgagccaaggaaattcatttacgacttgggctcatgttcaaagtgaacacagactacaagtctagtttaaagcattttcagttagccttgattgactgtaatccatgtactttgtccaatgctgaaattcaatttcatattgcccatttgtatgaaacccagaggaagtatcattctgcaaaggaggcatatgaacaacttttgcagacagaaaaccttcctgcacaagtaaaagcaactgtattgcaacagttaggttggatgcatcataatatggatctagtaggagacaaagccacaaaggaaagctatgctattcagtatctccaaaagtctttggaggcagatcctaattctggccaatcgtggtattttcttggaaggtgttattcaagtattgggaaagttcaggatgcctttatatcttacaggcaatctattgataaatcagaagcaagtgcagatacatggtgttcaataggtgtgttgtatcagcagcaaaatcagcctatggatgctttacaggcatatatttgtgctgtacaattggaccatgggcatgccgcagcctggatggacctaggtactctctatgaatcctgcaatcaacctcaagatgccattaaatgctacctaaatgcagctagaagcaaacgttgtagtaatacctctacgcttgctgcaagaattaaatttctacagaatggttctgataactggaatggtggccagagtctttcacatcatccagtacagcaagtttattcgttgtgtttgacaccacagaaattacagcacttggaacaactgcgagcaaatagagataatttaaatccagcacagaagcatcagctggaacagttagaaagtcagtttgtcttaatgcagcaaatgagacacaaagaagttgctcaggtacgaactactggaattcataacggggccataactgattcatcactgcctacaaactctgtctctaatcgacaaccacatggtgctctgaccagagtatctagcgtctctcagcctggagttcgccctgcttgtgttgaaaaacttttgtccagtggagctttttctgcaggctgtattccttgtggcacatcaaaaattctaggaagtacagacactatcttgctaggcagtaattgtatagcaggaagtgaaagtaatggaaatgtgccttacctgcagcaaaatacacacactctacctcataatcatacagacctgaacagcagcacagaagagccatggagaaaacagctatctaactccgctcaggggcttcataaaagtcagagttcatgtttgtcaggacctaatgaagaacaacctctgttttccactgggtcagcccagtatcaccaggcaactagcactggtattaagaaggcgaatgaacatctcactctgcctagtaattcagtaccacagggggatgctgacagtcacctctcctgtcatactgctacctcaggtggacaacaaggcattatgtttaccaaagagagcaagccttcaaaaaatagatccttggtgcctgaaacaagcaggcatactggagacacatctaatggctgtgctgatgtcaagggactttctaatcatgttcatcagttgatagcagatgctgtttccagtcctaaccatggagattcaccaaatttattaattgcagacaatcctcagctctctgctttgttgattggaaaagccaatggcaatgtgggtactggaacctgtgacaaagtgaataatattcacccagctgttcatacaaagactgatcattctgttgcctcttcaccctcttcagccatttccacagcaacaccttctcctaaatccactgagcagagaagcataaacagtgttaccagccttaacagtcctcacagtggattacacacagtcaatggagaggggctggggaagtcacagagctctacaaaagtagacctgcctttagctagccacagatctacttctcagatcttaccatcaatgtcagtgtctatatgccccagttcaacagaagttctgaaagcatgcaggaatccaggtaaaaatggcttgtctaatagctgcattttgttagataaatgtccacctccaagaccaccaacttcaccatacccacccttgccaaaggacaagttgaatccacccacacctagtatttacttggaaaataaacgtgatgctttctttcctccattacatcaattttgtacaaatccaaaaaaccctgttacagtaatacgtggccttgctggagctcttaaattagatcttggacttttctctaccaaaactttggtagaagctaacaatgaacatatggtagaagtgaggacacagttgctgcaaccagcagatgaaaactgggatcccactggaacaaagaaaatctggcgttgtgaaagcaatagatctcatactacaattgccaaatacgcacaataccaggcttcctccttccaggaatcattgagagctggaatgcaatggtgtgatctcagctcactgcagcctccgcctcctgggttcaagcgattctcccacctcagcctcccgaatagctggaattacaggcacctgccatcatgcccaactaatttttgtatttttgtagagacagggtttcaccatgttggccaggcttgtcttgaactcctgacctcaggtggtctgcttgcctcagcatcccaaagtgctgggattacaggtgtgagccaccatgcccggtaaacttttaaaaatgtaagcaaaattacagtatgtaaaacacacattgctaatggagaaataaagttcctactttacatcta

SEQ ID NO: 33660 - DNA, 6529 bp, Homo sapiens
  source 1..6529: mol_type = unassigned DNA
tttgctcatcgtttgttgtttagataatatcatgaactgataaatgcagttgccacgttgattccctagggcctggcttaccgactgaggtcataagatattatgccttctctttagacttggtcagtggagaggaaatgggcaaagaaccagcctatggaggtgacaaggccttagggccaaaagtcttgagggtgaaggtttagggcctgcgcagcttccctgccatgccccgcaaggtctcgcattcgcaaggcttgtgacagtgggagcctcattacggactctcctaaagtccatggtgtcctcttttcgcatttgcgccccgtgggtgatgcccgatgccgcccttcccatcgctctcttccccttcaagcgtatcgcaactgcaaaaacacccagcacagacactccattttctatcttaatgcatttaactagcacaacctacaggttgttccatcccagagactacccttttctccatagacgtgaccatcaaccaaccagcggtcagaatcagtcagcctctgtcatgttcctaggtccttggcgaactggctgggcggggtcccagcagcctaggagtacagtggagcaatgcctgacgtaagtcaacaaagatcacgtgagacgaatcagtcgcctagattggctacaactaagtggttgggagcggggaggtcgcggcggctgcgtggggttcgcccgtgacacaattacaactttgtgctggtgctggcaaagtttgtgattttaagaaattctgctgtgctctccagcactgcgagcttctgccttccctgtagtttcccagatgtgatccaggtagccgagttccgctgcccgtgcttcggtagcttaagtctttgcctcagcttttttccttgcagccgctgaggaggcgataaaattggcgtcacagtctcaagcagcgattgaaggcgtcttttcaactactcgattaaggttgggtatcgtcgtgggacttggaaatttgttgtttccatgaaatcctgcgcagtgtcgctcactaccgccgctgttgccttcggtgatgaggcaaagaaaatggcggaaggaaaagcgagccgcgagagtgaagaggagtctgttagcctgacagtcgaggaaagggaggcgcttggtggcatggacagccgtctcttcgggttcgtgaggcttcatgaagatggcgccagaacgaagaccctactaggcaaggctgttcgctgctacgaatctttaatcttaaaagctgaaggaaaagtggagtctgacttcttttgccaattaggtcacttcaacctcttgttggaagattattcaaaagcattatctgcatatcagagatattacagtttacaggctgactactggaagaatgctgcgtttttatatggccttggtttggtctacttctactacaatgcatttcattgggcaattaaagcatttcaagatgtcctttatgttgaccccagcttttgtcgagccaaggaaattcatttacgacttgggctcatgttcaaagtgaacacagactacaagtctagtttaaagcattttcagttagccttgattgactgtaatccatgtactttgtccaatgctgaaattcaatttcatattgcccatttgtatgaaacccagaggaagtatcattctgcaaaggaggcatatgaacaacttttgcagacagaaaaccttcctgcacaagtaaaagcaactgtattgcaacagttaggttggatgcatcataatatggatctagtaggagacaaagccacaaaggaaagctatgctattcagtatctccaaaagtctttggaggcagatcctaattctggccaatcgtggtattttcttggaaggtgttattcaagtattgggaaagttcaggatgcctttatatcttacaggcaatctattgataaatcagaagcaagtgcagatacatggtgttcaataggtgtgttgtatcagcagcaaaatcagcctatggatgctttacaggcatatatttgtgctgtacaattggaccatgggcatgccgcagcctggatggacctaggtactctctatgaatcctgcaatcaacctcaagatgccattaaatgctacctaaatgcagctagaagcaaacgttgtagtaatacctctacgcttgctgcaagaattaaatttctacagaatggttctgataactggaatggtggccagagtctttcacatcatccagtacagcaagtttattcgttgtgtttgacaccacagaaattacagcacttggaacaactgcgagcaaatagagataatttaaatccagcacagaagcatcagctggaacagttagaaagtcagtttgtcttaatgcagcaaatgagacacaaagaagttgctcaggtacgaactactggaattcataacggggccataactgattcatcactgcctacaaactctgtctctaatcgacaaccacatggtgctctgaccagagtatctagcgtctctcagcctggagttcgccctgcttgtgttgaaaaacttttgtccagtggagctttttctgcaggctgtattccttgtggcacatcaaaaattctaggaagtacagacactatcttgctaggcagtaattgtatagcaggaagtgaaagtaatggaaatgtgccttacctgcagcaaaatacacacactctacctcataatcatacagacctgaacagcagcacagaagagccatggagaaaacagctatctaactccgctcaggggcttcataaaagtcagagttcatgtttgtcaggacctaatgaagaacaacctctgttttccactgggtcagcccagtatcaccaggcaactagcactggtattaagaaggcgaatgaacatctcactctgcctagtaattcagtaccacagggggatgctgacagtcacctctcctgtcatactgctacctcaggtggacaacaaggcattatgtttaccaaagagagcaagccttcaaaaaatagatccttggtgcctgaaacaagcaggcatactggagacacatctaatggctgtgctgatgtcaagggactttctaatcatgttcatcagttgatagcagatgctgtttccagtcctaaccatggagattcaccaaatttattaattgcagacaatcctcagctctctgctttgttgattggaaaagccaatggcaatgtgggtactggaacctgtgacaaagtgaataatattcacccagctgttcatacaaagactgatcattctgttgcctcttcaccctcttcagccatttccacagcaacaccttctcctaaatccactgagcagagaagcataaacagtgttaccagccttaacagtcctcacagtggattacacacagtcaatggagaggggctggggaagtcacagagctctacaaaagtagacctgcctttagctagccacagatctacttctcagatcttaccatcaatgtcagtgtctatatgccccagttcaacagaagttctgaaagcatgcaggaatccaggtaaaaatggcttgtctaatagctgcattttgttagataaatgtccacctccaagaccaccaacttcaccatacccacccttgccaaaggacaagttgaatccacccacacctagtatttacttggaaaataaacgtgatgctttctttcctccattacatcaattttgtacaaatccaaaaaaccctgttacagtaatacgtggccttgctggagctcttaaattagatcttggacttttctctaccaaaactttggtagaagctaacaatgaacatatggtagaagtgaggacacagttgctgcaaccagcagatgaaaactgggatcccactggaacaaagaaaatctggcgttgtgaaagcaatagatctcatactacaattgccaaatacgcacaataccaggcttcctccttccaggaatcattgagagaagaaaatgagaaaagaacacaacacaaagatcattcagataacgaatccacatcttcagagaattctggaaggagaaggaaaggaccttttaaaaccataaaatttgggaccaacattgacctctctgataacaaaaagtggaagttgcagttacatgaactgactaaacttcctgcttttgcgcgtgtggtgtcagcaggaaatcttctaacccatgttgggcataccattctgggcatgaatacagtacaactgtatatgaaagttccagggagtcggacaccaggtcaccaagaaaataacaacttctgctctgttaacataaatattggtccaggagattgtgaatggtttgttgtacctgaagattattggggtgttctgaatgacttctgtgaaaaaaataatttgaattttttaatgagttcttggtggcccaaccttgaagatctttatgaagcaaatgtccctgtgtatagatttattcagcgacctggagatttggtctggataaatgcaggcactgtgcattgggttcaagctgttggctggtgcaataacattgcctggaatgttggtccacttacagcctgccagtataaattggcagtggaacggtatgaatggaacaaattgaaaagtgtgaagtcaccagtacccatggtgcatctttcctggaatatggcacgaaatatcaaagtctcagatccaaagctttttgaaatgattaagtattgtcttttgaaaattctgaagcaatatcagacattgagagaagctcttgttgcagcaggaaaagaggttatatggcatgggcggacaaatgatgaaccagctcattactgtagcatttgtgaggtggaggtttttaatctgctttttgtcactaatgaaagcaatactcaaaaaacctacatagtacattgccatgattgtgcacgaaaaacaagcaaaagtttggaaaattttgtggtgctcgaacagtacaaaatggaggacctaatccaagtttatgatcaatttacactagctctttcattatcatcctcatcttgatatagttccatgaatattaaatgagattatttctgctcttcaggaaatttctgcaccactggttttgtagctgtttcataaaactgttgactaaaagctatgtctatgcaaccttccaagaatagtatgtcaagcaactggacacagtgctgcctctgcttcaggacttaacatgctgatccagctgtacttcagaaaaataatattaatcatatgttttgtgtacgtatgacaaactgtcaaagtgacacagaatactgatttgaagatagccttttttatgtttctctatttctgggctgatgaattaatattcatttgtattttaaccctgcagaattttccttagttaaaaacactttcctagctggtcatttcttcataagatagcaaatttaaatctctcctcgatcagcttttaaaaaatgtgtactattatctgaggaagttttttactgctttatgtttttgtgtgttttgaggccatgatgattacatttgtggttccaaaataatttttttaaatattaatagcccatatacaaagataatggattgcacatagacaaagaaataaacttcagatttgtgatttttgtttctaaacttgatacagatttacactatttataaatacgtatttattgcctgaaaatatttgtgaatggaatgttgtttttttccagacgtaactgccattaaatactaaggagttctgtagttttaaacactactcctattacattttatatgtgtagataaaactgcttagtattatacagaaatttttattaaaattgttaaatgtttaaagggtttcccaatgtttgagtttaaaaaagactttctgaaaaaatccactttttgttcattttcaaacctaatgattatatgtattttatatgtgtgtgtatgtgtacacacatgtataatatatacagaaacctcgatatataattgtatagattttaaaagttttattttttacatctatggtagtttttgaggtgcctattataaagtattacggaagtttgctgtttttaaagtaaatgtcttttagtgtgatttattaagttgtagtcaccatagtgatagcccataaataattgctggaaaattgtattttataacagtagaaaacatatagtcagtgaagtaaatattttaaaggaaacattatatagatttgataaatgttgtttataattaagagtttcttatggaaaagagattcagaatgataacctcttttagagaacaaataagtgacttatttttttaaagctagatgactttgaaatgctatactgtcctgcttgtacaacatggtttggggtgaaggggaggaaagtattaaaaaatctatatcgctagtaaattgtaataagttctattaaaacttgtatttcatatgaaaaatttgctaatttaatattaactcatttgataataatacttgtcttttctacctctc

SEQ ID NO: 33661 - DNA, 4990 bp, Homo sapiens
  source 1..4990: mol_type = unassigned DNA
gctcatcgtttgttgtttagataatatcatgaactgataaatgcagttgccacgttgattccctagggcctggcttaccgactgaggtcataagatattatgccttctctttagacttggtcagtggagaggaaatgggcaaagaaccagcctatggaggtgacaaggccttagggccaaaagtcttgagggtgaaggtttagggcctgcgcagcttccctgccatgccccgcaaggtctcgcattcgcaaggcttgtgacagtgggagcctcattacggactctcctaaagtccatggtgtcctcttttcgcatttgcgccccgtgggtgatgcccgatgccgcccttcccatcgctctcttccccttcaagcgtatcgcaactgcaaaaacacccagcacagacactccattttctatcttaatgcatttaactagcacaacctacaggttgttccatcccagagactacccttttctccatagacgtgaccatcaaccaaccagcggtcagaatcagtcagcctctgtcatgttcctaggtccttggcgaactggctgggcggggtcccagcagcctaggagtacagtggagcaatgcctgacgtaagtcaacaaagatcacgtgagacgaatcagtcgcctagattggctacaactaagtggttgggagcggggaggtcgcggcggctgcgtggggttcgcccgtgacacaattacaactttgtgctggtgctggcaaagtttgtgattttaagaaattctgctgtgctctccagcactgcgagcttctgccttccctgtagtttcccagatgtgatccaggtagccgagttccgctgcccgtgcttcggtagcttaagtctttgcctcagcttttttccttgcagccgctgaggaggcgataaaattggcgtcacagtctcaagcagcgattgaaggcgtcttttcaactactcgattaaggttgggtatcgtcgtgggacttggaaatttgttgtttccatgaaatcctgcgcagtgtcgctcactaccgccgctgttgccttcggtgatgaggcaaagaaaatggcggaaggaaaagcgagccgcgagagtgaagaggagtctgttagcctgacagtcgaggaaagggaggcgcttggtggcatggacagccgtctcttcgggttcgtgaggcttcatgaagatggcgccagaacgaagaccctactaggcaaggctgttcgctgctacgaatctttaatcttaaaagctgaaggaaaagtggagtctgacttcttttgccaattaggtcacttcaacctcttgttggaagattattcaaaagcattatctgcatatcagagatattacagtttacaggctgactactggaagaatgctgcgtttttatatggccttggtttggtctacttctactacaatgcatttcattgggcaattaaagcatttcaagatgtcctttatgttgaccccagcttttgtcgagccaaggaaattcatttacgacttgggctcatgttcaaagtgaacacagactacaagtctagtttaaagcattttcagttagccttgattgactgtaatccatgtactttgtccaatgctgaaattcaatttcatattgcccatttgtatgaaacccagaggaagtatcattctgcaaaggaggcatatgaacaacttttgcagacagaaaaccttcctgcacaagtaaaagcaactgtattgcaacagttaggttggatgcatcataatatggatctagtaggagacaaagccacaaaggaaagctatgctattcagtatctccaaaagtctttggaggcagatcctaattctggccaatcgtggtattttcttggaaggtgttattcaagtattgggaaagttcaggatgcctttatatcttacaggcaatctattgataaatcagaagcaagtgcagatacatggtgttcaataggtgtgttgtatcagcagcaaaatcagcctatggatgctttacaggcatatatttgtgctgtacaattggaccatgggcatgccgcagcctggatggacctaggtactctctatgaatcctgcaatcaacctcaagatgccattaaatgctacctaaatgcagctagaagcaaacgttgtagtaatacctctacgcttgctgcaagaattaaatttctacagaatggttctgataactggaatggtggccagagtctttcacatcatccagtacagcaagtttattcgttgtgtttgacaccacagaaattacagcacttggaacaactgcgagcaaatagagataatttaaatccagcacagaagcatcagctggaacagttagaaagtcagtttgtcttaatgcagcaaatgagacacaaagaagttgctcaggtacgaactactggaattcataacggggccataactgattcatcactgcctacaaactctgtctctaatcgacaaccacatggtgctctgaccagagtatctagcgtctctcagcctggagttcgccctgcttgtgttgaaaaacttttgtccagtggagctttttctgcaggctgtattccttgtggcacatcaaaaattctaggaagtacagacactatcttgctaggcagtaattgtatagcaggaagtgaaagtaatggaaatgtgccttacctgcagcaaaatacacacactctacctcataatcatacagacctgaacagcagcacagaagagccatggagaaaacagctatctaactccgctcaggggcttcataaaagtcagagttcatgtttgtcaggacctaatgaagaacaacctctgttttccactgggtcagcccagtatcaccaggcaactagcactggtattaagaaggcgaatgaacatctcactctgcctagtaattcagtaccacagggggatgctgacagtcacctctcctgtcatactgctacctcaggtggacaacaaggcattatgtttaccaaagagagcaagccttcaaaaaatagatccttggtgcctgaaacaagcaggcatactggagacacatctaatggctgtgctgatgtcaagggactttctaatcatgttcatcagttgatagcagatgctgtttccagtcctaaccatggagattcaccaaatttattaattgcagacaatcctcagctctctgctttgttgattggaaaagccaatggcaatgtgggtactggaacctgtgacaaagtgaataatattcacccagctgttcatacaaagactgatcattctgttgcctcttcaccctcttcagccatttccacagcaacaccttctcctaaatccactgagcagagaagcataaacagtgttaccagccttaacagtcctcacagtggattacacacagtcaatggagaggggctggggaagtcacagagctctacaaaagtagacctgcctttagctagccacagatctacttctcagatcttaccatcaatgtcagtgtctatatgccccagttcaacagaagttctgaaagcatgcaggaatccaggtaaaaatggcttgtctaatagctgcattttgttagataaatgtccacctccaagaccaccaacttcaccatacccacccttgccaaaggacaagttgaatccacccacacctagtatttacttggaaaataaacgtgatgctttctttcctccattacatcaattttgtacaaatccaaaaaaccctgttacagtaatacgtggccttgctggagctcttaaattagatcttggacttttctctaccaaaactttggtagaagctaacaatgaacatatggtagaagtgaggacacagttgctgcaaccagcagatgaaaactgggatcccactggaacaaagaaaatctggcgttgtgaaagcaatagatctcatactacaattgccaaatacgcacaataccaggcttcctccttccaggaatcattgagagaagaaaatgagaaaagaacacaacacaaagatcattcagataacgaatccacatcttcagagaattctggaaggagaaggaaaggaccttttaaaaccataaaatttgggaccaacattgacctctctgataacaaaaagtggaagttgcagttacatgaactgactaaacttcctgcttttgcgcgtgtggtgtcagcaggaaatcttctaacccatgttgggcataccattctgggcatgaatacagtacaactgtatatgaaagttccagggagtcggacaccaggtcaccaagaaaataacaacttctgctctgttaacataaatattggtccaggagattgtgaatggtttgttgtacctgaagattattggggtgttctgaatgacttctgtgaaaaaaataatttgaattttttaatgagttcttggtggcccaaccttgaagatctttatgaagcaaatgtccctgtgtatagatttattcagcgacctggagatttggtctggataaatgcaggcactgtgcattgggttcaagctgttggctggtgcaataacattgcctggaatgttggtccacttacagcctgccagtataaattggcagtggaacggtatgaatggaacaaattgaaaagtgtgaagtcaccagtacccatggtgcatctttcctggaatatggcacgaaatatcaaagtctcagatccaaagctttttgaaatgattaagtaagtgccttctgaaactgctgcagtttctctttgggggtattggtagccattcagtatttttttcaaaagaattctgttgacattaaatgatatcagcagtccagaagtcttggcaaaatgtaataagatgtaaataatcttatatattcataagtgttataaaatctcataagattaaaatattgccttcccttacagatagtcacttgtgtttattacaatttagagaggaataaagatgtacatgaatatacactggtaaa

SEQ ID NO: 33662 - DNA, 1539 bp, Homo sapiens
  source 1..1539: mol_type = unassigned DNA
gcgtggggttcgcccgtgacacaattacaactttgtgctggtgctggcaaagtttgtgattttaagaaattctgctgtgctctccagcactgcgagcttctgccttccctgtagtttcccagatgtgatccaggtagccgagttccgctgcccgtgcttcggtagcttaagtctttgcctcagcttttttccttgcagccgctgaggaggcgataaaattggcgtcacagtctcaagcagcgattgaaggcgtcttttcaactactcgattaaggttgggtatcgtcgtgggacttggaaatttgttgtttccatgaaatcctgcgcagtgtcgctcactaccgccgctgttgccttcggtgatgaggcaaagaaaatggcggaaggaaaagcgagccgcgagagtgaagaggagtctgttagcctgacagtcgaggaaagggaggcgcttggtggcatggacagccgtctcttcgggttcgtgaggcttcatgaagatggcgccagaacgaagaccctactaggcaaggctgttcgctgctacgaatctttaatcttaaaagctgaaggaaaagtggagtctgacttcttttgccaattaggtcacttcaacctcttgttggaagattattcaaaagcattatctgcatatcagagatattacagtttacaggctgactactggaagaatgctgcgtttttatatggccttggtttggtctacttctactacaatgcatttcattgggcaattaaagcatttcaagatgtcctttatgttgaccccagcttttgtcgagccaaggaaattcatttacgacttgggctcatgttcaaagtgaacacagactacaagtctagtttaaagcattttcagttagccttgattgactgtaatccatgtactttgtccaatgctgaaagtaagtatttttaaatgaaatacttttgagtaaagaatattaatgatacctttttttctactgatacctttgtttctgttcattcttgagaagagaagtgagaaggcatgtgcctgattcagagagtttaaatcactggagttgagttgatttgggtactatttttcttgctcaaagacagtcagtattattatttgataactgtagaaatgattggtatgtcacagagcactaacaaatagtgattacctactttagtagtttttctccctttatggtgtctatgttttcatattaatgaattacttcaccttttaatattttaggatttgcacataccgtaagcttgactattttttgaaacttttttgtgtacttggtgatgttgcaaaaatcaaaagttttcaaagccaattttaaacaaaacctgaataagttaaaaatgtgtagtttaaaaaataaatactgttttttgaactctttcagatgaatgactacagttaatattttgggaaaaaaacatgtttaaaaagaatatgaaactttaaattatgtgattttcctttgtgataaaaatgttagaatattaaagaccttttatgtcaattttttacct

SEQ ID NO: 33663 - DNA, 4179 bp, Homo sapiens
  source 1..4179: mol_type = unassigned DNA
atgaaatcctgcgcagtgtcgctcactaccgccgctgttgccttcggtgatgaggcaaagaaaatggcggaaggaaaagcgagccgcgagagtgaagaggagtctgttagcctgacagtcgaggaaagggaggcgcttggtggcatggacagccgtctcttcgggttcgtgaggcttcatgaagatggcgccagaacgaagaccctactaggcaaggctgttcgctgctacgaatctttaatcttaaaagctgaaggaaaagtggagtctgacttcttttgccaattaggtcacttcaacctcttgttggaagattattcaaaagcattatctgcatatcagagatattacagtttacaggctgactactggaagaatgctgcgtttttatatggccttggtttggtctacttctactacaatgcatttcattgggcaattaaagcatttcaagatgtcctttatgttgaccccagcttttgtcgagccaaggaaattcatttacgacttgggctcatgttcaaagtgaacacagactacaagtctagtttaaagcattttcagttagccttgattgactgtaatccatgtactttgtccaatgctgaaattcaatttcatattgcccatttgtatgaaacccagaggaagtatcattctgcaaaggaggcatatgaacaacttttgcagacagaaaaccttcctgcacaagtaaaagcaactgtattgcaacagttaggttggatgcatcataatatggatctagtaggagacaaagccacaaaggaaagctatgctattcagtatctccaaaagtctttggaggcagatcctaattctggccaatcgtggtattttcttggaaggtgttattcaagtattgggaaagttcaggatgcctttatatcttacaggcaatctattgataaatcagaagcaagtgcagatacatggtgttcaataggtgtgttgtatcagcagcaaaatcagcctatggatgctttacaggcatatatttgtgctgtacaattggaccatgggcatgccgcagcctggatggacctaggtactctctatgaatcctgcaatcaacctcaagatgccattaaatgctacctaaatgcagctagaagcaaacgttgtagtaatacctctacgcttgctgcaagaattaaatttctacaggctcagttgtgtaaccttccacaaagtagtctacagaataaaactaaattacttcctagtattgaggaggcatggagcctaccaatccccgcagagcttacctccaggcagggtgccatgaacacagcacagcagaatggttctgataactggaatggtggccagagtctttcacatcatccagtacagcaagtttattcgttgtgtttgacaccacagaaattacagcacttggaacaactgcgagcaaatagagataatttaaatccagcacagaagcatcagctggaacagttagaaagtcagtttgtcttaatgcagcaaatgagacacaaagaagttgctcaggtacgaactactggaattcataacggggccataactgattcatcactgcctacaaactctgtctctaatcgacaaccacatggtgctctgaccagagtatctagcgtctctcagcctggagttcgccctgcttgtgttgaaaaacttttgtccagtggagctttttctgcaggctgtattccttgtggcacatcaaaaattctaggaagtacagacactatcttgctaggcagtaattgtatagcaggaagtgaaagtaatggaaatgtgccttacctgcagcaaaatacacacactctacctcataatcatacagacctgaacagcagcacagaagagccatggagaaaacagctatctaactccgctcaggggcttcataaaagtcagagttcatgtttgtcaggacctaatgaagaacaacctctgttttccactgggtcagcccagtatcaccaggcaactagcactggtattaagaaggcgaatgaacatctcactctgcctagtaattcagtaccacagggggatgctgacagtcacctctcctgtcatactgctacctcaggtggacaacaaggcattatgtttaccaaagagagcaagccttcaaaaaatagatccttggtgcctgaaacaagcaggcatactggagacacatctaatggctgtgctgatgtcaagggactttctaatcatgttcatcagttgatagcagatgctgtttccagtcctaaccatggagattcaccaaatttattaattgcagacaatcctcagctctctgctttgttgattggaaaagccaatggcaatgtgggtactggaacctgtgacaaagtgaataatattcacccagctgttcatacaaagactgatcattctgttgcctcttcaccctcttcagccatttccacagcaacaccttctcctaaatccactgagcagagaagcataaacagtgttaccagccttaacagtcctcacagtggattacacacagtcaatggagaggggctggggaagtcacagagctctacaaaagtagacctgcctttagctagccacagatctacttctcagatcttaccatcaatgtcagtgtctatatgccccagttcaacagaagttctgaaagcatgcaggaatccaggtaaaaatggcttgtctaatagctgcattttgttagataaatgtccacctccaagaccaccaacttcaccatacccacccttgccaaaggacaagttgaatccacccacacctagtatttacttggaaaataaacgtgatgctttctttcctccattacatcaattttgtacaaatccaaaaaaccctgttacagtaatacgtggccttgctggagctcttaaattagatcttggacttttctctaccaaaactttggtagaagctaacaatgaacatatggtagaagtgaggacacagttgctgcaaccagcagatgaaaactgggatcccactggaacaaagaaaatctggcgttgtgaaagcaatagatctcatactacaattgccaaatacgcacaataccaggcttcctccttccaggaatcattgagagaagaaaatgagaaaagaacacaacacaaagatcattcagataacgaatccacatcttcagagaattctggaaggagaaggaaaggaccttttaaaaccataaaatttgggaccaacattgacctctctgataacaaaaagtggaagttgcagttacatgaactgactaaacttcctgcttttgcgcgtgtggtgtcagcaggaaatcttctaacccatgttgggcataccattctgggcatgaatacagtacaactgtatatgaaagttccagggagtcggacaccaggtcaccaagaaaataacaacttctgctctgttaacataaatattggtccaggagattgtgaatggtttgttgtacctgaagattattggggtgttctgaatgacttctgtgaaaaaaataatttgaattttttaatgagttcttggtggcccaaccttgaagatctttatgaagcaaatgtccctgtgtatagatttattcagcgacctggagatttggtctggataaatgcaggcactgtgcattgggttcaagctgttggctggtgcaataacattgcctggaatgttggtccacttacagcctgccagtataaattggcagtggaacggtatgaatggaacaaattgaaaagtgtgaagtcaccagtacccatggtgcatctttcctggaatatggcacgaaatatcaaagtctcagatccaaagctttttgaaatgattaagtattgtcttttgaaaattctgaagcaatatcagacattgagagaagctcttgttgcagcaggaaaagaggttatatggcatgggcggacaaatgatgaaccagctcattactgtagcatttgtgaggtggaggtttttaatctgctttttgtcactaatgaaagcaatactcaaaaaacctacatagtacattgccatgattgtgcacgaaaaacaagcaaaagtttggaaaattttgtggtgctcgaacagtacaaaatggaggacctaatccaagtttatgatcaatttacactagctctttcattatcatcctcatcttga

SEQ ID NO: 33664 - DNA, 3636 bp, Homo sapiens
  source 1..3636: mol_type = unassigned DNA
atgaaatcctgcgcagtgtcgctcactaccgccgctgttgccttcggtgatgaggcaaagaaaatggcggaaggaaaagcgagccgcgagagtgaagaggagtctgttagcctgacagtcgaggaaagggaggcgcttggtggcatggacagccgtctcttcgggttcgtgaggcttcatgaagatggcgccagaacgaagaccctactaggcaaggctgttcgctgctacgaatctttaatcttaaaagctgaaggaaaagtggagtctgacttcttttgccaattaggtcacttcaacctcttgttggaagattattcaaaagcattatctgcatatcagagatattacagtttacaggctgactactggaagaatgctgcgtttttatatggccttggtttggtctacttctactacaatgcatttcattgggcaattaaagcatttcaagatgtcctttatgttgaccccagcttttgtcgagccaaggaaattcatttacgacttgggctcatgttcaaagtgaacacagactacaagtctagtttaaagcattttcagttagccttgattgactgtaatccatgtactttgtccaatgctgaaattcaatttcatattgcccatttgtatgaaacccagaggaagtatcattctgcaaaggaggcatatgaacaacttttgcagacagaaaaccttcctgcacaagtaaaagcaactgtattgcaacagttaggttggatgcatcataatatggatctagtaggagacaaagccacaaaggaaagctatgctattcagtatctccaaaagtctttggaggcagatcctaattctggccaatcgtggtattttcttggaaggtgttattcaagtattgggaaagttcaggatgcctttatatcttacaggcaatctattgataaatcagaagcaagtgcagatacatggtgttcaataggtgtgttgtatcagcagcaaaatcagcctatggatgctttacaggcatatatttgtgctgtacaattggaccatgggcatgccgcagcctggatggacctaggtactctctatgaatcctgcaatcaacctcaagatgccattaaatgctacctaaatgcagctagaagcaaacgttgtagtaatacctctacgcttgctgcaagaattaaatttctacaggctcagttgtgtaaccttccacaaagtagtctacagaataaaactaaattacttcctagtattgaggaggcatggagcctaccaatccccgcagagcttacctccaggcagggtgccatgaacacagcacagcagaatggttctgataactggaatggtggccagagtctttcacatcatccagtacagcaagtttattcgttgtgtttgacaccacagaaattacagcacttggaacaactgcgagcaaatagagataatttaaatccagcacagaagcatcagctggaacagttagaaagtcagtttgtcttaatgcagcaaatgagacacaaagaagttgctcaggggcttcataaaagtcagagttcatgtttgtcaggacctaatgaagaacaacctctgttttccactgggtcagcccagtatcaccaggcaactagcactggtattaagaaggcgaatgaacatctcactctgcctagtaattcagtaccacagggggatgctgacagtcacctctcctgtcatactgctacctcaggtggacaacaaggcattatgtttaccaaagagagcaagccttcaaaaaatagatccttggtgcctgaaacaagcaggcatactggagacacatctaatggctgtgctgatgtcaagggactttctaatcatgttcatcagttgatagcagatgctgtttccagtcctaaccatggagattcaccaaatttattaattgcagacaatcctcagctctctgctttgttgattggaaaagccaatggcaatgtgggtactggaacctgtgacaaagtgaataatattcacccagctgttcatacaaagactgatcattctgttgcctcttcaccctcttcagccatttccacagcaacaccttctcctaaatccactgagcagagaagcataaacagtgttaccagccttaacagtcctcacagtggattacacacagtcaatggagaggggctggggaagtcacagagctctacaaaagtagacctgcctttagctagccacagatctacttctcagatcttaccatcaatgtcagtgtctatatgccccagttcaacagaagttctgaaagcatgcaggaatccaggtaaaaatggcttgtctaatagctgcattttgttagataaatgtccacctccaagaccaccaacttcaccatacccacccttgccaaaggacaagttgaatccacccacacctagtatttacttggaaaataaacgtgatgctttctttcctccattacatcaattttgtacaaatccaaaaaaccctgttacagtaatacgtggccttgctggagctcttaaattagatcttggacttttctctaccaaaactttggtagaagctaacaatgaacatatggtagaagtgaggacacagttgctgcaaccagcagatgaaaactgggatcccactggaacaaagaaaatctggcgttgtgaaagcaatagatctcatactacaattgccaaatacgcacaataccaggcttcctccttccaggaatcattgagagaagaaaatgagaaaagaacacaacacaaagatcattcagataacgaatccacatcttcagagaattctggaaggagaaggaaaggaccttttaaaaccataaaatttgggaccaacattgacctctctgataacaaaaagtggaagttgcagttacatgaactgactaaacttcctgcttttgcgcgtgtggtgtcagcaggaaatcttctaacccatgttgggcataccattctgggcatgaatacagtacaactgtatatgaaagttccagggagtcggacaccaggtcaccaagaaaataacaacttctgctctgttaacataaatattggtccaggagattgtgaatggtttgttgtacctgaagattattggggtgttctgaatgacttctgtgaaaaaaataatttgaattttttaatgagttcttggtggcccaaccttgaagatctttatgaagcaaatgtccctgtgtatagatttattcagcgacctggagatttggtctggataaatgcaggcactgtgcattgggttcaagctgttggctggtgcaataacattgcctggaatgttggtccacttacagcctgccagtataaattggcagtggaacggtatgaatggaacaaattgaaaagtgtgaagtcaccagtacccatggtgcatctttcctggaatatggcacgaaatatcaaagtctcagatccaaagctttttgaaatgattaagtattgtcttttgaaaattctgaagcaatatcagacattgagagaagctcttgttgcagcaggaaaagaggttatatggcatgggcggacaaatgatgaaccagctcattactgtagcatttgtgaggctctttcattatcatcctcatcttga

SEQ ID NO: 33665 - DNA, 3214 bp, Homo sapiens
  source 1..3214: mol_type = unassigned DNA
gtttccatgaaatcctgcgcagtgtcgctcactaccgccgctgttgccttcggtgatgaggcaaagaaaatggcggaaggaaaagcgagccgcgagagtgaagaggagtctgttagcctgacagtcgaggaaagggaggcgcttggtggcatggacagccgtctcttcgggttcgtgaggcttcatgaagatggcgccagaacgaagaccctactaggcaaggctgttcgctgctacgaatctttaatcttaaaagctgaaggaaaagtggagtctgacttcttttgccaattaggtcacttcaacctcttgttggaagattattcaaaagcattatctgcatatcagagatattacagtttacaggctgactactggaagaatgctgcgtttttatatggccttggtttggtctacttctactacaatgcatttcattgggcaattaaagcatttcaagatgtcctttatgttgaccccagcttttgtcgagccaaggaaattcatttacgacttgggctcatgttcaaagtgaacacagactacaagtctagtttaaagcattttcagttagccttgattgactgtaatccatgtactttgtccaatgctgaaattcaatttcatattgcccatttgtatgaaacccagaggaagtatcattctgcaaaggaggcatatgaacaacttttgcagacagaaaaccttcctgcacaagtaaaagcaactgtattgcaacagttaggttggatgcatcataatatggatctagtaggagacaaagccacaaaggaaagctatgctattcagtatctccaaaagtctttggaggcagatcctaattctggccaatcgtggtattttcttggaagtgtgttgtatcagcagcaaaatcagcctatggatgctttacaggcatatatttgtgctgtacaattggaccatgggcatgccgcagcctggatggacctaggtactctctatgaatcctgcaatcaacctcaagatgccattaaatgctacctaaatgcagctagaagcaaacgttgtagtaatacctctacgcttgctgcaagaattaaatttctacagaatggttctgataactggaatggtggccagagtctttcacatcatccagtacagcaagtttattcgttgtgtttgacaccacagaaattacagcacttggaacaactgcgagcaaatagagataatttaaatccagcacagaagcatcagctggaacagttagaaagtcagtttgtcttaatgcagcaaatgagacacaaagaagttgctcaggtacgaactactggaattcataacggggccataactgattcatcactgcctacaaactctgtctctaatcgacaaccacatggtgctctgaccagagtatctagcgtctctcagcctggagttcgccctgcttgtgttgaaaaacttttgtccagtggagctttttctgcaggctgtattccttgtggcacatcaaaaattctaggaagtacagacactatcttgctaggcagtaattgtatagcaggaagtgaaagtaatggaaatgtgccttacctgcagcaaaatacacacactctacctcataatcatacagacctgaacagcagcacagaagagccatggagaaaacagctatctaactccgctcaggggcttcataaaagtcagagttcatgtttgtcaggacctaatgaagaacaacctctgttttccactgggtcagcccagtatcaccaggcaactagcactggtattaagaaggcgaatgaacatctcactctgcctagtaattcagtaccacagggggatgctgacagtcacctctcctgtcatactgctacctcaggtggacaacaaggcattatgtttaccaaagagagcaagccttcaaaaaatagatccttggtgcctgaaacaagcaggcatactggagacacatctaatggctgtgctgatgtcaagggactttctaatcatgttcatcagttgatagcagatgctgtttccagtcctaaccatggagattcaccaaatttattaattgcagacaatcctcagctctctgctttgttgattggaaaagccaatggcaatgtgggtactggaacctgtgacaaagtgaataatattcacccagctgttcatacaaagactgatcattctgttgcctcttcaccctcttcagccatttccacagcaacaccttctcctaaatccactgagcagagaagcataaacagtgttaccagccttaacagtcctcacagtggattacacacagtcaatggagaggggctggggaagtcacagagctctacaaaagtagacctgcctttagctagccacagatctacttctcagatcttaccatcaatgtcagtgtctatatgccccagttcaacagaagttctgaaagcatgcaggaatccaggtaaaaatggcttgtctaatagctgcattttgttagataaatgtccacctccaagaccaccaacttcaccatacccacccttgccaaaggacaagttgaatccacccacacctagtatttacttggaaaataaacgtgatgctttctttcctccattacatcaattttgtacaaatccaaaaaaccctgttacagtaatacgtggccttgctggagctcttaaattagatcttggacttttctctaccaaaactttggtagaagctaacaatgaacatatggtagaagtgaggacacagttgctgcaaccagcagatgaaaactgggatcccactggaacaaagaaaatctggcgttgtgaaagcaatagatctcatactacaattgccaaatacgcacaataccaggcttcctccttccaggaatcattgagagctggaatgcaatggtgtgatctcagctcactgcagcctccgcctcctgggttcaagcgattctcccacctcagcctcccgaatagctggaattacaggcacctgccatcatgcccaactaatttttgtatttttgtagagacagggtttcaccatgttggccaggcttgtcttgaactcctgacctcaggtggtctgcttgcctcagcatcccaaagtgctgggattacaggtgtgagccaccatgcccggtaaacttttaaaaatgtaagcaaaattacagtatgtaaaacacacattgctaatggagaaataaagttcc

SEQ ID NO: 33666 - DNA, 3299 bp, Homo sapiens
  source 1..3299: mol_type = unassigned DNA
atgaaatcctgcgcagtgtcgctcactaccgccgctgttgccttcggtgatgaggcaaagaaaatggcggaaggaaaagcgagccgcgagagtgaagaggagtctgttagcctgacagtcgaggaaagggaggcgcttggtggcatggacagccgtctcttcgggttcgtgaggcttcatgaagatggcgccagaacgaagaccctactaggcaaggctgttcgctgctacgaatctttaatcttaaaagctgaaggaaaagtggagtctgacttcttttgccaattaggtcacttcaacctcttgttggaagattattcaaaagcattatctgcatatcagagatattacagtttacaggctgactactggaagaatgctgcgtttttatatggccttggtttggtctacttctactacaatgcatttcattgggcaattaaagcatttcaagatgtcctttatgttgaccccagcttttgtcgagccaaggaaattcatttacgacttgggctcatgttcaaagtgaacacagactacaagtctagtttaaagcattttcagttagccttgattgactgtaatccatgtactttgtccaatgctgaaattcaatttcatattgcccatttgtatgaaacccagaggaagtatcattctgcaaaggaggcatatgaacaacttttgcagacagaaaaccttcctgcacaagtaaaagcaactgtattgcaacagttaggttggatgcatcataatatggatctagtaggagacaaagccacaaaggaaagctatgctattcagtatctccaaaagtctttggaggcagatcctaattctggccaatcgtggtattttcttggaagtgtgttgtatcagcagcaaaatcagcctatggatgctttacaggcatatatttgtgctgtacaattggaccatgggcatgccgcagcctggatggacctaggtactctctatgaatcctgcaatcaacctcaagatgccattaaatgctacctaaatgcagctagaagcaaacgttgtagtaatacctctacgcttgctgcaagaattaaatttctacagcaatccttgtcactacacatgattacttctagccaagtagaaggcctgtccagtcctgccaagaagaaaagaacatctagtccaacaaagaatggttctgataactggaatggtggccagagtctttcacatcatccagtacagcaagtttattcgttgtgtttgacaccacagaaattacagcacttggaacaactgcgagcaaatagagataatttaaatccagcacagaagcatcagctggaacagttagaaagtcagtttgtcttaatgcagcaaatgagacacaaagaagttgctcaggtacgaactactggaattcataacggggccataactgattcatcactgcctacaaactctgtctctaatcgacaaccacatggtgctctgaccagagtatctagcgtctctcagcctggagttcgccctgcttgtgttgaaaaacttttgtccagtggagctttttctgcaggctgtattccttgtggcacatcaaaaattctaggaagtacagacactatcttgctaggcagtaattgtatagcaggaagtgaaagtaatggaaatgtgccttacctgcagcaaaatacacacactctacctcataatcatacagacctgaacagcagcacagaagagccatggagaaaacagctatctaactccgctcaggggcttcataaaagtcagagttcatgtttgtcaggacctaatgaagaacaacctctgttttccactgggtcagcccagtatcaccaggcaactagcactggtattaagaaggcgaatgaacatctcactctgcctagtaattcagtaccacagggggatgctgacagtcacctctcctgtcatactgctacctcaggtggacaacaaggcattatgtttaccaaagagagcaagccttcaaaaaatagatccttggtgcctgaaacaagcaggcatactggagacacatctaatggctgtgctgatgtcaagggactttctaatcatgttcatcagttgatagcagatgctgtttccagtcctaaccatggagattcaccaaatttattaattgcagacaatcctcagctctctgctttgttgattggaaaagccaatggcaatgtgggtactggaacctgtgacaaagtgaataatattcacccagctgttcatacaaagactgatcattctgttgcctcttcaccctcttcagccatttccacagcaacaccttctcctaaatccactgagcagagaagcataaacagtgttaccagccttaacagtcctcacagtggattacacacagtcaatggagaggggctggggaagtcacagagctctacaaaagtagacctgcctttagctagccacagatctacttctcagatcttaccatcaatgtcagtgtctatatgccccagttcaacagaagttctgaaagcatgcaggaatccaggtaaaaatggcttgtctaatagctgcattttgttagataaatgtccacctccaagaccaccaacttcaccatacccacccttgccaaaggacaagttgaatccacccacacctagtatttacttggaaaataaacgtgatgctttctttcctccattacatcaattttgtacaaatccaaaaaaccctgttacagtaatacgtggccttgctggagctcttaaattagatcttggacttttctctaccaaaactttggtagaagctaacaatgaacatatggtagaagtgaggacacagttgctgcaaccagcagatgaaaactgggatcccactggaacaaagaaaatctggcgttgtgaaagcaatagatctcatactacaattgccaaatacgcacaataccaggcttcctccttccaggaatcattgagaagtctcattctctctcacccaggctggaatgcaatggtgtgatctcagctcactgcagcctccgcctcctgggttcaagcgattctcccacctcagcctcccgaatagctggaattacaggcacctgccatcatgcccaactaatttttgtatttttgtagagacagggtttcaccatgttggccaggcttgtcttgaactcctgacctcaggtggtctgcttgcctcagcatcccaaagtgctgggattacaggtgtgagccaccatgcccggtaaacttttaaaaatgtaagcaaaattacagtatgtaaaacacacattg

SEQ ID NO: 33667 - DNA, 3210 bp, Homo sapiens
  source 1..3210: mol_type = unassigned DNA
atgaaatcctgcgcagtgtcgctcactaccgccgctgttgccttcggtgatgaggcaaagaaaatggcggaaggaaaagcgagccgcgagagtgaagaggagtctgttagcctgacagtcgaggaaagggaggcgcttggtggcatggacagccgtctcttcgggttcgtgaggcttcatgaagatggcgccagaacgaagaccctactaggcaaggctgttcgctgctacgaatctttaatcttaaaagctgaaggaaaagtggagtctgacttcttttgccaattaggtcacttcaacctcttgttggaagattattcaaaagcattatctgcatatcagagatattacagtttacaggctgactactggaagaatgctgcgtttttatatggccttggtttggtctacttctactacaatgcatttcattgggcaattaaagcatttcaagatgtcctttatgttgaccccagcttttgtcgagccaaggaaattcatttacgacttgggctcatgttcaaagtgaacacagactacaagtctagtttaaagcattttcagttagccttgattgactgtaatccatgtactttgtccaatgctgaaattcaatttcatattgcccatttgtatgaaacccagaggaagtatcattctgcaaaggaggcatatgaacaacttttgcagacagaaaaccttcctgcacaagtaaaagcaactgtattgcaacagttaggttggatgcatcataatatggatctagtaggagacaaagccacaaaggaaagctatgctattcagtatctccaaaagtctttggaggcagatcctaattctggccaatcgtggtattttcttggaaggtgttattcaagtattgggaaagttcaggatgcctttatatcttacaggcaatctattgataaatcagaagcaagtgcagatacatggtgttcaataggtgtgttgtatcagcagcaaaatcagcctatggatgctttacaggcatatatttgtgctgtacaattggaccatgggcatgccgcagcctggatggacctaggtactctctatgaatcctgcaatcaacctcaagatgccattaaatgctacctaaatgcagctagaagcaaacgttgtagtaatacctctacgcttgctgcaagaattaaatttctacaggctcagttgtgtaaccttccacaaagtagtctacagaataaaactaaattacttcctagtattgaggaggcatggagcctaccaatccccgcagagcttacctccaggcagggtgccatgaacacagcacagcagcaatccttgtcactacacatgattacttctagccaagtagaaggcctgtccagtcctgccaagaagaaaagaacatctagtccaacaaagaatggttctgataactggaatggtggccagagtctttcacatcatccagtacagcaagtttattcgttgtgtttgacaccacagaaattacagcacttggaacaactgcgagcaaatagagataatttaaatccagcacagaagcatcagctggaacagttagaaagtcagtttgtcttaatgcagcaaatgagacacaaagaagttgctcaggtacgaactactggaattcataacggggccataactgattcatcactgcctacaaactctgtctctaatcgacaaccacatggtgctctgaccagagtatctagcgtctctcagcctggagttcgccctgcttgtgttgaaaaacttttgtccagtggagctttttctgcaggctgtattccttgtggcacatcaaaaattctaggaagtacagacactatcttgctaggcagtaattgtatagcaggaagtgaaagtaatggaaatgtgccttacctgcagcaaaatacacacactctacctcataatcatacagacctgaacagcagcacagaagagccatggagaaaacagctatctaactccgctcaggggcttcataaaagtcagagttcatgtttgtcaggacctaatgaagaacaacctctgttttccactgggtcagcccagtatcaccaggcaactagcactggtattaagaaggcgaatgaacatctcactctgcctagtaattcagtaccacagggggatgctgacagtcacctctcctgtcatactgctacctcaggtggacaacaaggcattatgtttaccaaagagagcaagccttcaaaaaatagatccttggtgcctgaaacaagcaggcatactggagacacatctaatggctgtgctgatgtcaagggactttctaatcatgttcatcagttgatagcagatgctgtttccagtcctaaccatggagattcaccaaatttattaattgcagacaatcctcagctctctgctttgttgattggaaaagccaatggcaatgtgggtactggaacctgtgacaaagtgaataatattcacccagctgttcatacaaagactgatcattctgttgcctcttcaccctcttcagccatttccacagcaacaccttctcctaaatccactgagcagagaagcataaacagtgttaccagccttaacagtcctcacagtggattacacacagtcaatggagaggggctggggaagtcacagagctctacaaaagtagacctgcctttagctagccacagatctacttctcagatcttaccatcaatgtcagtgtctatatgccccagttcaacagaagttctgaaagcatgcaggaatccaggtaaaaatggcttgtctaatagctgcattttgttagataaatgtccacctccaagaccaccaacttcaccatacccacccttgccaaaggacaagttgaatccacccacacctagtatttacttggaaaataaacgtgatgctttctttcctccattacatcaattttgtacaaatccaaaaaaccctgttacagtaatacgtggccttgctggagctcttaaattagatcttggacttttctctaccaaaactttggtagaagctaacaatgaacatatggtagaagtgaggacacagttgctgcaaccagcagatgaaaactgggatcccactggaacaaagaaaatctggcgttgtgaaagcaatagatctcatactacaattgccaaatacgcacaataccaggcttcctccttccaggaatcattgaga

SEQ ID NO: 33668 - DNA, 1128 bp, Homo sapiens
  source 1..1128: mol_type = unassigned DNA
gggaccgccctcagcagtgtggttagcaggcagggccagtgtgaccctccctttctgggcctcagttgagaaacctgaagctcaggagaggagtcactcccctggcagatgggtggctgggccagaagcagataccaggctttctgactcctgctctaggattctcaccacgtactggctagacttatacttctcaaatcttaatttcctaaaggccggtcatgcccaacatggtcttcattggaggtatcaactgtaagaagaggaaagacttgtctcaggaatttgaagcctacattaatgcttctggagaacatggaattgtggttttctctttgggatcaatggtctcagaaattccagagaagaaagctatggcaattgctgatgctttgggcaaaatccctcagacagtcctgtggcggtacactggaacccgaccatcgaatcttgcgaacaacacgatacttgttaagtggctaccccaaaacgatctgcttggtcacccgatgacccgtgcctttatcacccatgctggttcccatggtgtttatgaaagcatatgcaatggcgttcccatggtgatgatgcccttgtttggtgatcagatggacaatgcaaagcgcatggagactaagggagctggagtgaccctgaatgttctggaaatgacttctgaagatttagaaaatgctctaaaagcagtcatcaatgacaaaagttacaaggagaacatcatgcgcctctccagccttcacaaggaccgcccggtggagccgctggacctggccgtgttctgggtggagtttgtgatgaggcacaagggcgcgccacacctgcgccccgcagcccacgacctcacctggtaccagtaccattccttggacgtgattggtttcctcttggccgtcgtgctgacagtggccttcatcacctttaaatgttgtgcttatggctaccggaaatgcttggggaaaaaagggcgagttaagaaagcccacaaatccaagacccattgagaagtgggtgggaaataaggtaaaattttgaaccattccctagtcatttccaaacttgaaaacagaatcagtgttaaattcattttattcttattaaggaaatactttg

SEQ ID NO: 33669 - DNA, 2345 bp, Homo sapiens
  source 1..2345: mol_type = unassigned DNA
atggccacaggactccaggttcccctgccgcagctggccacaggactgctgcttctcctcagtgtccagccctgggctgagagtgggaaggtgctggtggtgcccactgatggcagccactggctcagcatgcgggaggccttgcgggacctccatgcgagaggccaccaggtggtggtcctcaccctggaggtgaatatgtacatcaaagaagagaactttttcaccctgacaacgtatgccatttcatggacccaggacgaatttgatcgccttttgctgggtcacactcaatcgttctttgaaacagaacatcttctgatgaaattttctagaagaatggcaattatgaacaatatgtctttgatcatacataggtcttgtgtggagctactgcataatgaggccctgatcaggcacctgcatgctacttcctttgatgtggttctaacagacccctttcacctctgcgcggcggtgctggctaagtacctgtcgattcctgctgtgtttttcttgaggaacattccatgtgatttagactttaagggcacacagtgtccaaacccttcctcctatattcctagattactaacgaccaattcagaccacatgacattcctgcaaagggtcaagaacatgctctaccctctggccctgtcctacctttgccatgctgtttctgctccttatgcaagccttgcctctgagctttttcagagagaggtgtcagtggtggatcttgtcagccatgcatctgtgtggctgttccgaggggactttgtgatggattaccccaggccgatcatgcccaacatggtcttcattgggggcatcaactgtgccaacgggaagccactatctcaggaatttgaagcctacattaatgcttctggagaacatggaattgtggttttctctttgggatcaatggtctcagaaattccagagaagaaagctatggcaattgctgatgctttgggcaaaatccctcagacagtcctgtggcggtacactggaacccgaccatcgaatcttgcgaacaacacgatacttgttaagtggctaccccaaaacgatctgcttggtcacccgatgacccgtgcctttatcacccatgctggttcccatggtgtttatgaaagcatatgcaatggcgttcccatggtgatgatgcccttgtttggtgatcagatggacaatgcaaagcgcatggagactaagggagctggagtgaccctgaatgttctggaaatgacttctgaagatttagaaaatgctctaaaagcagtcatcaatgacaaaagttacaaggagaacatcatgcgcctctccagccttcacaaggaccgcccggtggagccgctggacctggccgtgttctgggtggagtttgtgatgaggcacaagggcgcgccacacctgcgccccgcagcccacgacctcacctggtaccagtaccattccttggacgtgattggtttcctcttggccgtcgtgctgacagtggccttcatcacctttaaatgttgtgcttatggctaccggaaatgcttggggaaaaaagggcgagttaagaaagcccacaaatccaagacccattgagaagtgggtgggaaataaggtaaaattttgaaccattccctagtcatttccaaacttgaaaacagaatcagtgttaaattcattttattcttattaaggaaatactttgcataaattaatcagccccagagtgctttaaaaaattctcttaaataaaaataatagactcgctagtcagtaaagatatttgaatatgtatcgtgccccctctggtgtctttgatcaggatgacatgtgccatttttcagaggacgtgcagacaggctggcattctagattacttttcttactctgaaacatggcctgtttgggagtgcgggattcaaaggtggtcccacggctgcccctactgcaaatggcagttttaatcttatcttttggcttctgcagatggttgcaattgatccttaaccaataatggtcagtcctcatctctgtcgtgcttcataggtgccaccttgtgtgtttaaagaagggaagctttgtacctttagagtgtaggtgaaatgaatgaatggcttggagtgcactgagaacagcatatgatttcttgctttggggaaaaagaatgatgctatgaaattggtgggtggtgtatttgagaagataatcattgcttatgtcaaatggagctgaatttgataaaaacccaaaatacagctatgaagtgctgggcaagtttactttttttctgatgtttcctacaactaaaaataaattaataaatttatataaattct

SEQ ID NO: 33670 - DNA, 2479 bp, Homo sapiens
  source 1..2479: mol_type = unassigned DNA
aaagggtaaaattcagagcaagggagaggtagacaggacctgtgaaaagcagtggttagtttagggaaaatacctaggagccctgtgatttggagagtgaaaactctttattaccgttgttactttaactctttccaggatggcctgcctccttcgctcatttcagagaatttctgcaggggttttcttcttagcactttggggcatggttgtaggtgacaagctgctggtggtccctcaggacggaagccactggcttagtatgaaggatatagttgaggttctcagtgaccggggtcatgagattgtagtggtggtgcctgaagttaatttgcttttgaaagaatccaaatactacacaagaaaaatctatccagtgccgtatgaccaagaagagctgaagaaccgttaccaatcatttggaaacaatcactttgctgagcgatcattcctaactgctcctcagacagagtacaggaataacatgattgttattggcctgtacttcatcaactgccagagcctcctgcaggacagggacaccctgaacttctttaaggagagcaagtttgatgctcttttcacagacccagccttaccctgtggggtgatcctggctgagtatttgggcctaccatctgtgtacctcttcaggggttttccgtgttccctggagcatacattcagcagaagcccagaccctgtgtcctacattcccaggtgctacacaaagttttcagaccacatgactttttcccaacgagtggccaacttccttgttaatttgttggagccctatctattttattgtctgttttcaaagtatgaagaactcgcatcagctgtcctcaagagagatgtggatataatcaccttatatcagaaggtctctgtttggctgttaagatatgactttgtgcttgaatatcctaggccggtcatgcccaacatggtcttcattggaggtatcaactgtaagaagaggaaagacttgtctcaggaatttgaagcctacattaatgcttctggagaacatggaattgtggttttctctttgggatcaatggtctcagaaattccagagaagaaagctatggcaattgctgatgctttgggcaaaatccctcagacagtcctgtggcggtacactggaacccgaccatcgaatcttgcgaacaacacgatacttgttaagtggctaccccaaaacgatctgcttggtcacccgatgacccgtgcctttatcacccatgctggttcccatggtgtttatgaaagcatatgcaatggcgttcccatggtgatgatgcccttgtttggtgatcagatggacaatgcaaagcgcatggagactaagggagctggagtgaccctgaatgttctggaaatgacttctgaagatttagaaaatgctctaaaagcagtcatcaatgacaaaagttacaaggagaacatcatgcgcctctccagccttcacaaggaccgcccggtggagccgctggacctggccgtgttctgggtggagtttgtgatgaggcacaagggcgcgccacacctgcgccccgcagcccacgacctcacctggtaccagtaccattccttggacgtgattggtttcctcttggccgtcgtgctgacagtggccttcatcacctttaaatgttgtgcttatggctaccggaaatgcttggggaaaaaagggcgagttaagaaagcccacaaatccaagacccattgagaagtgggtgggaaataaggtaaaattttgaaccattccctagtcatttccaaacttgaaaacagaatcagtgttaaattcattttattcttattaaggaaatactttgcataaattaatcagccccagagtgctttaaaaaattctcttaaataaaaataatagactcgctagtcagtaaagatatttgaatatgtatcgtgccccctctggtgtctttgatcaggatgacatgtgccatttttcagaggacgtgcagacaggctggcattctagattacttttcttactctgaaacatggcctgtttgggagtgcgggattcaaaggtggtcccacggctgcccctactgcaaatggcagttttaatcttatcttttggcttctgcagatggttgcaattgatccttaaccaataatggtcagtcctcatctctgtcgtgcttcataggtgccaccttgtgtgtttaaagaagggaagctttgtacctttagagtgtaggtgaaatgaatgaatggcttggagtgcactgagaacagcatatgatttcttgctttggggaaaaagaatgatgctatgaaattggtgggtggtgtatttgagaagataatcattgcttatgtcaaatggagctgaatttgataaaaacccaaaatacagctatgaagtgctgggcaagtttactttttttctgatgtttcctacaactaaaaataaattaataaatttatataaattcta

SEQ ID NO: 33671 - DNA, 745 bp, Homo sapiens
  source 1..745: mol_type = unassigned DNA
agtgtgaccctccctttctgggcctcagttgagaaacctgaagctcaggagaggagtcactcccctggcagatgggtggctgggccagaagcagataccaggctttctgactcctgctctaggattctcaccacgtactggctagacttatacttctcaaatcttaatttcctaaaggatggcctgcctccttcgctcatttcagagaatttctgcaggggttttcttcttagcactttggggcatggttgtaggtgacaagctgctggtggtccctcaggacggaagccactggcttagtatgaaggatatagttgaggttctcagtgaccggggtcatgagattgtagtggtggtgcctgaagttaatttgcttttgaaagaatccaaatactacacaagaaaaatctatccagtgccgtatgaccaagaagagctgaagaaccgttaccaatcatttggaaacaatcactttgctgagcgatcattcctaactgctcctcagacagagtacaggaataacatgattgttattggcctgtacttcatcaactgccagagcctcctgcaggacagggacaccctgaacttctttaaggagagcaagtttgatgctcttttcacagacccagccttaccctgtggggtgatcctggctgagtatttgggcctaccatctgtgtacctcttcaggggttttccgtgttccctggagcatacattcagcagaagcccagaccctgtg

SEQ ID NO: 33672 - DNA, 2333 bp, Homo sapiens
  source 1..2333: mol_type = unassigned DNA
atggctcgtgcagggtggactggcctccttcccctatatgtgtgtctactgctgacctgtggctttgccaaggcagggaagctgctggtagtgcccatggatgggagccactggttcaccatgcagtcggtggtggagaaactcatcctcagggggcatgaggtggtcgtagtcatgccagaggtgagttggcaactgggaagatcactgaattgcacagtgaagacttactcaacctcatacactctggaggatcaggaccgggagttcatggtttttgccgatgctcgctggacggcaccattgcgaagtgcattttctctattaacaagttcatccaatggtatttttgacttatttttttcaaattgcaggagtttgtttaatgaccgaaaattagtagaatacttaaaggagagttgttttgatgcagtgtttctcgatccttttgatgcctgtggcttaattgttgccaaatatttctccctcccctctgtggtcttcgccaggggaatattttgccactatcttgaagaaggtgcacagtgccctgctcctctttcctatgtccccagacttctcttagggttctcagacgccatgactttcaaggagagagtatggaaccacatcatgcacttggaggaacatttattttgcccctattttttcaaaaatgtcttagaaatagcctctgaaattctccaaacccctgtcacggcatatgatctctacagccacacatcaatttggttgttgcgaactgactttgttttggagtatcccaaacccgtgatgcccaatatgatcttcattggtggtatcaactgtcatcagggaaagccagtgcctatggaatttgaagcctacattaatgcttctggagaacatggaattgtggttttctctttgggatcaatggtctcagaaattccagagaagaaagctatggcaattgctgatgctttgggcaaaatccctcagacagtcctgtggcggtacactggaacccgaccatcgaatcttgcgaacaacacgatacttgttaagtggctaccccaaaacgatctgcttggtcacccgatgacccgtgcctttatcacccatgctggttcccatggtgtttatgaaagcatatgcaatggcgttcccatggtgatgatgcccttgtttggtgatcagatggacaatgcaaagcgcatggagactaagggagctggagtgaccctgaatgttctggaaatgacttctgaagatttagaaaatgctctaaaagcagtcatcaatgacaaaagttacaaggagaacatcatgcgcctctccagccttcacaaggaccgcccggtggagccgctggacctggccgtgttctgggtggagtttgtgatgaggcacaagggcgcgccacacctgcgccccgcagcccacgacctcacctggtaccagtaccattccttggacgtgattggtttcctcttggccgtcgtgctgacagtggccttcatcacctttaaatgttgtgcttatggctaccggaaatgcttggggaaaaaagggcgagttaagaaagcccacaaatccaagacccattgagaagtgggtgggaaataaggtaaaattttgaaccattccctagtcatttccaaacttgaaaacagaatcagtgttaaattcattttattcttattaaggaaatactttgcataaattaatcagccccagagtgctttaaaaaattctcttaaataaaaataatagactcgctagtcagtaaagatatttgaatatgtatcgtgccccctctggtgtctttgatcaggatgacatgtgccatttttcagaggacgtgcagacaggctggcattctagattacttttcttactctgaaacatggcctgtttgggagtgcgggattcaaaggtggtcccacggctgcccctactgcaaatggcagttttaatcttatcttttggcttctgcagatggttgcaattgatccttaaccaataatggtcagtcctcatctctgtcgtgcttcataggtgccaccttgtgtgtttaaagaagggaagctttgtacctttagagtgtaggtgaaatgaatgaatggcttggagtgcactgagaacagcatatgatttcttgctttggggaaaaagaatgatgctatgaaattggtgggtggtgtatttgagaagataatcattgcttatgtcaaatggagctgaatttgataaaaacccaaaatacagctatgaagtgctgggcaagtttactttttttctgatgtttcctacaactaaaaataaattaataaatttatataaattct

SEQ ID NO: 33673 - DNA, 2407 bp, Homo sapiens
  source 1..2407: mol_type = unassigned DNA
cttccgcctactgtatcatagcagcttagaatcccagctgctggctcgggctgcagttctctcatggctcgcacagggtggaccagccccattcccctatgtgtttctctgctgctgacctgtggctttgctgaggcagggaagctgctggtagtgcccatggatgggagtcactggttcaccatgcagtcggtggtggagaaacttatcctcagggggcatgaggtggttgtagtcatgccagaggtgagttggcaactgggaaaatcactgaattgcacagtgaagacttactcaacctcatacactctggaggatctggaccgggaattcatggatttcgccgatgctcaatggaaagcacaagtacgaagtttgttttctctatttctgagttcatccaatggtttttttaacttatttttttcgcattgcaggagtttgtttaatgaccgaaaattagtagaatacttaaaggagagttcttttgatgcggtgtttcttgatccttttgatgcctgtggcttaattgttgccaaatatttctccctcccctctgtggtcttcgccaggggaatagcttgccactatcttgaagaaggtgcacagtgccctgctcctctttcctatgtccccagaattctcttagggttctcagatgccatgactttcaaggagagagtacggaaccacatcatgcacttggaggaacatttattttgccagtatttttccaaaaatgccctagaaatagcctctgaaattctccaaacacctgtcacagcatatgatctctacagccacacatcaatttggttgttgcgaacagactttgttttggactatcccaaacccgtgatgcccaatatgatcttcattggtggtatcaactgccatcagggaaagccattgcctatggaatttgaagcctacattaatgcttctggagaacatggaattgtggttttctctttgggatcaatggtctcagaaattccagagaagaaagctatggcaattgctgatgctttgggcaaaatccctcagacagtcctgtggcggtacactggaacccgaccatcgaatcttgcgaacaacacgatacttgttaagtggctaccccaaaacgatctgcttggtcacccgatgacccgtgcctttatcacccatgctggttcccatggtgtttatgaaagcatatgcaatggcgttcccatggtgatgatgcccttgtttggtgatcagatggacaatgcaaagcgcatggagactaagggagctggagtgaccctgaatgttctggaaatgacttctgaagatttagaaaatgctctaaaagcagtcatcaatgacaaaagttacaaggagaacatcatgcgcctctccagccttcacaaggaccgcccggtggagccgctggacctggccgtgttctgggtggagtttgtgatgaggcacaagggcgcgccacacctgcgccccgcagcccacgacctcacctggtaccagtaccattccttggacgtgattggtttcctcttggccgtcgtgctgacagtggccttcatcacctttaaatgttgtgcttatggctaccggaaatgcttggggaaaaaagggcgagttaagaaagcccacaaatccaagacccattgagaagtgggtgggaaataaggtaaaattttgaaccattccctagtcatttccaaacttgaaaacagaatcagtgttaaattcattttattcttattaaggaaatactttgcataaattaatcagccccagagtgctttaaaaaattctcttaaataaaaataatagactcgctagtcagtaaagatatttgaatatgtatcgtgccccctctggtgtctttgatcaggatgacatgtgccatttttcagaggacgtgcagacaggctggcattctagattacttttcttactctgaaacatggcctgtttgggagtgcgggattcaaaggtggtcccacggctgcccctactgcaaatggcagttttaatcttatcttttggcttctgcagatggttgcaattgatccttaaccaataatggtcagtcctcatctctgtcgtgcttcataggtgccaccttgtgtgtttaaagaagggaagctttgtacctttagagtgtaggtgaaatgaatgaatggcttggagtgcactgagaacagcatatgatttcttgctttggggaaaaagaatgatgctatgaaattggtgggtggtgtatttgagaagataatcattgcttatgtcaaatggagctgaatttgataaaaacccaaaatacagctatgaagtgctgggcaagtttactttttttctgatgtttcctacaactaaaaataaattaataaatttatataaattctatttaagtgtt

SEQ ID NO: 33674 - DNA, 2416 bp, Homo sapiens
  source 1..2416: mol_type = unassigned DNA
ggttttgtgctggtatttctcccacctactgtatcataggagcttagattcccagctgcttgctctcagctgcagttctctgatggcttgcacagggtggaccagcccccttcctctatgtgtgtgtctgctgctgacctgtggctttgccgaggcagggaagctactggtagtgcccatggatgggagccactggttcaccatgaggtcggtggtggagaaactcattctcagggggcatgaggtggttgtagtcatgccagaggtgagttggcaactgggaagatcactgaattgcacagtgaagacttattcaacttcatataccctggaggatctggaccgggagttcaaggcttttgcccatgctcaatggaaagcacaagtacgaagtatatattctctattaatgggttcatacaatgacatttttgacttatttttttcaaattgcaggagtttgtttaaagacaaaaaattagtagaatacttaaaggagagttcttttgatgcagtgtttctcgatccttttgataactgtggcttaattgttgccaaatatttctccctcccctccgtggtcttcgccaggggaatactttgccactatcttgaagaaggtgcacagtgccctgctcctctttcctatgtccccagaattctcttagggttctcagatgccatgactttcaaggagagagtacggaaccacatcatgcacttggaggaacatttattatgccaccgttttttcaaaaatgccctagaaatagcctctgaaattctccaaacacctgttacggagtatgatctctacagccacacatcaatttggttgttgcgaacggactttgttttggactatcccaaacccgtgatgcccaacatgatcttcattggtggtatcaactgccatcagggaaagccgttgcctatggaatttgaagcctacattaatgcttctggagaacatggaattgtggttttctctttgggatcaatggtctcagaaattccagagaagaaagctatggcaattgctgatgctttgggcaaaatccctcagacagtcctgtggcggtacactggaacccgaccatcgaatcttgcgaacaacacgatacttgttaagtggctaccccaaaacgatctgcttggtcacccgatgacccgtgcctttatcacccatgctggttcccatggtgtttatgaaagcatatgcaatggcgttcccatggtgatgatgcccttgtttggtgatcagatggacaatgcaaagcgcatggagactaagggagctggagtgaccctgaatgttctggaaatgacttctgaagatttagaaaatgctctaaaagcagtcatcaatgacaaaagttacaaggagaacatcatgcgcctctccagccttcacaaggaccgcccggtggagccgctggacctggccgtgttctgggtggagtttgtgatgaggcacaagggcgcgccacacctgcgccccgcagcccacgacctcacctggtaccagtaccattccttggacgtgattggtttcctcttggccgtcgtgctgacagtggccttcatcacctttaaatgttgtgcttatggctaccggaaatgcttggggaaaaaagggcgagttaagaaagcccacaaatccaagacccattgagaagtgggtgggaaataaggtaaaattttgaaccattccctagtcatttccaaacttgaaaacagaatcagtgttaaattcattttattcttattaaggaaatactttgcataaattaatcagccccagagtgctttaaaaaattctcttaaataaaaataatagactcgctagtcagtaaagatatttgaatatgtatcgtgccccctctggtgtctttgatcaggatgacatgtgccatttttcagaggacgtgcagacaggctggcattctagattacttttcttactctgaaacatggcctgtttgggagtgcgggattcaaaggtggtcccacggctgcccctactgcaaatggcagttttaatcttatcttttggcttctgcagatggttgcaattgatccttaaccaataatggtcagtcctcatctctgtcgtgcttcataggtgccaccttgtgtgtttaaagaagggaagctttgtacctttagagtgtaggtgaaatgaatgaatggcttggagtgcactgagaacagcatatgatttcttgctttggggaaaaagaatgatgctatgaaattggtgggtggtgtatttgagaagataatcattgcttatgtcaaatggagctgaatttgataaaaacccaaaatacagctatgaagtgctgggcaagtttactttttttctgatgtttcctacaactaaaaataaattaataaatttatataaattcta

SEQ ID NO: 33675 - DNA, 1698 bp, Homo sapiens
  source 1..1698: mol_type = unassigned DNA
acattcggcttcttcctaatgtcaaatgagtgctgttaaagttcctccaggaaacttcagcagagaaaaacatttgcttcacatctcatcaaatcttctgcatcaagccacatcatgttaaacaaccttctgctgttctcccttcagataagtctcataggaaccactcttggtgggaatgttttgatttggccaatggaaggtagtcattggctaaatgttaagataattatagatgagctcattaaaaaggagcataatgtgactgtcctagttgcctctggtgcacttttcatcacaccaacctctaacccatctctgacatttgaaatatatagggtgccctttggcaaagaaagaatagaaggagtaattaaggacttcgttttgacatggctggaaaatagaccatctccttcaaccatttggagattctatcaggagatggccaaagtaatcaaggacttccacatggtgtctcaggagatctgtgatggcgttcttaaaaaccaacagctgatggcaaagctaaagaaaagcaagtttgaagtcctggtgtctgatccagtatttccttgtggcgatatagtagctttaaaacttggaattccatttatgtactccttgaggttttctccagcctcaacagtggaaaagcactgtgggaaggtaccataccctccttcctatgttcctgctgttttatcagaactcaccgaccaaatgtctttcactgacagaataagaaatttcatctcctaccacctacaggactacatgtttgaaactctttggaaatcatgggattcatactatagtaaagctttaggtggactcttactctgttgcccaggctggagtgcagtggcggatcttggctcactgcaacctctgcttcccgggttcaagcgattctcccgcctcagcctccattgtagttgggattacaggctgccagcaggaagacccactacgttatgtgagactatggggaaagctgaaatttggttaatccgaacatattgggattttgaatttcctcgtccatacttacctaattttgagtttgttggaggattgcactgcaaacctgccaaacctttacctaaggttttatggagatacaaaggaaagaaaccagccacattaggaaacaatactcagctctttgattggataccccagaatgatcttcttggacatcccaaaaccaaagcttttatcactcatggtggaactaatgggatctacgaagctatttaccacggagtccctatggtgggagttcccatgtttgctgatcagcctgataacattgctcacatgaaggccaaaggagcagctgtggaagtgaacctaaacacaatgacaagtgtggatttgcttagcgctttgagaacagtcattaatgaaccttcttataaagagaatgctatgaggttatcaagaattcaccatgatcaacctgtaaagcccctggatcgagcagtcttctggatcgagtttgtcatgcgccacaaaggagccaagcaccttcgggttgcagcccatgacctcacctggttccagtaccactctttggatgtaattgggttcttgctggtctgtgtgacaacggctatatttttggtcatacaatgttgtttgttttcctgtcaaaaatttggtaagataggaaagaagaaaaaaagagaatag

SEQ ID NO: 33676 - DNA, 2376 bp, Homo sapiens
  source 1..2376: mol_type = unassigned DNA
ttacattcggcttcttcctaatgtcaaatgagtgctgttaaagttcctccaggaaacttcagcagagaaaaacatttgcttcacatctcatcaaatcttctgcatcaagccacatcatgttaaacaaccttctgctgttctcccttcagataagtctcataggaaccactcttggtgggaatgttttgatttggccaatggaaggtagtcattggctaaatgttaagataattatagatgagctcattaaaaaggagcataatgtgactgtcctagttgcctctggtgcacttttcatcacaccaacctctaacccatctctgacatttgaaatatatagggtgccctttggcaaagaaagaatagaaggagtaattaaggacttcgttttgacatggctggaaaatagaccatctccttcaaccatttggagattctatcaggagatggccaaagtaatcaaggacttccacatggtgtctcaggagatctgtgatggcgttcttaaaaaccaacagctgatggcaaagctaaagaaaagcaagtttgaagtcctggtgtctgatccagtatttccttgtggcgatatagtagctttaaaacttggaattccatttatgtactccttgaggttttctccagcctcaacagtggaaaagcactgtgggaaggtaccataccctccttcctatgttcctgctgttttatcagaactcaccgaccaaatgtctttcactgacagaataagaaatttcatctcctaccacctacaggactacatgtttgaaactctttggaaatcatgggattcatactatagtaaagctttagatggtagccattggttaaatattaagattattctagaagagttgattcaaagaaatcacaatgtgactgtactggcttcatcagcaactctattcatcaactccaatcccgattctcctgtgaattttgaagtgatacctgtttcctacaagaagagcaatatagattccttaattgagcatatgataatgctgtggattgaccatagaccaactcctctcacaatatgggctttctacaaagaactaggaaaacttctagacactttctttcaaattaacatacaactctgtgatggtgtactaaagaacccaaagttgatggcaagacttcagaaaggtggttttgatgtgttggtagcagacccagtaacaatctgtggtgatcttgttgctctgaaattaggaattccatttatgtacacattgaggttctctccagcatcaacagtggagagacactgtgggaaaatcccagcaccagtctcctatgtaccggcagccttatcagagctcactgaccagatgacctttggtgaaaggattaaaaataccatatcttattctctgcaagactatatatttcagtcctactggggagaatggaattcatactatagcaaaattttaggaagacccactacgttatgtgagactatggggaaagctgaaatttggttaatccgaacatattgggattttgaatttcctcgtccatacttacctaattttgagtttgttggaggattgcactgcaaacctgccaaacctttacctaaggttttatggagatacaaaggaaagaaaccagccacattaggaaacaatactcagctctttgattggataccccagaatgatcttcttggacatcccaaaaccaaagcttttatcactcatggtggaactaatgggatctacgaagctatttaccacggagtccctatggtgggagttcccatgtttgctgatcagcctgataacattgctcacatgaaggccaaaggagcagctgtggaagtgaacctaaacacaatgacaagtgtggatttgcttagcgctttgagaacagtcattaatgaaccttcttataaagagaatgctatgaggttatcaagaattcaccatgatcaacctgtaaagcccctggatcgagcagtcttctggatcgagtttgtcatgcgccacaaaggagccaagcaccttcgggttgcagcccatgacctcacctggttccagtaccactctttggatgtaattgggttcttgctggtctgtgtgacaacggctatatttttggtcatacaatgttgtttgttttcctgtcaaaaatttggtaagataggaaagaagaaaaaaagagaataggtcaagaaaaagaggaaatatatatatttttaagtttggcaaaatcctgagtagtgtagtcctattaattccagacaaaaggagtttaacaaaaacacgtctcccatcctgtttccaaattttctatttctctacctgcgataagcctactgataaagcctagattttggcatgatta

SEQ ID NO: 33677 - DNA, 2566 bp, Homo sapiens
  source 1..2566: mol_type = unassigned DNA
atggtttccataagggattttaccatgcctaagaagtttgtccagatgctggtttttaatttgactctgactgaagttgttctaagtgggaatgtgttaatttggcctacagatggtagccattggttaaatattaagattattctagaagagttgattcaaagaaatcacaatgtgactgtactggcttcatcagcaactctattcatcaactccaatcccgattctcctgtgaattttgaagtgatacctgtttcctacaagaagagcaatatagattccttaattgagcatatgataatgctgtggattgaccatagaccaactcctctcacaatatgggctttctacaaagaactaggaaaacttctagacactttctttcaaattaacatacaactctgtgatggtgtactaaagaacccaaagttgatggcaagacttcagaaaggtggttttgatgtgttggtagcagacccagtaacaatctgtggtgatcttgttgctctgaaattaggaattccatttatgtacacattgaggttctctccagcatcaacagtggagagacactgtgggaaaatcccagcaccagtctcctatgtaccggcagccttatcagagctcactgaccagatgacctttggtgaaaggattaaaaataccatatcttattctctgcaagactatatatttcagtcctactggggagaatggaattcatactatagcaaaattttaggaagacccactacgttatgtgagactatggggaaagctgaaatttggttaatccgaacatattgggattttgaatttcctcgtccatacttacctaattttgagtttgttggaggattgcactgcaaacctgccaaacctttacctaaggaaatggaagaatttatccagagctcaggtaaaaatggtgttgtggtgttttctctgggatcaatggtcaaaaaccttacagaagaaaaggccaatcttattgcctcagcccttgcccagattccacagaaggttttatggagatacaaaggaaagaaaccagccacattaggaaacaatactcagctctttgattggataccccagaatgatcttcttggacatcccaaaaccaaagcttttatcactcatggtggaactaatgggatctacgaagctatttaccacggagtccctatggtgggagttcccatgtttgctgatcagcctgataacattgctcacatgaaggccaaaggagcagctgtggaagtgaacctaaacacaatgacaagtgtggatttgcttagcgctttgagaacagtcattaatgaaccttcttataaagagaatgctatgaggttatcaagaattcaccatgatcaacctgtaaagcccctggatcgagcagtcttctggatcgagtttgtcatgcgccacaaaggagccaagcaccttcgggttgcagcccatgacctcacctggttccagtaccactctttggatgtaattgggttcttgctggtctgtgtgacaacggctatatttttggtcatacaatgttgtttgttttcctgtcaaaaatttggtaagataggaaagaagaaaaaaagagaataggtcaagaaaaagaggaaatatatatatttttaagtttggcaaaatcctgagtagtgtagtcctattaattccagacaaaaggagtttaacaaaaacacgtctcccatcctgtttccaaattttctatttctctacctgcgataagcctactgataaagcctagattttggcatgattattattaacttgtgagttatagtcttctatttttcctttgtctctccctgctgactataccctcttcctgtcacttttctgacacaaggatactacctaattttaaatatgttctattcatagtatcaaattattttatcgttaaccttaattaatgattaacaatatgctgaatcctggtaatgcatacagtgtagatggaatttgataggtgtaaggaagagtcaaattcacaaatttccatataccaaacaaatcagggagccaccgtaggagagtagtgtgttatgagaaaggtaatgatttccttttttaataaaaacaaactcttctgcttgctcaatgtttcaggagttagagaatgaattttaagtgtgacgtgcgtccctattaaatgtctacaaaattttcattaagcatatctagaaaatcacggcataacttgcctgcctttcttcaacatatattcttatataacctgtagtggaagatttgggtactgtctttaataaatcaatcaatcgactcttttatttcaaggagaaagttctatgttatatgttgaaggtgaacagatcatatttagaggatataacaattagaaatctagaaaataattatcatttttataaaatttttagtcaactgtacaaataattacataaaacatcaattaattatgcttaaaaatcactaatgttcataatatataatcactatttgtaatcaaaagtttaattttatgccaaaaaataaaaaatgcttacttggaatttga

SEQ ID NO: 33678 - DNA, 2595 bp, Homo sapiens
  source 1..2595: mol_type = unassigned DNA
agcagagaaaaacatttgcttcacatctcatcaaatcttctgcatcaagccacatcatgttaaacaaccttctgctgttctcccttcagataagtctcataggaaccactcttggtgggaatgttttgatttggccaatggaaggtagtcattggctaaatgttaagataattatagatgagctcattaaaaaggagcataatgtgactgtcctagttgcctctggtgcacttttcatcacaccaacctctaacccatctctgacatttgaaatatatagggtgccctttggcaaagaaagaatagaaggagtaattaaggacttcgttttgacatggctggaaaatagaccatctccttcaaccatttggagattctatcaggagatggccaaagtaatcaaggacttccacatggtgtctcaggagatctgtgatggcgttcttaaaaaccaacagctgatggcaaagctaaagaaaagcaagtttgaagtcctggtgtctgatccagtatttccttgtggcgatatagtagctttaaaacttggaattccatttatgtactccttgaggttttctccagcctcaacagtggaaaagcactgtgggaaggtaccataccctccttcctatgttcctgctgttttatcagaactcaccgaccaaatgtctttcactgacagaataagaaatttcatctcctaccacctacaggactacatgtttgaaactctttggaaatcatgggattcatactatagtaaagctttaggaagacccactacgttatgtgagactatggggaaagctgaaatttggttaatccgaacatattgggattttgaatttcctcgtccatacttacctaattttgagtttgttggaggattgcactgcaaacctgccaaacctttacctaaggaaatggaagaatttatccagagctcaggtaaaaatggtgttgtggtgttttctctgggatcaatggtcaaaaaccttacagaagaaaaggccaatcttattgcctcagcccttgcccagattccacagaaggttttatggagatacaaaggaaagaaaccagccacattaggaaacaatactcagctctttgattggataccccagaatgatcttcttggacatcccaaaaccaaagcttttatcactcatggtggaactaatgggatctacgaagctatttaccacggagtccctatggtgggagttcccatgtttgctgatcagcctgataacattgctcacatgaaggccaaaggagcagctgtggaagtgaacctaaacacaatgacaagtgtggatttgcttagcgctttgagaacagtcattaatgaaccttcttataaagagaatgctatgaggttatcaagaattcaccatgatcaacctgtaaagcccctggatcgagcagtcttctggatcgagtttgtcatgcgccacaaaggagccaagcaccttcgggttgcagcccatgacctcacctggttccagtaccactctttggatgtaattgggttcttgctggtctgtgtgacaacggctatatttttggtcatacaatgttgtttgttttcctgtcaaaaatttggtaagataggaaagaagaaaaaaagagaataggtcaagaaaaagaggaaatatatatatttttaagtttggcaaaatcctgagtagtgtagtcctattaattccagacaaaaggagtttaacaaaaacacgtctcccatcctgtttccaaattttctatttctctacctgcgataagcctactgataaagcctagattttggcatgattattattaacttgtgagttatagtcttctatttttcctttgtctctccctgctgactataccctcttcctgtcacttttctgacacaaggatactacctaattttaaatatgttctattcatagtatcaaattattttatcgttaaccttaattaatgattaacaatatgctgaatcctggtaatgcatacagtgtagatggaatttgataggtgtaaggaagagtcaaattcacaaatttccatataccaaacaaatcagggagccaccgtaggagagtagtgtgttatgagaaaggtaatgatttccttttttaataaaaacaaactcttctgcttgctcaatgtttcaggagttagagaatgaattttaagtgtgacgtgcgtccctattaaatgtctacaaaattttcattaagcatatctagaaaatcacggcataacttgcctgcctttcttcaacatatattcttatataacctgtagtggaagatttgggtactgtctttaataaatcaatcaatcgactcttttatttcaaggagaaagttctatgttatatgttgaaggtgaacagatcatatttagaggatataacaattagaaatctagaaaataattatcatttttataaaatttttagtcaactgtacaaataattacataaaacatcaattaattatgcttaaaaatcactaatgttcataatatataatcactatttgtaatcaaaagtttaattttatgccaaaaaataaaaaatgcttacttggaatttga

SEQ ID NO: 33679 - DNA, 586 bp, Homo sapiens
  source 1..586: mol_type = unassigned DNA
acattcggcttcttcctaatgtcaaatgagtgctgttaaagttcctccaggaaacttcagagaaaaacatttgcttcacatctcatcaaatcttctgcatcaagccacatcatgttaaacaaccttctgctgttctcccttcagataagtctcataggaaccactcttggtgggaatgttttgatttggccaatggaaggtagtcattggctaaatgttaagataattatagatgagctcattaaaaaggagcataatgtgactgtcctagttgcctctggtgcacttttcatcacaccaacctctaacccatctctgacatttgaaatatatagggtgccctttggcaaagaaagaatagaaggagtaattaaggacttcgttttgacatggctggaaaatagaccatctccttcaaccatttggagattctatcaggagatggccaaagtaatcaaggacttccacatggtgtctcaggagatctgtgatggcgttcttaaaaaccaacagctgatggcaaagctaaagaaaagcaagtttgaagtcctggtgtctgatccagtatttccttgtggcgatatag

SEQ ID NO: 33680 - DNA, 2088 bp, Homo sapiens
  source 1..2088: mol_type = unassigned DNA
tgcaccaggatgactctgaaatggacttcagttcttctgctgatacatctcagttgttactttagctctgggagttgtggaaaagtgctggtgtgggccgcagaatacagccattggatgaatatgaagacaatcctgaaagagcttgttcagagaggtcatgaggtgactgtactggcatcttcagcttccattctttttgatcccaatgatgcatccactcttaaatttgaagtttatcctacatctttaactaaaactgaatttgagaatatcatcatgcaacaggttaagagatggtcagacattcgaaaagatagcttttggttatatttttcacaagaacaagaaatcctgtgggaattatatgacatatttagaaacttctgtaaagatgtagtttcaaataagaaagttatgaaaaaactacaagagtcaagatttgacatcgtttttgcagatgctgtttttccctgtggtgagctgctggctgcgctacttaacatacggtttgtgtacagtctccgctttactcctggctacacaattgaaaggcacagtggaggactgattttccctccttcctacatacctattgttatgtcaaaattaagtgatcaaatgactttcatggagagggtaaaaaatatgatctatgtgctttattttgacttttggttccaaatgtctgatatgaagaagtgggatcagttttacagtgaagttttaggaagacccactaccttatttgagacaatgggaaaagctgacatatggcttatgcgaaactcctggagttttcaatttcctcatccattcttaccaaacgttgattttgttggaggattccactgcaaacctgccaaacccctacctaaggaaatggaggagtttgtacagagctctggagaaaatggtgttgtggtgttttctctggggtcagtgataagtaacatgacagcagaaagggccaatgtaattgcaacagcccttgccaagatcccacaaaaggttctgtggagatttgacgggaataaaccagatgccttaggtctcaatactcggctgtacaagtggataccccagaatgaccttctaggtcatccaaaaaccagagcttttataactcatggtggagccaatggcatctatgaggcaatctaccatgggatccctatggtgggcattccattgttttttgatcaacctgataacattgctcacatgaaggccaagggagcagctgttagattggacttcaacacaatgtcgagtacagacctgctgaatgcactgaagacagtaattaatgatcctttatataaagagaatattatgaaattatcaagaattcaacatgatcaaccagtaaagcccctggatcgagcagtcttctggattgaatttgtcatgccccacaaaggagccaaacaccttcgagttgcagcccatgacctcacctggttccagtaccactctttggatgtgattgggtttctgctggcctgtgtggcaactgtgatatttatcatcacaaagttttgtctgttttgtttctggaagtttgctagaaaagggaagaagggaaaaagagattagttatgtctgacatttgaagctggaaaaccagatagataggacaacttcagtttattccagcaagaaagaaaagattgttatgcaagatttctttcttcctgtgacaaaaaaaaaaaaaaaaaaaaaattttcaaatctaccttgtcaagtaaaaatttgtttttcagagatttaccacccaggtaatggttagaaatattttgtggcaatgaagaaaatactaggaaaattaaaaaataatataaagccatttgagctcatattgaaatttgttgcacttatattgagatttgttgtttgaattcacaagttacatgaaaaaatttactcagcttaactatatttcacacattttacataaacacaagaacattaagaagtctactgacagtatcagtagtcacatcctcagaataatttggcttcattttgaacaggattctgttgttttaactgttgctaaagaaactattacatagttaaattgta

SEQ ID NO: 33681 - DNA, 2077 bp, Homo sapiens
  source 1..2077: mol_type = unassigned DNA
taagaccaggatgtctctgaaatggacgtcagtctttctgctgatacagctcagttgttactttagctctggaagctgtggaaaggtgctagtgtggcccacagaatacagccattggataaatatgaagacaatcctggaagagcttgttcagaggggtcatgaggtgactgtgttgacatcttcggcttctactcttgtcaatgccagtaaatcatctgctattaaattagaagtttatcctacatctttaactaaaaattatttggaagattctcttctgaaaattctcgatagatggatatatggtgtttcaaaaaatacattttggtcatatttttcacaattacaagaattgtgttgggaatattatgactacagtaacaagctctgtaaagatgcagttttgaataagaaacttatgatgaaactacaagagtcaaagtttgatgtcattctggcagatgcccttaatccctgtggtgagctactggctgaactatttaacataccctttctgtacagtcttcgattctctgttggctacacatttgagaagaatggtggaggatttctgttccctccttcctatgtacctgttgttatgtcagaattaagtgatcaaatgattttcatggagaggataaaaaatatgatacatatgctttattttgacttttggtttcaaatttatgatctgaagaagtgggaccagttttatagtgaagttctaggaagacccactacattatttgagacaatggggaaagctgaaatgtggctcattcgaacctattgggattttgaatttcctcgcccattcttaccaaatgttgattttgttggaggacttcactgtaaaccagccaaacccctgcctaaggaaatggaagagtttgtgcagagctctggagaaaatggtattgtggtgttttctctggggtcgatgatcagtaacatgtcagaagaaagtgccaacatgattgcatcagcccttgcccagatcccacaaaaggttctatggagatttgatggcaagaagccaaatactttaggttccaatactcgactgtacaagtggttaccccagaatgaccttcttggtcatcccaaaaccaaagcttttataactcatggtggaaccaatggcatctatgaggcgatctaccatgggatccctatggtgggcattcccttgtttgcggatcaacatgataacattgctcacatgaaagccaagggagcagccctcagtgtggacatcaggaccatgtcaagtagagatttgctcaatgcattgaagtcagtcattaatgaccctgtctataaagagaatgtcatgaaattatcaagaattcatcatgaccaaccaatgaagcccctggatcgagcagtcttctggattgagtttgtcatgcgccacaaaggagccaagcaccttcgagtcgcagctcacaacctcacctggatccagtaccactctttggatgtgatagcattcctgctggcctgcgtggcaactgtgatatttatcatcacaaaattttgcctgttttgtttccgaaagcttgccaaaaaaggaaagaagaagaaaagagattagttatatcaaaagcctgaagtggaatgactgaaagatgggactcctcctttatttcagcatggagggttttaaatggaggatttcctttttcctgtgacaaaacatcttttcacaacttaccttgttaagacaaaatttattttccagggatttaatacgtactttagctgaattattctatgtcaatgatttttaagctatgaaaaatacaatggggggaaggatagcatttggagatatacctaatgttaaatgacgagttactggatgcagcacgccaacatggcacatgtatacatatgtagctaacctgcacgttgtgcacatgtaccctaaaacttaaagtataatttaaaaaaagcaaaaaaaaaaaatacaactcttttttttaaaccaggaaggaaaatgtgaacatggaaacaacttctagtattggatctgaaaataaagtgtcatccaagccataaaaaaaaa

SEQ ID NO: 33682 - DNA, 2077 bp, Homo sapiens
  source 1..2077: mol_type = unassigned DNA
gaaagaaacaacaactggaaaagaagcactgcataagaccaggatgtctctgaaatggatgtcagtctttctgctgatgcagctcagttgttactttagctctgggagttgtggaaaggtgctggtgtggcccacagaatacagccattggataaatatgaagacaatcctggaagagcttgttcagaggggtcatgaggtgattgtgttgacatcttcggcttctattcttgtcaatgccagtaaatcatctgctattaaattagaagtttatcctacatctttaactaaaaatgatttggaagatttttttatgaaaatgttcgatagatggacatatagtatttcaaaaaatacattttggtcatatttttcacaactacaagaattgtgttgggaatattctgactataatataaagctctgtgaagatgcagttttgaacaagaaacttatgagaaaactacaagagtcaaaatttgatgtccttctggcagatgccgttaatccctgtggtgagctgctggctgagctacttaacataccctttctgtacagtctccgcttctctgttggctacacagttgagaagaatggtggaggatttctgttccctccttcctatgtacctgttgttatgtcagaattaagtgatcaaatgattttcatggagaggataaaaaatatgatatatatgctttattttgacttttggtttcaagcatatgatctgaagaagtgggaccagttttatagtgaagttctaggaagacccactacattatttgagacaatggggaaagctgaaatgtggctcattcgaacctattgggattttgaatttcctcgcccattcttaccaaatgttgattttgttggaggacttcactgtaaaccagccaaacccttgcctaaggaaatggaagagtttgtgcagagctctggagaaaatggtattgtggtgttttctctggggtcgatgatcagtaacatgtcagaagaaagtgccaacatgattgcatcagcccttgcccagatcccacaaaaggttctatggagatttgatggcaagaagccaaatactttaggttccaatactcgactgtataagtggttaccccagaatgaccttcttggtcatcccaaaaccaaagcttttataactcatggtggaaccaatggcatctatgaggcaatctaccatgggatccctatggtgggcattcccttgtttgcggatcaacatgataacattgctcacatgaaagccaagggagcagccctcagtgtggacatcaggaccatgtcaagtagagatttgctcaatgcattgaagtcagtcattaatgaccctatctataaagagaatatcatgaaattatcaagaattcatcatgatcaaccggtgaagcccctggatcgagcagtcttctggattgagtttgtcatgcgccataaaggagccaagcaccttcgggtcgcagcccacaacctcacctggatccagtaccactctttggatgtgatagcattcctgctggcctgcgtggcaactatgatatttatgatcacaaaatgttgcctgttttgtttccgaaagcttgccaaaacaggaaagaagaagaaaagggattagttatatcaaaagcctgaagtggaatgaccaaaagatgggactcctcctttattccagcatggagggttttaaatggaggatttcctttttcctgcgacaaaacgtcttttcacaacttaccctgttaagtcaaaatttattttccaggaatttaatatgtactttagttggaattattctatgtcaatgatttttaagctatgaaaaataataatataaaaccttatgggcttatattgaaatttattattctaatccaaaagttaccccacacaaaagttactgagcttccttatgtttcacacattgtatttgaacacaaaacattaacaactccactcatagtatcaacattgttttgcaaatactcagaatattttggcttcattttgagcagaatttttgtttttaattttgccaatgaaatcttcaataattaaa

SEQ ID NO: 33683 - DNA, 1833 bp, Homo sapiens
  source 1..1833: mol_type = unassigned DNA
ggatggctctgaagtggacttcagttcttctgctgatacatctcggttgttactttagctctgggagttgtggaaaggtgctggtgtggaccggtgaatacagccattggatgaatatgaagacaatcctgaaagagcttgttcagagaggtcatgaggtgactgtactggcatcttcagcttccattctttttgatcccaatgacgcattcactcttaaactcgaagtttatcctacatctttaactaaaactgaatttgagaatatcatcatgcaacaggttaagagatggtcagacattcaaaaagatagcttttggttatatttttcacaagaacaagaaatcctgtgggaatttcatgacatatttagaaacttctgtaaagatgtagtttcaaataagaaagttatgaaaaaactacaagagtcaagatttgacatcatttttgcagatgctttttttccttgtggtgagctgctggctgcgctacttaacataccgtttgtgtacagtctctgcttcactcctggctacacaattgaaaggcacagtggaggactgattttccctccttcctacatacctgttgttatgtcaaaattaagtgatcaaatgactttcatggagagggtaaaaaacatgatctatgtgctttattttgacttttggttccaaatgtgtgatatgaagaagtgggatcagttttacagtgaagttttaggaagacccactaccttatttgagacaatggggaaagctgacatatggcttatgcgaaactcctggagttttcaatttcctcatccattcttaccaaacattgattttgttggaggactccactgcaaacctgccaaacccctacctaaggaaatggaggaatttgtacagagctctggtgaaaatggtgttgtggtgttttctctggggtcagtgataagtaacatgacagcagaaagggccaacgtaattgcaacagcccttgccaagatcccacaaaaggttctgtggagatttgatgggaataaaccagatgccttaggtctcaatactcggctgtataagtggataccccagaatgaccttctaggtcttccaaaaaccagagcttttataactcatggtggagccaatggcatctatgaggcaatctaccatgggatccctatggtaggcattccattgttttgggatcaacctgataacattgctcacatgaaggccaagggagcagctgttagactggacttccacacaatgtcgagtacagacctgctgaatgcactgaagacagtaattaatgatccttcatataaagagaatgttatgaaattatcaataattcaacatgatcaaccagtaaagcccctgcatcgagcagtcttctggattgaatttgtgatgtgccacaaaggagccaaacaccttcgagttgcagcccgtgacctcacctggttccagtaccactctttggatgtgattgggtttctgctggcctgtgtggcaactgtgatatttgtcgtcacaaagttttgtctgttttgtttctggaagtttgctagaaaagggaagaagggaaaaagagattagttatgtctgacatttgaagctggaaaaccagatagatgggttgacatcagtttattccagcaagaaagaaaagattgttatgcaagatttctttcttcctgtgacaaaaaaaaaaacttttcaaaatctaccttgtcaagtaaaaatttgtttttcagagatttaccacccaggtaatggttagaaatattctgtggcaatgaagaaaacactagggaaaataaaaaataatataaagcca

SEQ ID NO: 33684 - DNA, 1525 bp, Homo sapiens
  source 1..1525: mol_type = unassigned DNA
ggatggctctgaagtggacttcagttcttctgctgatacatctcggttgttactttagctctgggagttgtggaaaggtgctggtgtggaccggtgaatacagccattggatgaatatgaagacaatcctgaaagagcttgttcagagaggtcatgaggtgactgtactggcatcttcagcttccattctttttgatcccaatgacgcattcactcttaaactcgaagtttatcctacatctttaactaaaactgaatttgagaatatcatcatgcaacaggttaagagatggtcagacattcaaaaagatagcttttggttatatttttcacaagaacaagaaatcctgtgggaatttcatgacatatttagaaacttctgtaaagatgtagtttcaaataagaaagttatgaaaaaactacaagagtcaagatttgacatcatttttgcagatgctttttttccttgtggtgagctgctggctgcgctacttaacataccgtttgtgtacagtctctgcttcactcctggctacacaattgaaaggcacagtggaggactgattttccctccttcctacatacctgttgttatgtcaaaattaagtgatcaaatgactttcatggagagggtaaaaaacatgatctatgtgctttattttgacttttggttccaaatgtgtgatatgaagaagtgggatcagttttacagtgaagttttaggaagacccactaccttatttgagacaatggggaaagctgacatatggcttatgcgaaactcctggagttttcaatttcctcatccattcttaccaaacattgattttgttggaggactccactgcaaacctgccaaacccctacctaaggaaatggaggaatttgtacagagctctggtgaaaatggtgttgtggtgttttctctggggtcagtgataagtaacatgacagcagaaagggccaacgtaattgcaacagcccttgccaagatcccacaaaagatataaagagaatgttatgaaattatcaataattcaacatgatcaaccagtaaagcccctgcatcgagcagtcttctggattgaatttgtgatgtgccacaaaggagccaaacaccttcgagttgcagcccgtgacctcacctggttccagtaccactctttggatgtgattgggtttctgctggcctgtgtggcaactgtgatatttgtcgtcacaaagttttgtctgttttgtttctggaagtttgctagaaaagggaagaagggaaaaagagattagttatgtctgacatttgaagctggaaaaccagatagatgggttgacatcagtttattccagcaagaaagaaaagattgttatgcaagatttctttcttcctgtgacaaaaaaaaaaacttttcaaaatctaccttgtcaagtaaaaatttgtttttcagagatttaccacccaggtaatggttagaaatattctgtggcaatgaagaaaacactagggaaaataaaaaataatataaagcca

SEQ ID NO: 33685 - DNA, 2103 bp, Homo sapiens
  source 1..2103: mol_type = unassigned DNA
gacagaaaggagcagcaactggaaaacaagcattgcattgcatcaggatgtctatgaaatggacttcagctcttctgctgatacagctgagctgttactttagctctgggagttgtggaaaggtgctggtgtggcccacagaattcagccactggatgaatataaagacaatcctggatgaacttgtccagagaggtcatgaggtgactgtattggcatcttcagcttccatttctttcgatcccaacagcccatctactcttaaatttgaagtttatcctgtatctttaactaaaactgagtttgaggatattatcaagcagctggttaagagatgggcagaacttccaaaagacacattttggtcatatttttcacaagtacaagaaatcatgtggacatttaatgacatacttagaaagttctgtaaggatatagtttcaaataagaaacttatgaagaaactacaggagtcaagatttgatgttgttcttgcagatgctgttttcccctttggtgagctgctggccgagttacttaaaataccctttgtctacagcctccgcttctctcctggctacgcaattgaaaagcatagtggaggacttctgttccctccttcctatgtgcctgttgttatgtcagaactaagtgaccaaatgactttcatagagagggtaaaaaatatgatctatgtgctttattttgaattttggttccaaatatttgacatgaagaagtgggatcagttctacagtgaagttctaggaagacccactacgttatctgagacaatggcaaaagctgacatatggcttattcgaaactactgggattttcaatttcctcacccactcttaccaaatgttgagttcgttggaggactccactgcaaacctgccaaacccctaccgaaggaaatggaagagtttgtccagagctctggagaaaatggtgttgtggtgttttctctggggtcgatggtcagtaacacatcagaagaaagggccaatgtaattgcatcagcccttgccaagatcccacaaaaggttctgtggagatttgatgggaataaaccagatactttaggactcaatactcggctgtacaagtggataccccagaatgatcttcttggtcacccaaaaaccagagcttttataactcatggtggagccaatggcatctatgaggcaatctaccatggaatccctatggtgggcgttccattgtttgcagatcaacctgataacattgcacacatgaaggccaagggagcagctgttagtttggacttccacacaatgtcgagtacagacttactcaatgcactgaagacagtaattaatgatcctttatataaagagaatgctatgaaattatcaagaattcatcatgatcaaccagtgaagccccttgatcgagcagtcttctggattgaatttgtcatgcgccataaaggagccaagcaccttcgggttgcagcccacgacctcacctggttccagtaccactctttggatgtgactgggttcctgctggcctgtgtggcaactgtgatattcatcatcacaaaatgtctgttttgtgtctggaagtttgttagaacaggaaagaaggggaaaagagattaattacgtctgaggctggaagctgggaaacccaataaatgaactcctttagtttattacaacaagaagacgttgtgatacaagagattcctttcttcttgtgacaaaacatctttcaaaacttaccttgtcaagtcaaaatttgttttagtacctgtttaaccattagaaatatttcatgtcaaggaggaaaacattagggaaaacaaaaatgatataaagccatatgaggttatattgaaatgtattgagcttatattgaaatttattgttccaattcacaggttacatgaaaaaaaatttactaagcttaactacatgtcacacattgtacatggaaacaagaacattaagaagtccactgacagtatcagtactgttttgcaaatactcagcatactttggatccatttcatgcaggattgtgttgttttaactgttgttgaggaagctaataaataattaaattgta

SEQ ID NO: 33686 - DNA, 1932 bp, Homo sapiens
  source 1..1932: mol_type = unassigned DNA
attctcctgcctcagactccggagtagctgggactacaggcgccggccaccaagcctggctaattttttgtatttttagtagagatggggtttcaccgtgttagccaggatggtctggatctcctgacctcttgatccacccgccttggcctcccaaagtgctgggattaacggtgtgagccacctcgcccagcctggagccctttctttaatataaacataaatgttagtcaacttgtttaaatataaacatgtgagctgcttgagcacagggactacatcataatgttttttgctctcttacatgtctcatcaacgaatggattagatgctgttttcccctttggtgagctgctggccgagttacttaaaataccctttgtctacagcctccgcttctctcctggctacgcaattgaaaagcatagtggaggacttctgttccctccttcctatgtgcctgttgttatgtcagaactaagtgaccaaatgactttcatagagagggtaaaaaatatgatctatgtgctttattttgaattttggttccaaatatttgacatgaagaagtgggatcagttctacagtgaagttctaggaagacccactacgttatctgagacaatggcaaaagctgacatatggcttattcgaaactactgggattttcaatttcctcacccactcttaccaaatgttgagttcgttggaggactccactgcaaacctgccaaacccctaccgaaggaaatggaagagtttgtccagagctctggagaaaatggtgttgtggtgttttctctggggtcgatggtcagtaacacatcagaagaaagggccaatgtaattgcatcagcccttgccaagatcccacaaaaggttctgtggagatttgatgggaataaaccagatactttaggactcaatactcggctgtacaagtggataccccagaatgatcttcttggtcacccaaaaaccagagcttttataactcatggtggagccaatggcatctatgaggcaatctaccatggaatccctatggtgggcgttccattgtttgcagatcaacctgataacattgcacacatgaaggccaagggagcagctgttagtttggacttccacacaatgtcgagtacagacttactcaatgcactgaagacagtaattaatgatcctttatataaagagaatgctatgaaattatcaagaattcatcatgatcaaccagtgaagccccttgatcgagcagtcttctggattgaatttgtcatgcgccataaaggagccaagcaccttcgggttgcagcccacgacctcacctggttccagtaccactctttggatgtgactgggttcctgctggcctgtgtggcaactgtgatattcatcatcacaaaatgtctgttttgtgtctggaagtttgttagaacaggaaagaaggggaaaagagattaattacgtctgaggctggaagctgggaaacccaataaatgaactcctttagtttattacaacaagaagacgttgtgatacaagagattcctttcttcttgtgacaaaacatctttcaaaacttaccttgtcaagtcaaaatttgttttagtacctgtttaaccattagaaatatttcatgtcaaggaggaaaacattagggaaaacaaaaatgatataaagccatatgaggttatattgaaatgtattgagcttatattgaaatttattgttccaattcacaggttacatgaaaaaaaatttactaagcttaactacatgtcacacattgtacatggaaacaagaacattaagaagtccactgacagtatcagtactgttttgcaaatactcagcatactttggatccatttcatgcaggattgtgttgttttaactgttgttgaggaagctaataaataattaaattgt

SEQ ID NO: 33687 - DNA, 596 bp, Homo sapiens
  source 1..596: mol_type = unassigned DNA
attctcctgcctcagactccggagtagctgggactacaggcgccggccaccaagcctggctaattttttgtatttttagtagagatggggtttcaccgtgttagccaggatggtctggatctcctgacctcttgatccacccgccttggcctcccaaagtgctgggattaacggtgtgagccacctcgcccagcctggagccctttctttaatataaacataaatgttagtcaacttgtttaaatataaacatgtgagctgcttgagcacagggactacatcataatgttttttgctctcttacatgtctcatcaacgaatggattagtgtaaaagttacattttaacttcttgactgatttatactggatgtcaccatgagaaatgacagaaaggagcagcaactggaaaacaagcattgcattgcatcaggatgtctatgaaatggacttcagctcttctgctgatacagctgagctgttactttagctctgggagttgtggaaaggtgctggtgtggcccacagaattcagccactggatgaatataaagacaatcctggatgaacttgtccagagaggtcatgaggtgactg

SEQ ID NO: 33688 - DNA, 1887 bp, Homo sapiens
  source 1..1887: mol_type = unassigned DNA
acagaaaggaacagcaactggaaaacaagcattgcattgcaccaggatgtctgtgaaatggacttcagtaattttgctaatacaactgagcttttgctttagctctgggaattgtggaaaggtgctggtgtgggcagcagaatacagccattggatgaatataaagacaatcctggatgagcttattcagagaggtcatgaggtgactgtactggcatcttcagcttccattctttttgatcccaacaactcatccgctcttaaaattgaaatttatcccacatctttaactaaaactgagttggagaatttcatcatgcaacagattaagagatggtcagaccttccaaaagatacattttggttatatttttcacaagtacaggaaatcatgtcaatatttggtgacataactagaaagttctgtaaagatgtagtttcaaataagaaatttatgaaaaaagtacaagagtcaagatttgacgtcatttttgcagatgctatttttccctgtagtgagctgctggctgagctatttaacataccctttgtgtacagtctcagcttctctcctggctacacttttgaaaagcatagtggaggatttattttccctccttcctacgtacctgttgttatgtcagaattaactgatcaaatgactttcatggagagggtaaaaaatatgatctatgtgctttactttgacttttggttcgaaatatttgacatgaagaagtgggatcagttttatagtgaagttctaggaagacccactacattatctgagacaatggggaaagctgacgtatggcttattcgaaactcctggaattttcagtttccatatccactcttaccaaatgttgattttgttggaggactccactgcaaacctgccaaacccctgcctaaggaaatggaagactttgtacagagctctggagaaaatggtgttgtggtgttttctctggggtcaatggtcagtaacatgacagaagaaagggccaacgtaattgcatcagccctggcccagatcccacaaaaggttctgtggagatttgatgggaataaaccagataccttaggtctcaatactcggctctacaagtggataccccagaatgaccttctaggtcatccaaagaccagagcttttataactcatggtggagccaatggcatctacgaggcaatctaccatgggatccctatggtggggattccattgtttgccgatcaacctgataacattgctcacatgaaggccaggggagcagctgttagagtggacttcaacacaatgtcgagtacagacttgctgaatgcattgaagagagtaattaatgatccttcatataaagagaatgttatgaaattatcaagaattcaacatgatcaaccagtgaagcccctggatcgagcagtcttctggattgaatttgtcatgcgccacaaaggagctaaacaccttcgggttgcagcccacgacctcacctggttccagtaccactctttggatgtgattgggttcctgctggtctgtgtggcaactgtgatatttatcgtcacaaaatgttgtctgttttgtttctggaagtttgctagaaaagcaaagaagggaaaaaatgattagttatatctgagatttgaagctggaaaacctgataggtgagactacttcagtttattccagcaagaaagattgtgatgcaagatttctttcttcctgagacaaaaaaaaaaaaagaaaaaaaaatcttttcaaaatttactttgtcaaataaaaatttgtttttcagagatttaccacccagttcatggttagaaatattttgtggcaatgaagaaaacactacggaaaataaaaaataagataaagcctta

SEQ ID NO: 33689 - DNA, 3274 bp, Homo sapiens
  source 1..3274: mol_type = unassigned DNA
cgttaaattctgctctgtcagagagagcatctgtcaagcccacatttaaactgctgcctgcctgtgcagcagctgaggaaccgtggatttcatattatagactaaaaccccattaaaactgctcaaaatccttcctgcagctgccaggcaacaacgaaagaagagaggtaaatcctattcttttccaatacaactgaagcactacattttagctctggctgctttacattgcagctcagtgttattagtagaaatatggatactgagacgagaacacagcactgcattgtccagccaggaaaatagcagatgtaaaaagcttcaatgcatcaactgtcgggaagagtcaacagtgctacaagcagaacgggcaactacagctcttttgtttaacgaaagagagaaaatgaaagaaagggaaaatttcagaagactaggacccatatgaacaaggagggtaactcgaagacaagcagacagatggacactttggatactgtgaaaagcaatcgcaggaggcagactgttgggggatgtgcgcatgttcgatagcatcttttttgctgaagtgatggcgtgccaaaagtattttcagtgggcataatcctcttcacataaatggcctgaccaaggaagaatgactacaagagagacaatgtgactgaattagaaaatgattgccaaagaatagtattaaggagaagaaaacatttttggtcaccaatctctcatataccactactggatatttacaacatgcttcagtggaggagaagacactgctgctttgcaaagatgacctggaatgccaaaaggtctctgttccgcactcatcttattggagtactttctctagtgtttctttttgctatgtttttgtttttcaatcatcatgactggctgccaggcagagctggattcaaagaaaaccctgtgacatacactttccgaggatttcggtcaacaaaaagtgagacaaaccacagctcccttcggaacatttggaaagaaacagtccctcaaaccctgaggcctcaaacagcaactaactctaataacacagacctgtcaccacaaggagttacaggcctggagaatacacttagtgccaatggaagtatttacaatgaaaaaggtactggacatccaaattcttaccatttcaaatatattattaatgagcctgaaaaatgccaagagaaaagtccttttttaatactactaatagctgcagagcctggacaaatagaagctagaagagctattcggcaaacttggggcaatgaaagtctagcacctggtattcaaatcacaagaatatttttgttgggcttaagtattaagctaaatggctaccttcaacgtgcaatactggaagaaagcagacaatatcatgatataattcaacaggaatacttagatacgtactataatttgaccattaaaacactaatgggcatgaactgggttgcaacatactgtccacatattccatatgttatgaaaactgacagtgacatgtttgtcaacactgaatatttaatcaataagttactgaagccagatctgcctcccagacataactatttcactggttacctaatgcgaggatatgcacccaatcgaaacaaagatagcaagtggtacatgccaccagacctctacccaagtgagcgttatcctgtcttctgttctggaactggttatgttttttctggagatctggcagaaaagatttttaaagtttctttaggtatccgccgtttgcacttggaagatgtatatgtagggatctgtcttgccaagttgagaattgatcctgtaccccctcccaatgagtttgtgttcaatcactggcgagtctcttattcgagctgtaaatacagccacctaattacctctcatcagttccagcctagtgaactgataaaatactggaaccatttacaacaaaataagcacaatgcctgtgccaacgcagcaaaagaaaaggcaggcaggtatcgccaccgtaaactacattagaaaagacaattttttttcaaatgtgcaatttgtaaatattgctaaaagcatgtatagttagaactgattacatccgtaggacaagttttagttaaaactcatcacataaagaaattcaagaagtatttttttaatttctgaagaagttaattcttaaaactataacattatataacaaaaaaggtttcccaaaacaatctatttaaaaaactgtataaggagattctgtgtattaacatgcaataacaagcatgcataaatcaatggttcaagtcttctgttaggggccaataaaatgtatctgcatatgttttccacataaattttaattcaagaaatgacagtcaaaagatccttcattttagattaagcttttcattttaatatataatttaatgtaaataaaacatcactatcaattttaaggaaactttttaattgtgcaaaggataaattttttgacctattttagggttctaaatgcaataagatttagttgagttattccacaaacacattataaagttcagatgtttcatcaatgcagttctcacgaaagtatttactttttaaaaataactgagatattattttaaatttcttttattaatactttcttttattaatatatgggggaaaattattttgacatgacgtggtaaaatgtgaaaaactaatgtgtctcaggctcaagtttttatagttattaaatgtttcaaaatagacaagttttgtttcctcattgatgttaagaaccaaactcctatttcaatgagttattggattagaccaattactgcactcttaaacagcaccaccatttaatttcatgtatatctaacttcgaatatatctgtaaagataatcgaagcaaaagtaatcacttaaaggcacaaataggatgtactgttgaaaaagataaagagtgcaggtgcagtttcattcaacacatttttaagatgcatgtctgccaaaatgcaacatacgggaagtttatttcctgacagcaggtgtacacatgccaacacttaatcattttatggcacctatttctttcttggagtgccaagtttgcaaacctgcagtttttaatttggtagatgacaaatattctgaatcaccaattaaaaacctttttgggagggatggggaaaactacaaacgtttgacaaacacaattctaggatgaacaatgtatacaatgcacttttatgaagtttttaaaaataaaggaaaacaaaaaacttta

SEQ ID NO: 33690 - DNA, 1686 bp, Homo sapiens
  source 1..1686: mol_type = unassigned DNA
gaggcgggggaggggccgtgagtgccgcagtcggccagccatggagcggagcttgctggcggcgaggccgcggcgacaaggtagccacccccgcagcatgcctcgaccgcggtccgcagctgcaccgcctctccccgccccccagggtgcgctggtcccggtcgcgcgctcagacctccgcatcccgggcgtggtcggttaagtccccggccgtgacccaggcccggggagctagtctccgcccttcgctcttacggatcccctcggagtacgccgcaccatgcagctcaggctcttccggcgcctccttctcgccgctttgctgctggtgatcgtctggaccctcttcgggccttcggggttgggggaggagctgctgagcctctcactagcctccctgctcccagcccccgcctcaccggggccgcccctggccctgccccgcctcttgatccccaaccaggaagcttgcagtggtcccggggcccctcccttcctgctcatcctggtgtgcacggctccggagaacctgaaccagagaaacgccattcgggcttcgtggggcgggctgcgcgaggcccgggggctcagggtacagacgctattcttgctgggagagccgaacgcacagcaccccgtgtggggttcccaggggagtgacctggcctcggagtcagcagcccagggggatatcttgcaggccgccttccaggactcctaccgcaacctcaccctaaagaccctcagcgggctgaactgggctgagaaacactgccccatggcccgatacgtcctcaagacggacgatgatgtgtatgtcaacgtccctgaactggtatcagagctggtcttgcgagggggccgttgggggcaatgggagagaagcacggaaccccagagagaggctgagcaggaaggaggccaggttttgcacagcgaggaagtgcctcttctgtacttgggccgggtgcactggcgcgtgaacccctctcggacaccggggggcaggcaccgcgtatcagaggagcagtggcctcacacctggggcccctttccaccctatgcctcaggcacggggtatgtgctgtcagcgtctgctgtgcagctcattctcaaggtggccagccgggcaccccttctcccattagaggatgtctttgtgggggtaagtgcccgacgaggaggcctcgccccaacacagtgtgtcaagctggctggtgccacccactacccgctagaccggtgctgctatgggaaattcctgctgacgtcccacaggctggacccctggaagatgcaggaagcctggaagctggtgggtggctctgacggggaaaggactgcgcccttttgctcctggttccagggagtcctgggcatcctgcggtgtcgagcaatagcctggcttcagagctgagagtgcctggggccacaggaaaggcaggaacaggaccttctctctcccaggcccaacgcaggggccctcactggctgcagctgatctgtttccttataccagatcctcagtctcactaaagacagcgatatgggagacacccaggggcctggcccgccagcccaaaagatggtcatcgggaagaaaaaaagaaaaaaatgctgcagttgttctctcaagctagggcagaagaggggtgtcaagctcctcaataaacttgtctccacttc

SEQ ID NO: 33691 - DNA, 1686 bp, Homo sapiens
  source 1..1686: mol_type = unassigned DNA
gaggcgggggaggggccgtgagtgccgcagtcggccagccatggagcggagcttgctggcggcgaggccgcggcgacaaggtagccacccccgcagcatgcctcgaccgcggtccgcagctgcaccgcctctccccgccccccagggtgcgctggtcccggtcgcgcgctcagacctccgcatcccgggcgtggtcggttaagtccccggccgtgacccaggcccggggagctagtctccgcccttcgctcttacggatcccctcggagtacgccgcaccatgcagctcaggctcttccggcgcctccttctcgccgctttgctgctggtgatcgtctggaccctcttcgggccttcggggttgggggaggagctgctgagcctctcactagcctccctgctcccagcccccgcctcaccggggccgcccctggccctgccccgcctcttgatccccaaccaggaagcttgcagtggtcccggggcccctcccttcctgctcatcctggtgtgcacggctccggagaacctgaaccagagaaacgccattcgggcttcgtggggcgggctgcgcgaggcccgggggctcagggtacagacgctattcttgctgggagagccgaacgcacagcaccccgtgtggggttcccaggggagtgacctggcctcggagtcagcagcccagggggatatcttgcaggccgccttccaggactcctaccgcaacctcaccctaaagaccctcagcgggctgaactgggctgagaaacactgccccatggcccgatacgtcctcaagacggacgatgatgtgtatgtcaacgtccctgaactggtatcagagctggtcttgcgagggggccgttgggggcaatgggagagaagcacggaaccccagagagaggctgagcaggaaggaggccaggttttgcacagcgaggaagtgcctcttctgtacttgggccgggtgcactggcgcgtgaacccctctcggacaccggggggcaggcaccgcgtatcagaggagcagtggcctcacacctggggcccctttccaccctatgcctcaggcacggggtatgtgctgtcagcgtctgctgtgcagctcattctcaaggtggccagccgggcaccccttctcccattagaggatgtctttgtgggggtaagtgcccgacgaggaggcctcgccccaacacagtgtgtcaagctggctggtgccacccactacccgctagaccggtgctgctatgggaaattcctgctgacgtcccacaggctggacccctggaagatgcaggaagcctggaagctggtgggtggctctgacggggaaaggactgcgcccttttgctcctggttccagggagtcctgggcatcctgcggtgtcgagcaatagcctggcttcagagctgagagtgcctggggccacaggaaaggcaggaacaggaccttctctctcccaggcccaacgcaggggccctcactggctgcagctgatctgtttccttataccagatcctcagtctcactaaagacagcgatatgggagacacccaggggcctggcccgccagcccaaaagatggtcatcgggaagagaaaaagaaaaaaatgctgcagttgttctctcaagctagggcagaagaggggtgtcaagctcctcaataaacttgtctccacttc

SEQ ID NO: 33692 - DNA, 1686 bp, Homo sapiens; identical to SEQ ID NO: 33691
  source 1..1686: mol_type = unassigned DNA

SEQ ID NO: 33693 - DNA, 1686 bp, Homo sapiens; identical to SEQ ID NO: 33691
  source 1..1686: mol_type = unassigned DNA

SEQ ID NO: 33694 - DNA, 1686 bp, Homo sapiens; identical to SEQ ID NO: 33691
  source 1..1686: mol_type = unassigned DNA

SEQ ID NO: 33695 - DNA, 2606 bp, Homo sapiens
  source 1..2606: mol_type = unassigned DNA
ctctctagagaaccctgactaatacacctggagtgcagaatctgctggagaaactgccattccgttattgactggctggtcaggccatacagcctggtggtctagatgtgtttggagtgattcctgtcagaatcaccatttttggtaaacaaaccaagcccagaacctgataattatggagcattctacactgacagttctttgagacaaatttcctcttggcatttacactgtggctttagctttcaaaccagaggttcctcttacccagcaaaaaatggctttcccgaagatgagattgatgtatatttgccttctggttctgggggctctttgtttgtattttagcatgtacagtctaaatcctttcaaagaacagtcctttgtttacaagaaagacgggaacttccttaagctcccagatacagactgcaggcagacacctcccttcctcgtcctgctggtgacctcatcccacaaacagttggctgagcgcatggccatccggcagacgtgggggaaagagaggatggtgaagggaaagcagctgaagacattcttcctcctggggaccaccagcagtgcagcggaaacgaaagaggtggaccaggagagccagcgacacggggacattatccagaaggatttcctagacgtctattacaatctgaccctgaagaccatgatgggcatagaatgggtccatcgcttttgtcctcaggcggcgtttgtgatgaaaacagactcagacatgttcatcaatgttgactatctgactgaactgcttctgaagaaaaacagaacaaccaggtttttcactggcttcttgaaactcaatgagtttcccatcaggcagccattcagcaagtggtttgtcagtaaatctgaatatccgtgggacaggtacccaccattctgctccggcaccggctacgtgttttctggcgacgtggcgagtcaggtgtacaatgtctccaagagcgtcccatacattaaactggaagacgtgtttgtggggctctgcctcgaaaggctgaacatcagattggaggagctccactcccagccgaccttttttccagggggcttacgcttctccgtatgcctcttcaggaggatcgtggcctgccacttcatcaagcctcggactctcttggactactggcaggctctagagaattcccggggggaagattgtccgcctgtctgaggggagcccagaggcacatccggacaagtttcagataacccgtggggatagtttttgctagattttggaagagggggcgggacagaggatgctgttcttcagtgctgaaatccacgccagaatgtcggtgttcatgaagtcactgattagttcccacttggtgccccaggcaataataggcccgtctcttgggcacgcacactcttcatactaagtgtttgacatacacctggatttttgcatttcaggggtcagtatcctatgacatgatgggtgttaccatcctaattttacaggcaaggacacagcagctgcgagaggtacagaaacttgtcccaaggctcacagccagtaggcataggagcgggaatgaaaatcgagcactgtcagaatctggtgggcagcccctgacttgaaccactcccacgtgctgcctcccttaggaggggacactgatgatgaggtctcggagccggcatccttccatccctgtcgagtcccctccacctcagctcccagtccttgtgctttttggagctaagcctgggatgaccaaattcaccccagctccttcattcacagggctggatgtagctgggattgagtccatgttatcggctcggtactcaacacaacccaagtttcatccgaggaaatgtccccgcagtggatgcagctcacatgctgaggaacacccagctctggacagagttcttataaatgtataaattaggctcagaaaccactgcattctgacctgctgtacagactgcccacactgctgacctgcctagcgagcaggacatcccttctgagccatctgctgctctctcatttcatcaccccaactgtcccttgtttttgatcaatggggaccagccactgccccaggagcactttagggctctcagttcaaactgaaggacagttgaactcagatggggttcatgtgggattctgggagctttctgggaattcagttggagtcaagtcaggatgctctcaaggacccctcgggctcagagccctaaagtgggccctggtgaagcagggtggtcctgcgtccacttcccaagcctgagccaagctcatcttcattgaatgtctcatttggccgaggaacaactgaactttgtggtttgctgtttagccttcagtttgctccgctgcctcctacccagaggtttgtgcgagcctgtgttgcagggttgtataaaaccaaggtacttcgttagttttgcccattcagccatggtcacgtgacatgcaaagtaatcttgctcctaattatagaaatgatttttcttttaattttttactttaccagactttactttgtactcagagaagaggcctcacatggctgtgtcacatataaatgttggactaaactctt

SEQ ID NO: 33696 - DNA, 2763 bp, Homo sapiens
  source 1..2763: mol_type = unassigned DNA
gggcccagatagaacaagaaggcagaagaaatgtgaattcctctttctctgctggagctgggatattcttcttctcctgcccttggacatcagagctgcaggctctctggcctttggacccgaggatttataccaagcaggtttctgggttctcaggcctttggccttggactgatagttacaccattggcatatctggttctgaggctcttggtcttggactgagccacactcctggcatcccagcgtctccagcttgcatggcctgtcacgtgattcctgtcagaatcaccatttttggtaaacaaaccaagcccagaacctgataattatggagcattctacactgacagttctttgagacaaatttcctcttggcatttacactgtggctttagctttcaaaccagaggttcctcttacccagcaaaaaatggctttcccgaagatgagattgatgtatatttgccttctggttctgggggctctttgtttgtattttagcatgtacagtctaaatcctttcaaagaacagtcctttgtttacaagaaagacgggaacttccttaagctcccagatacagactgcaggcagacacctcccttcctcgtcctgctggtgacctcatcccacaaacagttggctgagcgcatggccatccggcagacgtgggggaaagagaggatggtgaagggaaagcagctgaagacattcttcctcctggggaccaccagcagtgcagcggaaacgaaagaggtggaccaggagagccagcgacacggggacattatccagaaggatttcctagacgtctattacaatctgaccctgaagaccatgatgggcatagaatgggtccatcgcttttgtcctcaggcggcgtttgtgatgaaaacagactcagacatgttcatcaatgttgactatctgactgaactgcttctgaagaaaaacagaacaaccaggtttttcactggcttcttgaaactcaatgagtttcccatcaggcagccattcagcaagtggtttgtcagtaaatctgaatatccgtgggacaggtacccaccattctgctccggcaccggctacgtgttttctggcgacgtggcgagtcaggtgtacaatgtctccaagagcgtcccatacattaaactggaagacgtgtttgtggggctctgcctcgaaaggctgaacatcagattggaggagctccactcccagccgaccttttttccagggggcttacgcttctccgtatgcctcttcaggaggatcgtggcctgccacttcatcaagcctcggactctcttggactactggcaggctctagagaattcccggggggaagattgtccgcctgtctgaggggagcccagaggcacatccggacaagtttcagataacccgtggggatagtttttgctagattttggaagagggggcgggacagaggatgctgttcttcagtgctgaaatccacgccagaatgtcggtgttcatgaagtcactgattagttcccacttggtgccccaggcaataataggcccgtctcttgggcacgcacactcttcatactaagtgtttgacatacacctggatttttgcatttcaggggtcagtatcctatgacatgatgggtgttaccatcctaattttacaggcaaggacacagcagctgcgagaggtacagaaacttgtcccaaggctcacagccagtaggcataggagcgggaatgaaaatcgagcactgtcagaatctggtgggcagcccctgacttgaaccactcccacgtgctgcctcccttaggaggggacactgatgatgaggtctcggagccggcatccttccatccctgtcgagtcccctccacctcagctcccagtccttgtgctttttggagctaagcctgggatgaccaaattcaccccagctccttcattcacagggctggatgtagctgggattgagtccatgttatcggctcggtactcaacacaacccaagtttcatccgaggaaatgtccccgcagtggatgcagctcacatgctgaggaacacccagctctggacagagttcttataaatgtataaattaggctcagaaaccactgcattctgacctgctgtacagactgcccacactgctgacctgcctagcgagcaggacatcccttctgagccatctgctgctctctcatttcatcaccccaactgtcccttgtttttgatcaatggggaccagccactgccccaggagcactttagggctctcagttcaaactgaaggacagttgaactcagatggggttcatgtgggattctgggagctttctgggaattcagttggagtcaagtcaggatgctctcaaggacccctcgggctcagagccctaaagtgggccctggtgaagcagggtggtcctgcgtccacttcccaagcctgagccaagctcatcttcattgaatgtctcatttggccgaggaacaactgaactttgtggtttgctgtttagccttcagtttgctccgctgcctcctacccagaggtttgtgcgagcctgtgttgcagggttgtataaaaccaaggtacttcgttagttttgcccattcagccatggtcacgtgacatgcaaagtaatcttgctcctaattatagaaatgatttttcttttaattttttactttaccagactttactttgtactcagagaagaggcctcacatggctgtgtcacatataaatgttggactaaactctta

SEQ ID NO: 33697 - DNA, 2922 bp, Homo sapiens
  source 1..2922: mol_type = unassigned DNA
acaggaaagccgctggttgtgatggtggctatgacaaaccttcagcctgaagacccgggagggaaaaatgaagctgacaagaagcacgttgctgagtgatcctgggttcccatcctccgcacccgtgcatccacgcgtgggcccagccagcaaggagaagtctaacaggcaggaggaggggagacacaaggagcccccgcatttcatctggaagagaggccattgaaaccaagcatttgtgttcaagtaagaaaatgtatccaagtcacaaagaaacataatttggcttttggagacatgagcagcttcatttctcatttgttcattcgaaagtctccactgggcttctgagtgccacatcctgtccagaatgatgaaagatacagaaaatggtgcctgctgaccttctggagttattggctagtaagaaagtgattcctgtcagaatcaccatttttggtaaacaaaccaagcccagaacctgataattatggagcattctacactgacagttctttgagacaaatttcctcttggcatttacactgtggctttagctttcaaaccagaggttcctcttacccagcaaaaaatggctttcccgaagatgagattgatgtatatttgccttctggttctgggggctctttgtttgtattttagcatgtacagtctaaatcctttcaaagaacagtcctttgtttacaagaaagacgggaacttccttaagctcccagatacagactgcaggcagacacctcccttcctcgtcctgctggtgacctcatcccacaaacagttggctgagcgcatggccatccggcagacgtgggggaaagagaggatggtgaagggaaagcagctgaagacattcttcctcctggggaccaccagcagtgcagcggaaacgaaagaggtggaccaggagagccagcgacacggggacattatccagaaggatttcctagacgtctattacaatctgaccctgaagaccatgatgggcatagaatgggtccatcgcttttgtcctcaggcggcgtttgtgatgaaaacagactcagacatgttcatcaatgttgactatctgactgaactgcttctgaagaaaaacagaacaaccaggtttttcactggcttcttgaaactcaatgagtttcccatcaggcagccattcagcaagtggtttgtcagtaaatctgaatatccgtgggacaggtacccaccattctgctccggcaccggctacgtgttttctggcgacgtggcgagtcaggtgtacaatgtctccaagagcgtcccatacattaaactggaagacgtgtttgtggggctctgcctcgaaaggctgaacatcagattggaggagctccactcccagccgaccttttttccagggggcttacgcttctccgtatgcctcttcaggaggatcgtggcctgccacttcatcaagcctcggactctcttggactactggcaggctctagagaattcccggggggaagattgtccgcctgtctgaggggagcccagaggcacatccggacaagtttcagataacccgtggggatagtttttgctagattttggaagagggggcgggacagaggatgctgttcttcagtgctgaaatccacgccagaatgtcggtgttcatgaagtcactgattagttcccacttggtgccccaggcaataataggcccgtctcttgggcacgcacactcttcatactaagtgtttgacatacacctggatttttgcatttcaggggtcagtatcctatgacatgatgggtgttaccatcctaattttacaggcaaggacacagcagctgcgagaggtacagaaacttgtcccaaggctcacagccagtaggcataggagcgggaatgaaaatcgagcactgtcagaatctggtgggcagcccctgacttgaaccactcccacgtgctgcctcccttaggaggggacactgatgatgaggtctcggagccggcatccttccatccctgtcgagtcccctccacctcagctcccagtccttgtgctttttggagctaagcctgggatgaccaaattcaccccagctccttcattcacagggctggatgtagctgggattgagtccatgttatcggctcggtactcaacacaacccaagtttcatccgaggaaatgtccccgcagtggatgcagctcacatgctgaggaacacccagctctggacagagttcttataaatgtataaattaggctcagaaaccactgcattctgacctgctgtacagactgcccacactgctgacctgcctagcgagcaggacatcccttctgagccatctgctgctctctcatttcatcaccccaactgtcccttgtttttgatcaatggggaccagccactgccccaggagcactttagggctctcagttcaaactgaaggacagttgaactcagatggggttcatgtgggattctgggagctttctgggaattcagttggagtcaagtcaggatgctctcaaggacccctcgggctcagagccctaaagtgggccctggtgaagcagggtggtcctgcgtccacttcccaagcctgagccaagctcatcttcattgaatgtctcatttggccgaggaacaactgaactttgtggtttgctgtttagccttcagtttgctccgctgcctcctacccagaggtttgtgcgagcctgtgttgcagggttgtataaaaccaaggtacttcgttagttttgcccattcagccatggtcacgtgacatgcaaagtaatcttgctcctaattatagaaatgatttttcttttaattttttactttaccagactttactttgtactcagagaagaggcctcacatggctgtgtcacatataaatgttggactaaactctta

SEQ ID NO: 33698 - DNA, 2446 bp, Homo sapiens
  source 1..2446: mol_type = unassigned DNA
ctctctagagaaccctgactaatacacctggagtgcagaatctgctggagaaactgccattccgttattgactggctggtcaggccatacagcctggtggtctagatgtgtttggagatggctttcccgaagatgagattgatgtatatttgccttctggttctgggggctctttgtttgtattttagcatgtacagtctaaatcctttcaaagaacagtcctttgtttacaagaaagacgggaacttccttaagctcccagatacagactgcaggcagacacctcccttcctcgtcctgctggtgacctcatcccacaaacagttggctgagcgcatggccatccggcagacgtgggggaaagagaggatggtgaagggaaagcagctgaagacattcttcctcctggggaccaccagcagtgcagcggaaacgaaagaggtggaccaggagagccagcgacacggggacattatccagaaggatttcctagacgtctattacaatctgaccctgaagaccatgatgggcatagaatgggtccatcgcttttgtcctcaggcggcgtttgtgatgaaaacagactcagacatgttcatcaatgttgactatctgactgaactgcttctgaagaaaaacagaacaaccaggtttttcactggcttcttgaaactcaatgagtttcccatcaggcagccattcagcaagtggtttgtcagtaaatctgaatatccgtgggacaggtacccaccattctgctccggcaccggctacgtgttttctggcgacgtggcgagtcaggtgtacaatgtctccaagagcgtcccatacattaaactggaagacgtgtttgtggggctctgcctcgaaaggctgaacatcagattggaggagctccactcccagccgaccttttttccagggggcttacgcttctccgtatgcctcttcaggaggatcgtggcctgccacttcatcaagcctcggactctcttggactactggcaggctctagagaattcccggggggaagattgtccgcctgtctgaggggagcccagaggcacatccggacaagtttcagataacccgtggggatagtttttgctagattttggaagagggggcgggacagaggatgctgttcttcagtgctgaaatccacgccagaatgtcggtgttcatgaagtcactgattagttcccacttggtgccccaggcaataataggcccgtctcttgggcacgcacactcttcatactaagtgtttgacatacacctggatttttgcatttcaggggtcagtatcctatgacatgatgggtgttaccatcctaattttacaggcaaggacacagcagctgcgagaggtacagaaacttgtcccaaggctcacagccagtaggcataggagcgggaatgaaaatcgagcactgtcagaatctggtgggcagcccctgacttgaaccactcccacgtgctgcctcccttaggaggggacactgatgatgaggtctcggagccggcatccttccatccctgtcgagtcccctccacctcagctcccagtccttgtgctttttggagctaagcctgggatgaccaaattcaccccagctccttcattcacagggctggatgtagctgggattgagtccatgttatcggctcggtactcaacacaacccaagtttcatccgaggaaatgtccccgcagtggatgcagctcacatgctgaggaacacccagctctggacagagttcttataaatgtataaattaggctcagaaaccactgcattctgacctgctgtacagactgcccacactgctgacctgcctagcgagcaggacatcccttctgagccatctgctgctctctcatttcatcaccccaactgtcccttgtttttgatcaatggggaccagccactgccccaggagcactttagggctctcagttcaaactgaaggacagttgaactcagatggggttcatgtgggattctgggagctttctgggaattcagttggagtcaagtcaggatgctctcaaggacccctcgggctcagagccctaaagtgggccctggtgaagcagggtggtcctgcgtccacttcccaagcctgagccaagctcatcttcattgaatgtctcatttggccgaggaacaactgaactttgtggtttgctgtttagccttcagtttgctccgctgcctcctacccagaggtttgtgcgagcctgtgttgcagggttgtataaaaccaaggtacttcgttagttttgcccattcagccatggtcacgtgacatgcaaagtaatcttgctcctaattatagaaatgatttttcttttaattttttactttaccagactttactttgtactcagagaagaggcctcacatggctgtgtcacatataaatgttggactaaactctt

SEQ ID NO: 33699 - DNA, 4201 bp, Homo sapiens
  source 1..4201: mol_type = unassigned DNA
gcctcgggcggcttctcgccgctcccaggtctggctggctggaggagtctcagctctcagccgctcgcccgcccccgctccgggccctcccctagtcgccgctgtggggcagcgcctggcgggcggcccgcgggcgggtcgcctcccctcctgtagcccacacccttcttaaagcggcggcgggaagatgaggcttcgggagccgctcctgagcggcagcgccgcgatgccaggcgcgtccctacagcgggcctgccgcctgctcgtggccgtctgcgctctgcaccttggcgtcaccctcgtttactacctggctggccgcgacctgagccgcctgccccaactggtcggagtctccacaccgctgcagggcggctcgaacagtgccgccgccatcgggcagtcctccggggagctccggaccggaggggcccggccgccgcctcctctaggcgcctcctcccagccgcgcccgggtggcgactccagcccagtcgtggattctggccctggccccgctagcaacttgacctcggtcccagtgccccacaccaccgcactgtcgctgcccgcctgccctgaggagtccccgctgcttgtgggccccatgctgattgagtttaacatgcctgtggacctggagctcgtggcaaagcagaacccaaatgtgaagatgggcggccgctatgcccccagggactgcgtctctcctcacaaggtggccatcatcattccattccgcaaccggcaggagcacctcaagtactggctatattatttgcacccagtcctgcagcgccagcagctggactatggcatctatgttatcaaccaggcgggagacactatattcaatcgtgctaagctcctcaatgttggctttcaagaagccttgaaggactatgactacacctgctttgtgtttagtgacgtggacctcattccaatgaatgaccataatgcgtacaggtgtttttcacagccacggcacatttccgttgcaatggataagtttggattcagcctaccttatgttcagtattttggaggtgtctctgctctaagtaaacaacagtttctaaccatcaatggatttcctaataattattggggctggggaggagaagatgatgacatttttaacagattagtttttagaggcatgtctatatctcgcccaaatgctgtggtcgggaggtgtcgcatgatccgccactcaagagacaagaaaaatgaacccaatcctcagaggtttgaccgaattgcacacacaaaggagacaatgctctctgatggtttgaactcactcacctaccaggtgctggatgtacagagatacccattgtatacccaaatcacagtggacatcgggacaccgagctagcgttttggtacacggataagagacctgaaattagccagggacctctgctgtgtgtctctgccaatctgctgggctggtccctctcatttttaccagtctgagtgacaggtccccttcgctcatcattcagatggctttccagatgaccaggacgagtgggatattttgcccccaacttggctcggcatgtgaattcttagctctgcaaggtgtttatgcctttgcgggtttcttgatgtgttcgcagtgtcaccccagagtcagaactgtacacatcccaaaatttggtggccgtggaacacattcccggtgatagaattgctaaattgtcgtgaaataggttagaatttttctttaaattatggttttcttattcgtgaaaattcggagagtgctgctaaaattggattggtgtgatctttttggtagttgtaatttaacagaaaaacacaaaatttcaaccattcttaatgttacgtcctccccccacccccttctttcagtggtatgcaaccactgcaatcactgtgcatatgtcttttcttagcaaaaggattttaaaacttgagccctggaccttttgtcctatgtgtgtggattccagggcaactctagcatcagagcaaaagccttgggtttctcgcattcagtggcctatctccagattgtctgatttctgaatgtaaagttgttgtgtttttttttaaatagtagtttgtagtattttaaagaaagaacagatcgagttctaattatgatctagcttgattttgtgttgatccaaatttgcatagctgtttaatgttaagtcatgacaatttatttttcttggcatgctatgtaaacttgaatttcctatgtatttttattgtggtgttttaaatatggggaggggtattgagcattttttagggagaaaaataaatatatgctgtagtggccacaaataggcctatgatttagctggcaggccaggttttctcaagagcaaaatcaccctctggccccttggcaggtaaggcctcccggtcagcattatcctgccagacctcggggaggatacctgggagacagaagcctctgcacctactgtgcagaactctccacttccccaaccctccccaggtgggcagggcggagggagcctcagcctccttagactgacccctcaggcccctaggctggggggttgtaaataacagcagtcaggttgtttaccagccctttgcacctccccaggcagagggagcctctgttctggtgggggccacctccctcagaggctctgctagccacactccgtggcccaccctttgttaccagttcttcctccttcctcttttcccctgcctttctcattccttccttcgtctccctttttgttcctttgcctcttgcctgtcccctaaaacttgactgtggcactcagggtcaaacagactatccattccccagcatgaatgtgccttttaattagtgatctagaaagaagttcagccgaacccacaccccaactccctcccaagaacttcggtgcctaaagcctcctgttccacctcaggttttcacaggtgctcccaccccagttgaggctcccacccacagggctgtctgtcacaaacccacctctgttgggagctattgagccacctgggatgagatgacacaaggcactcctaccactgagcgcctttgccaggtccagcctgggctcaggttccaagactcagctgcctaatcccagggttgagccttgtgctcgtggcggaccccaaaccactgccctcctgggtaccagccctcagtgtggaggctgagctggtgcctggccccagtcttatctgtgcctttactgctttgcgcatctcagatgctaacttggttctttttccagaagcctttgtattggttaaaaattattttccattgcagaagcagctggactatgcaaaaagtatttctctgtcagttccccactctataccaaggatattattaaaactagaaatgactgcattgagagggagttgtgggaaataagaagaatgaaagcctctctttctgtccgcagatcctgacttttccaaagtgccttaaaagaaatcagacaaatgccctgagtggtaacttctgtgttattttactcttaaaaccaaactctaccttttcttgttgttttttttttttttttttttttttttttggttaccttctcattcatgtcaagtatgtggttcattcttagaaccaagggaaatactgctccccccatttgctgacgtagtgctctcatgggctcacctgggcccaaggcacagccagggcacagttaggcctggatgtttgcctggtccgtgagatgccgcgggtcctgtttccttactggggatttcagggctgggggttcagggagcatttccttttcctgggagttatgaccgcgaagttgtcatgtgccgtgcccttttctgtttctgtgtatcctattgctggtgactctgtgtgaactggcctttgggaaagatcagagagggcagaggtggcacaggacagtaaaggagatgctgtgctggccttcagcctggacagggtctctgctgactgccaggggcgggggctctgcatagccaggatgacggctttcatgtcccagagacctgttgtgctgtgtattttgatttcctgtgtatgcaaatgtgtgtatttaccattgtgtagggggctgtgtctgatcttggtgttcaaaacagaactgtatttttgcctttaaaattaaataatataacgtgaataaatgaccctatctttgtaactgca

SEQ ID NO: 33700 - DNA, 1535 bp, Homo sapiens
  source 1..1535: mol_type = unassigned DNA
gcctcgggcggcttctcgccgctcccaggtctggctggctggaggagtctcagctctcagccgctcgcccgcccccgctccgggccctcccctagtcgccgctgtggggcagcgcctggcgggcggcccgcgggcgggtcgcctcccctcctgtagcccacacccttcttaaagcggcggcgggaagatgaggcttcgggagccgctcctgagcggcagcgccgcgatgccaggcgcgtccctacagcgggcctgccgcctgctcgtggccgtctgcgctctgcaccttggcgtcaccctcgtttactacctggctggccgcgacctgagccgcctgccccaactggtcggagtctccacaccgctgcagggcggctcgaacagtgccgccgccatcgggcagtcctccggggagctccggaccggaggggcccggccgccgcctcctctaggcgcctcctcccagccgcgcccgggtggcgactccagcccagtcgtggattctggccctggccccgctagcaacttgacctcggtcccagtgccccacaccaccgcactgtcgctgcccgcctgccctgaggagtccccgctgcttgtgggccccatgctgattgagtttaacatgcctgtggacctggagctcgtggcaaagcagaacccaaatgtgaagatgggcggccgctatgcccccagggactgcgtctctcctcacaaggtggccatcatcattccattccgcaaccggcaggagcacctcaagtactggctatattatttgcacccagtcctgcagcgccagcagctggactatggcatctatgttatcaaccagtatgaaaaaataagaagactcctgtggtgaaggcttcgcctggtctgttctgctctggaggtggcagcgcatggtggttagtcccagcatcttcctggagatttgagcgtgagacgtgctggctgtgtgggctgtgccacctgaggaggattggccagtcataaggactcagcctggttgctgaatccagctggggaccttgaccccagtgactggcttttcagcggctacctgttctcgagacaaatgctgtcctcccctaaggagtctgggctgtggcaaagctatgacataggtacaaccgtccttttgccaggtggggcttaggtggagaagttgaagcctggactcagtcaagatctcaggactgggagcaaggagcctcttactcccagggtgcccacttggttcccactgactgttggtggaaactaggggctgagctggaggctttttagaggaagaaatgacaagctgggggctggattatccctgggggtgaaaatggagtcagctagataggttatgtcttgaaggagaggagggtcccctggtgtcaggaagcagagcctgaactccatgttagaccctggattggagagtgggcaggacacttgggagagacaggacttggtactggcgagggtactaccacacccattctgggagtggactatagagaaataaatcctaaaagtgg

SEQ ID NO: 33701 - DNA, 1633 bp, Homo sapiens
  source 1..1633: mol_type = unassigned DNA
aaagcggcggcgggaagatgaggcttcgggagccgctcctgagcggcagcgccgcgatgccaggcgcgtccctacagcgggcctgccgcctgctcgtggccgtctgcgctctgcaccttggcgtcaccctcgtttactacctggctggccgcgacctgagccgcctgccccaactggtcggagtctccaccccagtcgtggattctggccctggccccgctagcaacttgacctcggtcccagtgccccacaccaccgcactgtcgctgcccgcctgccctgaggagtccccgctgcttgtgggccccatgctgattgagtttaacatgcctgtggacctggagctcgtggcaaagcagaacccaaatgtgaagatgggcggccgctatgcccccagggactgcgtctctcctcacaaggtggccatcatcattccattccgcaaccggcaggagcacctcaagtactggctatattatttgcacccagtcctgcagcgccagcagctggactatggcatctatgttatcaaccaggcgggagacactatattcaatcgtgctaagctcctcaatgttggctttcaagaagccttgaaggactatgactacacctgctttgtgtttagtgacgtggacctcattccaatgaatgaccataatgcgtacaggtgtttttcacagccacggcacatttccgttgcaatggataagtttggattcagcctaccttatgttcagtattttggaggtgtctctgctctaagtaaacaacagtttctaaccatcaatggatttcctaataattattggggctggggaggagaagatgatgacatttttaacagattagtttttagaggcatgtctatatctcgcccaaatgctgtggtcgggaggtgtcgcatgatccgccactcaagagacaagaaaaatgaacccaatcctcagaggtttgaccgaattgcacacacaaaggagacaatgctctctgatggtttgaactcactcacctaccaggtgctggatgtacagagatacccattgtatacccaaatcacagtggacatcgggacaccgagctagcgttttggtacacggataagagacctgaaattagccagggacctctgctgtgtgtctctgccaatctgctgggctggtccctctcatttttaccagtctgagtgacaggtccccttcgctcatcattcagatggctttccagatgaccaggacgagtgggatattttgcccccaacttggctcggcatgtgaattcttagctctgcaaggtgtttatgcctttgcgggtttcttgatgtgttcgcagtgtcaccccagagtcagaactgtacacatcccaaaatttggtggccgtggaacacattcccggtgatagaattgctaaattgtcgtgaaataggttagaatttttctttaaattatggttttcttattcgtgaaaattcggagagtgctgctaaaattggattggtgtgatctttttggtagttgtaatttaacagaaaaacacaaaatttcaaccattcttaatgttacgtcctccccccacccccttctttcagtggtatgcaaccactgcaatcactgtgcatatgtcttttcttagc

SEQ ID NO: 33702 - DNA, 799 bp, Homo sapiens
  source 1..799: mol_type = unassigned DNA
agcaaagcaagtggaaggaggagttcctctctgatctgcttcttattctccacctaccttctcttctgtactttccgcctcctagagagagagagagagagaggaatgccgacctaactaccgctgccactgctgctgccaccaccgctgccaccaccaccctggcgggagacactatattcaatcgtgctaagctcctcaatgttggctttcaagaagccttgaaggactatgactacacctgctttgtgtttagtgacgtggacctcattccaatgaatgaccataatgcgtacaggtgtttttcacagccacggcacatttccgttgcaatggataagtttggattcagcctaccttatgttcagtattttggaggtgtctctgctctaagtaaacaacagtttctaaccatcaatggatttcctaataattattggggctggggaggagaagatgatgacatttttaacagattagtttttagaggcatgtctatatctcgcccaaatgctgtggtcgggaggtgtcgcatgatccgccactcaagagacaagaaaaatgaacccaatcctcagaggtttgaccgaattgcacacacaaaggagacaatgctctctgatggtttgaactcactcacctaccaggtgctggatgtacagagatacccattgtatacccaaatcacagtggacatcgggacaccgagctagcgttttggtacacggataagagacctgaaattagccagggacctctgctgtgtgtctctgccaatctgctgggctggtccctctca

SEQ ID NO: 33703 - DNA, 1262 bp, Homo sapiens
  source 1..1262: mol_type = unassigned DNA
gtgagctgtctgagagtctggatgtatggctgtggaagtccaggagcagtggccttgtttgccagcagccggatgcccgggcccactgggcgggccagtggccgcctgcgggatgagcagactgctgggggggacgctggagcgcgtctgcaaggctgtgctccttctctgcctgctgcacttcctcgtggccgtcatcctctactttgacgtctacgcccagcacctggccttcttcagccgcttcagtgcccgaggccctgcccatgccctccacccagctgctagcagcagcagcagcagcagcaactgctcccggcccaacgccaccgcctctagctccgggctccctgaggtccccagtgccctgcccggtcccacggctcccacgctgccaccctgtcctgactcgccacctggtcttgtgggcagactgctgatcgagttcacctcacccatgcccctggagcgggtgcagagggagaacccaggcgtgctcatgggcggccgatacacaccgcccgactgcaccccagcccagacggtggcggtcatcatcccctttagacaccgggaacaccacctgcgctactggctccactatctacaccccatcttgaggcggcagcggctgcgctacggcgtctatgtcatcaaccagcatggtgaggacaccttcaaccgggccaagctgcttaacgtgggcttcctagaggcgctgaaggaggatgccgcctatgactgcttcatcttcagcgatgtggacctggtccccatggatgaccgcaacctataccgctgcggcgaccaaccccgccactttgccattgccatggacaagtttggcttccggcttccctatgctggctactttggaggtgtgtcaggcctgagtaaggctcagtttctgagaatcaatggcttccccaatgagtactggggctggggtggcgaggatgatgacatcttcaaccggatctccctgactgggatgaagatctcacgcccagacatccgaatcggccgctaccgcatgatcaagcacgaccgcgacaagcataacgaacctaaccctcagaggtttaccaagattcaaaacacgaagctgaccatgaagcgggacggcattgggtcagtgcggtaccaggtcttggaggtgtctcggcaaccactcttcaccaatatcacagtggacattgggcggcctccgtcgtggccccctcggggctgacactaatggacagaggctctcggtgccgaag

SEQ ID NO: 33704 - DNA, 2629 bp, Homo sapiens
  source 1..2629: mol_type = unassigned DNA
gtgttcagcctgccagccccgcccaaacgcacccctcagcctggccgccagcctgacccagaacccctgcgccggagggagggtgggaatgtctgcacgtgggtctgggtgtgagctgtctgagagtctggatgtatggctgtggaagtccaggagcagtggccttgtttgtgagtgtgggacttagtgtgttactgtcacccgggtgtgtctgtgactgtagttctctgtgtgtctgagtgtgggtgaccagctgggaccagggtgtccctgtgattctgtgtgcctgtgagactcaccctgctccctgaagcactgccagaagtggctgccgctctcttggaaccacagctggagccatcgcccaggcaagacccccttcctgccatgcccagtgctgtgcccatctccaggcccaagcatcccgttccgggaatcagaaccagctgtgctgggcaggacccagagtcttggtcccagtcccaaggggctggctttgaggtcttaagtgaggggtgtcccctgccttgccccgtattttgacgttttgctccagtgggaagggattctgtaaacatccagtctgtatttgggccccccggatgctgagggcaacttcccagcctggtcccagttggcctggcctgcttgtcgctgggatctgaatgaccaaaccacttcccaccatggctcctggaaggactaaatgaagtcatgagtataaagtgctcctgcatggccagcagccggatgcccgggcccactgggcgggccagtggccgcctgcgggatgagcagactgctgggggggacgctggagcgcgtctgcaaggctgtgctccttctctgcctgctgcacttcctcgtggccgtcatcctctactttgacgtctacgcccagcacctggccttcttcagccgcttcagtgcccgaggccctgcccatgccctccacccagctgctagcagcagcagcagcagcagcaactgctcccggcccaacgccaccgcctctagctccgggctccctgaggtccccagtgccctgcccggtcccacggctcccacgctgccaccctgtcctgactcgccacctggtcttgtgggcagactgctgatcgagttcacctcacccatgcccctggagcgggtgcagagggagaacccaggcgtgctcatgggcggccgatacacaccgcccgactgcaccccagcccagacggtggcggtcatcatcccctttagacaccgggaacaccacctgcgctactggctccactatctacaccccatcttgaggcggcagcggctgcgctacggcgtctatgtcatcaaccagcatggtgaggacaccttcaaccgggccaagctgcttaacgtgggcttcctagaggcgctgaaggaggatgccgcctatgactgcttcatcttcagcgatgtggacctggtccccatggatgaccgcaacctataccgctgcggcgaccaaccccgccactttgccattgccatggacaagtttggcttccggcttccctatgctggctactttggaggtgtgtcaggcctgagtaaggctcagtttctgagaatcaatggcttccccaatgagtactggggctggggtggcgaggatgatgacatcttcaaccggatctccctgactgggatgaagatctcacgcccagacatccgaatcggccgctaccgcatgatcaagcacgaccgcgacaagcataacgaacctaaccctcagaggtttaccaagattcaaaacacgaagctgaccatgaagcgggacggcattgggtcagtgcggtaccaggtcttggaggtgtctcggcaaccactcttcaccaatatcacagtggacattgggcggcctccgtcgtggccccctcggggctgacactaatggacagaggctctcggtgccgaagattgcctgccagaggactgaccacagcctggctggcagctgctctgtggaggacctccaggactgagactgggctctgttttccaagggtcttcactaggccccctagctacacctggaagtttcagaacccactttggggggcctcctgcctgggcaggctcttcaagtgtggccctctttggagtcaaccctccttcccgaccccctccccctagcccagccccagtcactgtcagggtcgggccagcccctgcactgcctcgcagagtggcctgggctaggtcactccacctctctgtgcctcagtttcccccccttgagtcccctagggcctggaagggtgggaggtatgtctagggggcagtgtctcttccagggggaattctcagctcttgggaacccccttgctcccaggggaggggaaacctttttcattcaacattgtagggggcaagctttggtgcgccccctgctgaggagcagccccaggaggggaccagaggggatgctgtgtcgctgcctgggatcttggggttggcctttgcatgggaggcaggtggggcttggatcagtaagtctggttcccgcctccctgtctgagagaggaggcaggagccccagggccggcttgtgtttgtacattgcacagaaacttgtgtgggtgctttagtaaaaaacgtgaatgga

SEQ ID NO: 33705 - DNA, 2208 bp, Homo sapiens
  source 1..2208: mol_type = unassigned DNA
cgcgcgggccgggcctgcccctccgaggcgccgtagcgcgggagggaggcggcggcgctgtggtccgtgggtccgccggtccgtgggtctgcccggccgcccggccccgccctgccccccggggcggctcggctccatggcccgcggcggcggcggcggcggcggcggcgggaggcgacccgggggccgcggtggccgctgaccgggcggcgggaggcggcggggccgggccatgggggacggaaccgtccgcagccgccggagccgggagccctgcccaagtcggagcggcgtcccctgctgagccccgagcgccgggccagcagccggatgcccgggcccactgggcgggccagtggccgcctgcgggatgagcagactgctgggggggacgctggagcgcgtctgcaaggctgtgctccttctctgcctgctgcacttcctcgtggccgtcatcctctactttgacgtctacgcccagcacctggccttcttcagccgcttcagtgcccgaggccctgcccatgccctccacccagctgctagcagcagcagcagcagcagcaactgctcccggcccaacgccaccgcctctagctccgggctccctgaggtccccagtgccctgcccggtcccacggctcccacgctgccaccctgtcctgactcgccacctggtcttgtgggcagactgctgatcgagttcacctcacccatgcccctggagcgggtgcagagggagaacccaggcgtgctcatgggcggccgatacacaccgcccgactgcaccccagcccagacggtggcggtcatcatcccctttagacaccgggaacaccacctgcgctactggctccactatctacaccccatcttgaggcggcagcggctgcgctacggcgtctatgtcatcaaccagcatggtgaggacaccttcaaccgggccaagctgcttaacgtgggcttcctagaggcgctgaaggaggatgccgcctatgactgcttcatcttcagcgatgtggacctggtccccatggatgaccgcaacctataccgctgcggcgaccaaccccgccactttgccattgccatggacaagtttggcttccggcttccctatgctggctactttggaggtgtgtcaggcctgagtaaggctcagtttctgagaatcaatggcttccccaatgagtactggggctggggtggcgaggatgatgacatcttcaaccggatctccctgactgggatgaagatctcacgcccagacatccgaatcggccgctaccgcatgatcaagcacgaccgcgacaagcataacgaacctaaccctcagaggtttaccaagattcaaaacacgaagctgaccatgaagcgggacggcattgggtcagtgcggtaccaggtcttggaggtgtctcggcaaccactcttcaccaatatcacagtggacattgggcggcctccgtcgtggccccctcggggctgacactaatggacagaggctctcggtgccgaagattgcctgccagaggactgaccacagcctggctggcagctgctctgtggaggacctccaggactgagactgggctctgttttccaagggtcttcactaggccccctagctacacctggaagtttcagaacccactttggggggcctcctgcctgggcaggctcttcaagtgtggccctctttggagtcaaccctccttcccgaccccctccccctagcccagccccagtcactgtcagggtcgggccagcccctgcactgcctcgcagagtggcctgggctaggtcactccacctctctgtgcctcagtttcccccccttgagtcccctagggcctggaagggtgggaggtatgtctagggggcagtgtctcttccagggggaattctcagctcttgggaacccccttgctcccaggggaggggaaacctttttcattcaacattgtagggggcaagctttggtgcgccccctgctgaggagcagccccaggaggggaccagaggggatgctgtgtcgctgcctgggatcttggggttggcctttgcatgggaggcaggtggggcttggatcagtaagtctggttcccgcctccctgtctgagagaggaggcaggagccccagggccggcttgtgtttgtacattgcacagaaacttgtgtgggtgctttagtaaaaaacgtgaatgg

SEQ ID NO: 33706 - DNA, 1923 bp, Homo sapiens
  source 1..1923: mol_type = unassigned DNA
gaaccgtccgcagccgccggagccgggagccctgcccaagtcggagcggcgtcccctgctgagccccgagcgccgggccagcagccggatgcccgggcccactgggcgggccagtggccgcctgcgggatgagcagactgctgggggggacgctggagcgcgtctgcaaggctgtgctccttctctgcctgctgcacttcctcgtggccgtcatcctctactttgacgtctacgcccagcacctggccttcttcagccgcttcagtgcccgaggccctgcccatgccctccacccagctgctagcagcagcagcagcagcagcaactgctcccggcccaacgccaccgcctctagctccgggctccctgaggtccccagtgccctgcccggtcccacggctcccacgctgccaccctgtcctgactcgccacctggtcttgcgggtgcagagggagaacccaggcgtgctcatgggcggccgatacacaccgcccgactgcaccccagcccagacggtggcggtcatcatcccctttagacaccgggaacaccacctgcgctactggctccactatctacaccccatcttgaggcggcagcggctgcgctacggcgtctatgtcatcaaccagcatggtgaggacaccttcaaccgggccaagctgcttaacgtgggcttcctagaggcgctgaaggaggatgccgcctatgactgcttcatcttcagcgatgtggacctggtccccatggatgaccgcaacctataccgctgcggcgaccaaccccgccactttgccattgccatggacaagtttggcttccggcttccctatgctggctactttggaggtgtgtcaggcctgagtaaggctcagtttctgagaatcaatggcttccccaatgagtactggggctggggtggcgaggatgatgacatcttcaaccggatctccctgactgggatgaagatctcacgcccagacatccgaatcggccgctaccgcatgatcaagcacgaccgcgacaagcataacgaacctaaccctcagaggtttaccaagattcaaaacacgaagctgaccatgaagcgggacggcattgggtcagtgcggtaccaggtcttggaggtgtctcggcaaccactcttcaccaatatcacagtggacattgggcggcctccgtcgtggccccctcggggctgacactaatggacagaggctctcggtgccgaagattgcctgccagaggactgaccacagcctggctggcagctgctctgtggaggacctccaggactgagactgggctctgttttccaagggtcttcactaggccccctagctacacctggaagtttcagaacccactttggggggcctcctgcctgggcaggctcttcaagtgtggccctctttggagtcaaccctccttcccgaccccctccccctagcccagccccagtcactgtcagggtcgggccagcccctgcactgcctcgcagagtggcctgggctaggtcactccacctctctgtgcctcagtttcccccccttgagtcccctagggcctggaagggtgggaggtatgtctagggggcagtgtctcttccagggggaattctcagctcttgggaacccccttgctcccaggggaggggaaacctttttcattcaacattgtagggggcaagctttggtgcgccccctgctgaggagcagccccaggaggggaccagaggggatgctgtgtcgctgcctgggatcttggggttggcctttgcatgggaggcaggtggggcttggatcagtaagtctggttcccgcctccctgtctgagagaggaggcaggagccccagggccggcttgtgtttgtacattgcacagaaacttgtgtgggtgctttagtaaaaaacgtgaatgga

SEQ ID NO: 33707 - DNA, 1619 bp, Homo sapiens
  source 1..1619: mol_type = unassigned DNA
atgttgcggaggctgctggagcggccttgcacgctggccctgcttgtgggctcccagctggctgtcatgatgtacctgtcactggggggcttccgaagtctcagtgccctatttggccgagatcagggaccgacatttgactattctcaccctcgtgatgtctacagtaacctcagtcacctgcctggggccccagggggtcctccagctcctcaaggtctgccctactgtccagaacgatctcctctcttagtgggtcctgtgtcggtgtcctttagcccagtgccatcactggcagagattgtggagcggaatccccgggtagaaccagggggccggtaccgccctcctgctgctctaccacctgcaccccttcttgcagcgccagcagcttgcttatggcatctatgtcatccaccaggctggaaatggaacatttaacagggcaaaactgttgaacgttggggtgcgagaggccctgcgtgatgaagagtgggactgcctgttcttgcacgatgtggacctcttgccagaaaatgaccacaatctgtatgtgtgtgacccccggggaccccgccatgttgccgttgctatgaacaagtttggatacagcctcccgtacccccagtacttcggaggagtctcagcacttactcctgaccagtacctgaagatgaatggcttccccaatgaatactggggctggggtggtgaggatgacgacattgctaccagggtgcgcctggctgggatgaagatctctcggccccccacatctgtaggacactataagatggtgaagcaccgaggagataagggcaatgaggaaaatccccacagatttgacctcctggtccgtacccagaattcctggacgcaagatgggatgaactcactgacataccagttgctggctcgagagctggggcctctttataccaacatcacagcagacattgggactgaccctcggggtcctcgggctccttctgggccacgttacccacctggttcctcccaagccttccgtcaagagatgctgcaacgccggcccccagccaggcctgggcctctatctactgccaaccacacagccctccgaggttcacactgactcctccttcctgtctaccttaatcatgaaaccgaattcatggggttgtattctccccaccctcagctcctcactgttctcagagggatgtgagggaactgaactctggtgccgtgctagggggtaggggcctctccctcactgctggactggagctgggctcctgtagacctgaggggtccctctctctagggtctcctgtagggcttatgactgtgaatccttgatgtcatgattttatgtgacgattcctaggagtccctgcccctagagtaggagcagggctggaccccaagcccctccctcttccatggagagaagagtgatctggcttctcctcggacctctgtgaatatttattctatttatggttcccgggaagttgtttggtgaaggaagcccctccctgggcattttctgcctatgctggaatagctccctcttctggtcctggctcagggggctgggattttgatatattttctaataaaggactttgtctcgc

SEQ ID NO: 33708 - DNA, 1911 bp, Homo sapiens
  source 1..1911: mol_type = unassigned DNA
atggcggcagcgatgcctgcccggctgttggggtggcggtgacgacaggcagcaaaagaccagctggtcccagattcgctgctggagtgctggatggagcctttctctgccctctgtgacatttccaattttagataatgcctcacatctctgtccccccgggaccccctggagcccccatgatccctaagaagacagcttgaacctagatctcacccccaggatgttgcggaggctgctggagcggccttgcacgctggccctgcttgtgggctcccagctggctgtcatgatgtacctgtcactggggggcttccgaagtctcagtgccctatttggccgagatcagggaccgacatttgactattctcaccctcgtgatgtctacagtaacctcagtcacctgcctggggccccagggggtcctccagctcctcaaggtctgccctactgtccagaacgatctcctctcttagtgggtcctgtgtcggtgtcctttagcccagtgccatcactggcagagattgtggagcggaatccccgggtagaaccagggggccggtaccgccctgcaggttgtgagccccgctcccgaacagccatcattgtgcctcatcgtgcccgggagcaccacctgcgcctgctgctctaccacctgcaccccttcttgcagcgccagcagcttgcttatggcatctatgtcatccaccaggctggaaatggaacatttaacagggcaaaactgttgaacgttggggtgcgagaggccctgcgtgatgaagagtgggactgcctgttcttgcacgatgtggacctcttgccagaaaatgaccacaatctgtatgtgtgtgacccccggggaccccgccatgttgccgttgctatgaacaagtttggatacagcctcccgtacccccagtacttcggaggagtctcagcacttactcctgaccagtacctgaagatgaatggcttccccaatgaatactggggctggggtggtgaggatgacgacattgctaccagggtgcgcctggctgggatgaagatctctcggccccccacatctgtaggacactataagatggtgaagcaccgaggagataagggcaatgaggaaaatccccacagatttgacctcctggtccgtacccagaattcctggacgcaagatgggatgaactcactgacataccagttgctggctcgagagctggggcctctttataccaacatcacagcagacattgggactgaccctcggggtcctcgggctccttctgggccacgttacccacctggttcctcccaagccttccgtcaagagatgctgcaacgccggcccccagccaggcctgggcctctatctactgccaaccacacagccctccgaggttcacactgactcctccttcctgtctaccttaatcatgaaaccgaattcatggggttgtattctccccaccctcagctcctcactgttctcagagggatgtgagggaactgaactctggtgccgtgctagggggtaggggcctctccctcactgctggactggagctgggctcctgtagacctgaggggtccctctctctagggtctcctgtagggcttatgactgtgaatccttgatgtcatgattttatgtgacgattcctaggagtccctgcccctagagtaggagcagggctggaccccaagcccctccctcttccatggagagaagagtgatctggcttctcctcggacctctgtgaatatttattctatttatggttcccgggaagttgtttggtgaaggaagcccctccctgggcattttctgcctatgctggaatagctccctcttctggtcctggctcagggggctgggattttgatatattttctaataaaggactttgtctcgca

SEQ ID NO: 33709 - DNA, 1402 bp, Homo sapiens
  source 1..1402: mol_type = unassigned DNA
atggcggcagcgatgcctgcccggctgttggggtggcggtgacgacaggcagcaaaagaccagctggtcccagattcgctgctggagtgctggatggagcctttctctgccctctgtgacatttccaattttagataatgcctcacatctctgtccccccgggaccccctggagcccccatgatccctaagaagacagcttgaacctagatctcacccccaggatgttgcggaggctgctggagcggccttgcacgctggccctgcttgtgggctcccagctggctgtcatgatgtacctgtcactggggggcttccgaagtctcagtgccctatttggccgagatcagggaccgacatttgactattctcaccctcgtgatgtctacagtaacctcagtcacctgcctggggccccagggggtcctccagctcctcaaggtctgccctactgtccagaacgatctcctctcttagtgggtcctgtgtcggtgtcctttagcccagtgccatcactggcagagattgtggagcggaatccccgggtagaaccagggggccggtaccgccctgcaggttgtgagccccgctcccgaacagccatcattgtgcctcatcgtgcccgggagcaccacctgcgcctgctgctctaccacctgcaccccttcttgcagcgccagcagcttgcttatggcatctatgtcatccaccaggctggaaatggaacatttaacagggcaaaactgttgaacgttggggtgcgagaggccctgcgtgatgaagagtgggactgcctgttcttgcacgatgtggacctcttgccagaaaatgaccacaatctgtatgtgtgtgacccccggggaccccgccatgttgccgttgctatgaacaagtttggatacagcctcccgtacccccagtacttcggaggagtctcagcacttactcctgaccagtacctgaagatgaatggcttccccaatgaatactggggctggggtggtgaggatgacgacattgctaccagggtgcgcctggctgggatgaagatctctcggccccccacatctgtaggacactataagatggtgaagcaccgaggagataagggcaatgaggaaaatccccacagatttgacctcctggtccgtacccagaattcctggacgcaagatgggatgaactcactgacataccagttgctggctcgagagctggggcctctttataccaacatcacagcagacattgggactgaccctcggggtcctcgggctccttctgggccacgttacccacctggttcctcccaagccttccgtcaagagatgctgcaacgccggcccccagccaggcctgggcctctatctactgccaaccacacaccctccgaggttcacact

SEQ ID NO: 33710 - DNA, 1871 bp, Homo sapiens
  source 1..1871: mol_type = unassigned DNA
cccgcttccaagatggcggcagcgatgcctgcccggctgttggggtggcggtgacgacaggcagcaaaagaccagataatgcctcacatctctgtccccccgggaccccctggagcccccatgatccctaagaagacagcttgaacctagaattcccctctccctccctagatctcacccccaggatgttgcggaggctgctggagcggccttgcacgctggccctgcttgtgggctcccagctggctgtcatgatgtacctgtcactggggggcttccgaagtctcagtgccctatttggccgagatcagggaccgacatttgactattctcaccctcgtgatgtctacagtaacctcagtcacctgcctggggccccagggggtcctccagctcctcaaggtctgccctactgtccagaacgatctcctctcttagtgggtcctgtgtcggtgtcctttagcccagtgccatcactggcagagattgtggagcggaatccccgggtagaaccagggggccggtaccgccctgcaggttgtgagccccgctcccgaacagccatcattgtgcctcatcgtgcccgggagcaccacctgcgcctgctgctctaccacctgcaccccttcttgcagcgccagcagcttgcttatggcatctatgtcatccaccaggctggaaatggaacatttaacagggcaaaactgttgaacgttggggtgcgagaggccctgcgtgatgaagagtgggactgcctgttcttgcacgatgtggacctcttgccagaaaatgaccacaatctgtatgtgtgtgacccccggggaccccgccatgttgccgttgctatgaacaagtttggatacagcctcccgtacccccagtacttcggaggagtctcagcacttactcctgaccagtacctgaagatgaatggcttccccaatgaatactggggctggggtggtgaggatgacgacattgctaccagggtgcgcctggctgggatgaagatctctcggccccccacatctgtaggacactataagatggtgaagcaccgaggagataagggcaatgaggaaaatccccacagatttgacctcctggtccgtacccagaattcctggacgcaagatgggatgaactcactgacataccagttgctggctcgagagctggggcctctttataccaacatcacagcagacattgggactgaccctcggggtcctcgggctccttctgggccacgttacccacctggttcctcccaagccttccgtcaagagatgctgcaacgccggcccccagccaggcctgggcctctatctactgccaaccacacagccctccgaggttcacactgactcctccttcctgtctaccttaatcatgaaaccgaattcatggggttgtattctccccaccctcagctcctcactgttctcagagggatgtgagggaactgaactctggtgccgtgctagggggtaggggcctctccctcactgctggactggagctgggctcctgtagacctgaggggtccctctctctagggtctcctgtagggcttatgactgtgaatccttgatgtcatgattttatgtgacgattcctaggagtccctgcccctagagtaggagcagggctggaccccaagcccctccctcttccatggagagaagagtgatctggcttctcctcggacctctgtgaatatttattctatttatggttcccgggaagttgtttggtgaaggaagcccctccctgggcattttctgcctatgctggaatagctccctcttctggtcctggctcagggggctgggattttgatatattttctaataaaggactttgtctcg

SEQ ID NO: 33711 - DNA, 1875 bp, Homo sapiens
  source 1..1875: mol_type = unassigned DNA
gcgagaccccgcccccgcagcgcccgcttccaagatggcggcagcgatgcctgcccggctgttggggtggcggtgacgacaggcagcaaaagaccagctggtcccagattcgctgctggagtgctggatggagcctttctctgccctctgtgacatttccaattttagataatgcctcacatctctgtccccccgggaccccctggagcccccatgatccctaagaagacagcttgaacctagatctcacccccaggatgttgcggaggctgctggagcggccttgcacgcttgccctatttggccgagatcagggaccgacatttgactattctcaccctcgtgatgtctacagtaacctcagtcacctgcctggggccccagggggtcctccagctcctcaaggtctgccctactgtccagaacgatctcctctcttagtgggtcctgtgtcggtgtcctttagcccagtgccatcactggcagagattgtggagcggaatccccgggtagaaccagggggccggtaccgccctgcaggttgtgagccccgctcccgaacagccatcattgtgcctcatcgtgcccgggagcaccacctgcgcctgctgctctaccacctgcaccccttcttgcagcgccagcagcttgcttatggcatctatgtcatccaccaggctggaaatggaacatttaacagggcaaaactgttgaacgttggggtgcgagaggccctgcgtgatgaagagtgggactgcctgttcttgcacgatgtggacctcttgccagaaaatgaccacaatctgtatgtgtgtgacccccggggaccccgccatgttgccgttgctatgaacaagtttggatacagcctcccgtacccccagtacttcggaggagtctcagcacttactcctgaccagtacctgaagatgaatggcttccccaatgaatactggggctggggtggtgaggatgacgacattgctaccagggtgcgcctggctgggatgaagatctctcggccccccacatctgtaggacactataagatggtgaagcaccgaggagataagggcaatgaggaaaatccccacagatttgacctcctggtccgtacccagaattcctggacgcaagatgggatgaactcactgacataccagttgctggctcgagagctggggcctctttataccaacatcacagcagacattgggactgaccctcggggtcctcgggctccttctgggccacgttacccacctggttcctcccaagccttccgtcaagagatgctgcaacgccggcccccagccaggcctgggcctctatctactgccaaccacacagccctccgaggttcacactgactcctccttcctgtctaccttaatcatgaaaccgaattcatggggttgtattctccccaccctcagctcctcactgttctcagagggatgtgagggaactgaactctggtgccgtgctagggggtaggggcctctccctcactgctggactggagctgggctcctgtagacctgaggggtccctctctctagggtctcctgtagggcttatgactgtgaatccttgatgtcatgattttatgtgacgattcctaggagtccctgcccctagagtaggagcagggctggaccccaagcccctccctcttccatggagagaagagtgatctggcttctcctcggacctctgtgaatatttattctatttatggttcccgggaagttgtttggtgaaggaagcccctccctgggcattttctgcctatgctggaatagctccctcttctggtcctggctcagggggctgggattttgatatattttctaataaaggactttgtctcgc

SEQ ID NO: 33712 - DNA, 3081 bp, Homo sapiens
  source 1..3081: mol_type = unassigned DNA
atgtgcgctgggaatgcgtcgacacggaggcctgggataaaggtttgggcattcgagagagtgagaagttttgggtaacgcctggagacgagcctgagcagggacggggtcctaggtggaagtatggacgggggccgggcgggctcacgttgctagtaggtagggcaaaagcaagagactgtctctgcccctgctctccctctccctttctcttcagcagtaaccctcctccccacccccgctagaagaggggaaaggtagaaaaggtagaggacgccacccccaccctactctccgccgagctccggggctgttcgcttacagcccccaggtggtcacggtccctgcacctgaggagttggcacccaggcacatgaagaatagaaggagcctgtttcctacttcgccctgggtactccttaggccactccacggtcctgtcatgactctgtcgccacttcaactggttcttggtctgggggaaaacaatgtttccattagctgtcctgtccccactccccaatctgtcctgttggggtgggggtacgggggtggttaagtatgaacctgacacttatcattccagggtagcacgggagataggcgagggacctaccatctcctgctcctcctcttcctttccaaccactttccttcacttcgcctgctgggaaaccagcttcaccctgatcctgatctctggcggtgcaggtagctagttatcctttaccacttctgttccagctggtcccagattcgctgctggagtgctggatggagcctttctctgccctctgtgacatttccaattttagataatgcctcacatctctgtccccccgggaccccctggagcccccatgatccctaagaagacagcttgaacctaggtgagtctatctcttcccttctaaaattggaagagggggttctctagagactttctgaaatgaacatgagatttgaatgatgtaaacatttttgggggtgaggactgacagtagatggtgggagtggtttggggggaggtagaggagagcgaaacttgggctgaagtgacaggtggtagggttactggtggttacattctgtttccttgcgtgactgtgcacctgtgtgctcccttctgtgactttgttttctgctttttcctctttacccctggcatcaccttcaaccctacctactgacctctctgctggcttgctctcttcctgcctacccccagaattcccctctccctccctagatctcacccccaggatgttgcggaggctgctggagcggccttgcacgctggccctgcttgtgggctcccagctggctgtcatgatgtacctgtcactggggggcttccgaagtctcagtgccctatttggccgagatcagggaccgacatttgactattctcaccctcgtgatgtctacagtaacctcagtcacctgcctggggccccagggggtcctccagctcctcaaggtctgccctactgtccagaacgatctcctctcttagtgggtcctgtgtcggtgtcctttagcccagtgccatcactggcagagattgtggagcggaatccccgggtagaaccagggggccggtaccgccctgcaggttgtgagccccgctcccgaacagccatcattgtgcctcatcgtgcccgggagcaccacctgcgcctgctgctctaccacctgcaccccttcttgcagcgccagcagcttgcttatggcatctatgtcatccaccaggctggaaatggaacatttaacagggcaaaactgttgaacgttggggtgcgagaggccctgcgtgatgaagagtgggactgcctgttcttgcacgatgtggacctcttgccagaaaatgaccacaatctgtatgtgtgtgacccccggggaccccgccatgttgccgttgctatgaacaagtttggatacaggtagagggcatggaagggtactgggaaacagggaagcctactatcctgtggaaggaggagagccaagcggattgtggttggggatgtgtccccagaagactcggggtatgcaaggatctttctctccctagcctcccgtacccccagtacttcggaggagtctcagcacttactcctgaccagtacctgaagatgaatggcttccccaatgaatactggggctggggtggtgaggatgacgacattgctaccagggtgcgcctggctgggatgaagatctctcggccccccacatctgtaggacactataagatggtgaagcaccgaggagataagggcaatgaggaaaatccccacagatttgacctcctggtccgtacccagaattcctggacgcaagatgggatgaactcactgacataccagttgctggctcgagagctggggcctctttataccaacatcacagcagacattgggactgaccctcggggtcctcgggctccttctgggccacgttacccacctggttcctcccaagccttccgtcaagagatgctgcaacgccggcccccagccaggcctgggcctctatctactgccaaccacacagccctccgaggttcacactgactcctccttcctgtctaccttaatcatgaaaccgaattcatggggttgtattctccccaccctcagctcctcactgttctcagagggatgtgagggaactgaactctggtgccgtgctagggggtaggggcctctccctcactgctggactggagctgggctcctgtagacctgaggggtccctctctctagggtctcctgtagggcttatgactgtgaatccttgatgtcatgattttatgtgacgattcctaggagtccctgcccctagagtaggagcagggctggaccccaagcccctccctcttccatggagagaagagtgatctggcttctcctcggacctctgtgaatatttattctatttatggttcccgggaagttgtttggtgaaggaagcccctccctgggcattttctgcctatgctggaatagctccctcttctggtcctggctcagggggctgggattttgatatattttctaataaaggactttgtctcgc

SEQ ID NO: 33713 - DNA, 2385 bp, Homo sapiens
  source 1..2385: mol_type = unassigned DNA
aagagccgcctcccgggcggctggggcggtccccgagctgctttccgcgttctcccctctccgcgggcagtgctagctcgccgcggccgcctccggggaccacctggcttcatgtgtggatttccacggctcttgcccagaggcgggtacactgtgttccaatgtgccacggaactcacgcagtggcactttgtggcttcatgaaggaagaggcaggccacgcaacacttcctccccaagccaaggagaagtatcacttttagaggcagaggagcggaaggcagtgggtgtgaccaaaagtgccatttgttaaagcttatcttccttgccagattttaaaaactattatggaaaatctcaagcattcacaaaagtagagagaaagaaaggactctcagactgttggagcagaactactgagaaaaaccaggcattgtatcttcagttgtcatcaagttcgcaatcagattggaaaagctcaacttgaagctttcttgcctgcagtgaagcagagagatagatattattcacgtaataaaaaacatgggcttcaacctgactttccacctttcctacaaattccgattactgttgctgttgactttgtgcctgacagtggttgggtgggccaccagtaactacttcgtgggtgccattcaagagattcctaaagcaaaggagttcatggctaatttccataagaccctcattttggggaagggaaaaactctgactaatgaagcatccacgaagaaggtagaacttgacaactgcccttctgtgtctccttacctcagaggccagagcaagctcattttcaaaccagatctcactttggaagaggtacaggcagaaaatcccaaagtgtccagaggccggtatcgccctcaggaatgtaaagctttacagagggtcgccatcctcgttccccaccggaacagagagaaacacctgatgtacctgctggaacatctgcatcccttcctgcagaggcagcagctggattatggcatctacgtcatccaccaggctgaaggtaaaaagtttaatcgagccaaactcttgaatgtgggctatctagaagccctcaaggaagaaaattgggactgctttatattccacgatgtggacctggtacccgagaatgactttaacctttacaagtgtgaggagcatcccaagcatctggtggttggcaggaacagcactgggtacaggttacgttacagtggatattttgggggtgttactgccctaagcagagagcagtttttcaaggtgaatggattctctaacaactactggggatggggaggcgaagacgatgacctcagactcagggttgagctccaaagaatgaaaatttcccggcccctgcctgaagtgggtaaatatacaatggtcttccacactagagacaaaggcaatgaggtgaacgcagaacggatgaagctcttacaccaagtgtcacgagtctggagaacagatgggttgagtagttgttcttataaattagtatctgtggaacacaatcctttatatatcaacatcacagtggatttctggtttggtgcatgaccctgggtcttttggtgatgtttggaagaactgattctttgtttgcaataattttggcctagagacttcaaatagtagcacacattaagaacctgttacagctcattgttgagctgaatttttcctttttgtattttcttagcagagctcctggtgatgtagagtataaaacagttgtaacaagacagctttcttagtcattttgatcatgagggttaaatattgtaatatggatacttgaaggactttatataaaaggatgactcaaaggataaaatgaacgctatttgaggactctggttgaaggagatttatttaaatttgaagtaatatattatgggataaaaggccacaggaaataagactgctgaatgtctgagagaaccagagttgttctcgtccaaggtagaaaggtacgaagatacaatactgttattcatttatcctgtacaatcatctgtgaagtggtggtgtcaggtgagaaggcgtccacaaaagaggggagaaaaggcgacgaatcaggacacagtgaacttgggaatgaagaggtagcaggagggtggagtgtcggctgcaaaggcagcagtagctgagctggttgcagctgctgatagccttcaggggaggacctgcccaggtatgccttccagtgatgcccaccagagaatacattctctattagtttttaaagagtttttgtaaaatgattttgtacaagtaggatatgaattagcagtttacaagtttacatattaactaataataaatatgtctatcaaatacctctgtagtaaaatgtgaaaaagc

SEQ ID NO: 33714 - DNA, 2459 bp, Homo sapiens
  source 1..2459: mol_type = unassigned DNA
aaagccacccagaggccgaggcgtcaaccctccgtttccctcccggtgctccttccagcgcccggtgtggtcgatttggcgggggtggagcgccaggcgcgtgcagagccgggcggaccagcctctccggccaaggcgggaggcggagctcgtactcaagagccgcctcccgggcggctggggcggtccccgagctgctttccgcgttctcccctctccgcgggcagtgctagctcgccgcggccgcctccggggaccacctggcttcatgtgtggatttccacggctcttgcccagaggcgggtacactgtgttccaatgtgccacggaactcacgcagtggcactttgtggcttcatgaaggaagaggcaggccacgcaacacttcctccccaagccaaggagaagtatcacttttagaggcagaggagcggaaggcagtgggtgtgaccaaaagtgccatttgttaaagactgttggagcagaactactgagaaaaaccaggcattgtatcttcagttgtcatcaagttcgcaatcagattggaaaagctcaacttgaagctttcttgcctgcagtgaagcagagagatagatattattcacgtaataaaaaacatgggcttcaacctgactttccacctttcctacaaattccgattactgttgctgttgactttgtgcctgacagtggttgggtgggccaccagtaactacttcgtgggtgccattcaagagattcctaaagcaaaggagttcatggctaatttccataagaccctcattttggggaagggaaaaactctgactaatgaagcatccacgaagaaggtagaacttgacaactgcccttctgtgtctccttacctcagaggccagagcaagctcattttcaaaccagatctcactttggaagaggtacaggcagaaaatcccaaagtgtccagaggccggtatcgccctcaggaatgtaaagctttacagagggtcgccatcctcgttccccaccggaacagagagaaacacctgatgtacctgctggaacatctgcatcccttcctgcagaggcagcagctggattatggcatctacgtcatccaccaggctgaaggtaaaaagtttaatcgagccaaactcttgaatgtgggctatctagaagccctcaaggaagaaaattgggactgctttatattccacgatgtggacctggtacccgagaatgactttaacctttacaagtgtgaggagcatcccaagcatctggtggttggcaggaacagcactgggtacaggttacgttacagtggatattttgggggtgttactgccctaagcagagagcagtttttcaaggtgaatggattctctaacaactactggggatggggaggcgaagacgatgacctcagactcagggttgagctccaaagaatgaaaatttcccggcccctgcctgaagtgggtaaatatacaatggtcttccacactagagacaaaggcaatgaggtgaacgcagaacggatgaagctcttacaccaagtgtcacgagtctggagaacagatgggttgagtagttgttcttataaattagtatctgtggaacacaatcctttatatatcaacatcacagtggatttctggtttggtgcatgaccctgggtcttttggtgatgtttggaagaactgattctttgtttgcaataattttggcctagagacttcaaatagtagcacacattaagaacctgttacagctcattgttgagctgaatttttcctttttgtattttcttagcagagctcctggtgatgtagagtataaaacagttgtaacaagacagctttcttagtcattttgatcatgagggttaaatattgtaatatggatacttgaaggactttatataaaaggatgactcaaaggataaaatgaacgctatttgaggactctggttgaaggagatttatttaaatttgaagtaatatattatgggataaaaggccacaggaaataagactgctgaatgtctgagagaaccagagttgttctcgtccaaggtagaaaggtacgaagatacaatactgttattcatttatcctgtacaatcatctgtgaagtggtggtgtcaggtgagaaggcgtccacaaaagaggggagaaaaggcgacgaatcaggacacagtgaacttgggaatgaagaggtagcaggagggtggagtgtcggctgcaaaggcagcagtagctgagctggttgcagctgctgatagccttcaggggaggacctgcccaggtatgccttccagtgatgcccaccagagaatacattctctattagtttttaaagagtttttgtaaaatgattttgtacaagtaggatatgaattagcagtttacaagtttacatattaactaataataaatatgtctatcaaatacctctgtagtaaaatgtgaaaaagc

SEQ ID NO: 33715 - DNA, 611 bp, Homo sapiens
  source 1..611: mol_type = unassigned DNA
gctttccgcgttctcccctctccgcgggcagtgctagctcgccgcggccgcctccggggtcacgattccggggtcgcccccagcacttctccgccgggtgcatcaacctgaaaaagccccttcttcctggaaaccctccttctccagcgtttcaacggggaaactgatcagctgacaccagccccagtcctgcgaggggccggcgacctttgacctttctccaaaggggaccacctggcttcatgtgtggatttccacggctcttgcccagaggcgggtacactgtgttccaatgtgccacggaactcacgcagtggcactttgtggcttcatgaaggaagaggcaggccacgcaacacttcctccccaagccaaggagaagtatcacttttagaggcagaggagcggaaggcagtgggtgtgaccaaaagtgccatttgttaaagactgttggagcagaactactgagaaaaaccaggcattgtatcttcagttgtcatcaagttcgcaatcagattggaaaagctcaacttgaagctttcttgcctgcagtgaagcagagagatagatattattcacgtaataaaaaacatgggcttcaacctgacttt

SEQ ID NO: 33716 - DNA, 582 bp, Homo sapiens
  source 1..582: mol_type = unassigned DNA
agtgctagctcgccgcggccgcctccggggaccacctggcttcatgtgtggatttccacggctcttgcccagaggcgggtacactgtgttccaatgtgccacggaactcacgcagtggcactttgtggcttcatgaaggaagaggcaggccacgcaacacttcctccccaagccaaggagaagtatcacttttagaggcagaggagcggaaggcagtgggtgtgaccaaaagtgccatttgttaaagtctcctccaatctgaaatagttcctcagtttttcctcgtctttcatgattttgattcttcgaagagtaccagttaggtatatcgtggaatgaacttgtgcttatcttccttgccagattttaaaaactattatggaaaatctcaagcattcacaaaagtagagagaaagaaaggactctcagactgttggagcagaactactgagaaaaaccaggcattgtatcttcagttgtcatcaagttcgcaatcagattggaaaagctcaacttgaagctttcttgcctgcagtgaagcagagagatagatattattcacgtaataaaaaacatgggctt

SEQ ID NO: 33717 - DNA, 641 bp, Homo sapiens
  source 1..641: mol_type = unassigned DNA
agtgctagctcgccgcggccgcctccggggtgagtacgctggctccgccggcgcccgggaaatgcagttccctggacacgggcgccgtgcgagggtagccgggcgacggccggggaccacctggcttcatgtgtggatttccacggctcttgcccagaggcgggtacactgtgttccaatgtgccacggaactcacgcagtggcactttgtggcttcatgaaggaagaggcaggccacgcaacacttcctccccaagccaaggagaagtatcacttttagaggcagaggagcggaaggcagtgggtgtgaccaaaagtgccatttgttaaagactgttggagcagaactactgagaaaaaccaggcattgtatcttcagttgtcatcaagttcgcaatcagattggaaaagctcaacttgaagctttcttgcctgcagtgaagcagagagatagatattattcacgtaataaaaaacatgggcttcaacctgactttccacctttcctacaaattccgattactgttgctgttgactttgtgcctgacagtggttgggtgggccaccagtaactacttcgtgggtgccattcaagagattcctaaagcaaaggagttcatggctaatttccataagaccct

SEQ ID NO: 33718 - DNA, 560 bp, Homo sapiens
  source 1..560: mol_type = unassigned DNA
gtgcacactgttgcaaagtgttccagagtgggtgagggatggggacgtggcggtggtgagggtactggtagacctcctcagccgtttggtgatgaaaaggaggaaaaagaaaatggtaatctgagcgtggaggaccacctggcttcatgtgtggatttccacggctcttgcccagaggcgggtacactgtgttccaatgtgccacggaactcacgcagtggcactttgtggcttcatgaaggaagaggcaggccacgcaacacttcctccccaagccaaggagaagtatcacttttagaggcagaggagcggaaggcagtgggtgtgaccaaaagtgccatttgttaaagactgttggagcagaactactgagaaaaaccaggcattgtatcttcagttgtcatcaagttcgcaatcagattggaaaagctcaacttgaagctttcttgcctgcagtgaagcagagagatagatattattcacgtaataaaaaacatgggcttcaacctgactttccacctttcctacaaattccgattactgttgctgttgactttgtg

SEQ ID NO: 33719 - DNA, 884 bp, Homo sapiens
  source 1..884: mol_type = unassigned DNA
agtgctagctcgccgcggccgcctccggggaccacctggcttcatgtgtggatttccacggctcttgcccagaggcgggtacactgtgttccaatgtgccacggaactcacgcagtggcactttgtggcttcatgaaggaagaggcaggccacgcaacacttcctccccaagccaaggagaagtatcacttttagaggcagaggagcggaaggcagtgggtgtgaccaaaagtgccatttgttaaagcttatcttccttgccagattttaaaaactattatggaaaatctcaagcattcacaaaagtagagagaaagaaaggactctcagactgttggagcagaactactgagaaaaaccaggcattgtatcttcagttgtcatcaagttcgcaatcagattggaaaagctcaacttgaagctttcttgcctgcagtgaagcagagagatagatattattcacgtaataaaaaacatgggcttcaacctgactttccacctttcctacaaattccgattactgttgctgttgactttgtgcctgacagtggttgggtgggccaccagtaactacttcgtgggtgccattcaagagattcctaaagcaaaggagttcatggctaatttccataagaccctcattttggggaagggaaaaactctgactaatgaagcatccacgaagaaggtagaacttgacaactgcccttctgtgtctccttacctcagaggccagagcaagctcattttcaaaccagatctcactttggaagaggtacaggcagaaaatcccaaagtgtccagaggccggtatcgccctcaggaatgtaaagctttacagagggtcgccatcctcgttccccaccggaacagagagaaacacc

SEQ ID NO: 33720 - DNA, 615 bp, Homo sapiens
  source 1..615: mol_type = unassigned DNA
agtgctagctcgccgcggccgcctccggggtgagtacgctggctccgccggcgcccgggaaatgcagttccctggacacgggcgccgtgcgagggtagccgggcgacggccgggactgttggagcagaactactgagaaaaaccaggcattgtatcttcagttgtcatcaagttcgcaatcagattggaaaagctcaacttgaagctttcttgcctgcagtgaagcagagagatagatattattcacgtaataaaaaacatgggcttcaacctgactttccacctttcctacaaattccgattactgttgctgttgactttgtgcctgacagtggttgggtgggccaccagtaactacttcgtgggtgccattcaagagattcctaaagcaaaggagttcatggctaatttccataagaccctcattttggggaagggaaaaactctgactaatgaagcatccacgaagaaggtagaacttgacaactgcccttctgtgtctccttacctcagaggccagagcaagctcattttcaaaccagatctcactttggaagaggtacaggcagaaaatcccaaagtgtccagaggccggtatcgccctcaggaatgtaa

SEQ ID NO: 33721 - DNA, 2494 bp, Homo sapiens
  source 1..2494: mol_type = unassigned DNA
accggctcaggtgctggcgttccgcgcggcgccgcctctgctgcgggccgggggagccagacgaggtgctgccgggtaggaaaaaatccagggctcattcataccccaggtcacgattccggggtcgcccccagcacttctccgccgggtgcatcaacctgaaaaagccccttcttcctggaaaccctccttctccagcgtttcaacggggaaactgatcagctgacaccagccccagtcctgcgaggggccggcgacctttgacctttctccaaaggggaccacctggcttcatgtgtggatttccacggctcttgcccagaggcgggtacactgtgttccaatgtgccacggaactcacgcagtggcactttgtggcttcatgaaggaagaggcaggccacgcaacacttcctccccaagccaaggagaagtatcacttttagaggcagaggagcggaaggcagtgggtgtgaccaaaagtgccatttgttaaagactgttggagcagaactactgagaaaaaccaggcattgtatcttcagttgtcatcaagttcgcaatcagattggaaaagctcaacttgaagctttcttgcctgcagtgaagcagagagatagatattattcacgtaataaaaaacatgggcttcaacctgactttccacctttcctacaaattccgattactgttgctgttgactttgtgcctgacagtggttgggtgggccaccagtaactacttcgtgggtgccattcaagagattcctaaagcaaaggagttcatggctaatttccataagaccctcattttggggaagggaaaaactctgactaatgaagcatccacgaagaaggtagaacttgacaactgcccttctgtgtctccttacctcagaggccagagcaagctcattttcaaaccagatctcactttggaagaggtacaggcagaaaatcccaaagtgtccagaggccggtatcgccctcaggaatgtaaagctttacagagggtcgccatcctcgttccccaccggaacagagagaaacacctgatgtacctgctggaacatctgcatcccttcctgcagaggcagcagctggattatggcatctacgtcatccaccaggctgaaggtaaaaagtttaatcgagccaaactcttgaatgtgggctatctagaagccctcaaggaagaaaattgggactgctttatattccacgatgtggacctggtacccgagaatgactttaacctttacaagtgtgaggagcatcccaagcatctggtggttggcaggaacagcactgggtacaggttacgttacagtggatattttgggggtgttactgccctaagcagagagcagtttttcaaggtgaatggattctctaacaactactggggatggggaggcgaagacgatgacctcagactcagggttgagctccaaagaatgaaaatttcccggcccctgcctgaagtgggtaaatatacaatggtcttccacactagagacaaaggcaatgaggtgaacgcagaacggatgaagctcttacaccaagtgtcacgagtctggagaacagatgggttgagtagttgttcttataaattagtatctgtggaacacaatcctttatatatcaacatcacagtggatttctggtttggtgcatgaccctgggtcttttggtgatgtttggaagaactgattctttgtttgcaataattttggcctagagacttcaaatagtagcacacattaagaacctgttacagctcattgttgagctgaatttttcctttttgtattttcttagcagagctcctggtgatgtagagtataaaacagttgtaacaagacagctttcttagtcattttgatcatgagggttaaatattgtaatatggatacttgaaggactttatataaaaggatgactcaaaggataaaatgaacgctatttgaggactctggttgaaggagatttatttaaatttgaagtaatatattatgggataaaaggccacaggaaataagactgctgaatgtctgagagaaccagagttgttctcgtccaaggtagaaaggtacgaagatacaatactgttattcatttatcctgtacaatcatctgtgaagtggtggtgtcaggtgagaaggcgtccacaaaagaggggagaaaaggcgacgaatcaggacacagtgaacttgggaatgaagaggtagcaggagggtggagtgtcggctgcaaaggcagcagtagctgagctggttgcagctgctgatagccttcaggggaggacctgcccaggtatgccttccagtgatgcccaccagagaatacattctctattagtttttaaagagtttttgtaaaatgattttgtacaagtaggatatgaattagcagtttacaagtttacatattaactaataataaatatgtctatcaaatacctctgtagtaaaatgtgaaaaagctttgagtgtt

SEQ ID NO: 33722 - DNA, 588 bp, Homo sapiens
  source 1..588: mol_type = unassigned DNA
acggaggccgagcctggcgggaggcaccggctcaggtgctggcgttccgcgcggcgccgcctctgctgcgggccgggggagccagacgaggtgctgccgggaccacctggcttcatgtgtggatttccacggctcttgcccagaggcgggtacactgtgttccaatgtgccacggaactcacgcagtggcactttgtggcttcatgaaggaagaggcaggccacgcaacacttcctccccaagccaaggagaagtatcacttttagaggcagaggagcggaaggcagtgggtgtgaccaaaagtgccatttgttaaagactgttggagcagaactactgagaaaaaccaggcattgtatcttcagttgtcatcaagttcgcaatcagattggaaaagctcaacttgaagctttcttgcctgcagtgaagcagagagatagatattattcacgtaataaaaaacatgggcttcaacctgactttccacctttcctacaaattccgattactgttgctgttgactttgtgcctgacagtggttgggtgggccaccagtaactacttcgtgggtgccattcaagagattcc

SEQ ID NO: 33723 - DNA, 4722 bp, Homo sapiens
  source 1..4722: mol_type = unassigned DNA
atgtggcccggcccgcgacggccggcggctgggagcggcgaggcggcggcggcggcgagtggcggcccgcgaggcccgggaggcggtggccgaggcccaggcggtggcggcggcggcccaggaggcggcggacggggagctgcgggagcaggcccggcctggctctctagcggccgcctggctgcagcatgcgcgcccgccgggggctgctgcggctgccgcgccgctcgctgctcgccgcgctcttcttcttttctctctcgtcctcgctgctgtacttcgtctatgtggcgcccggcatagtgaacacctacctcttcatgatgcaagcccaaggcattctgatccgggacaacgtgagaacaatcggtgctcaggtttatgagcaggtgcttcggagtgcttatgccaagaggaacagcagtgtaaatgactcagattatcctcttgacttgaaccacagtgaaaccttcctgcaaactacaacatttcttcctgaagacttcacctactttgcaaaccatacctgccctgaaagactcccttccatgaagggcccaatagacataaacatgagtgaaattggaatggattacattcatgaactcttctccaaagacccaaccatcaagctcggaggtcactggaagccttctgattgcatgcctcggtggaaggtggcgatccttatccccttccggaaccgccacgagcacctcccagtcctgttcagacacctgcttcccatgctccagcgccagcgcttgcagtttgcattttatgtggttgaacaagttggtacccaaccctttaatcgagccatgcttttcaacgttggctttcaagaggcaatgaaagacttggattgggactgtttgatttttcatgatgtagatcacataccggaaagtgatcgcaactattatggatgtggacagatgccgaggcattttgcaaccaaattggataagtatatgtatctgcttccttataccgagttctttggcggagtgagtggcttaacagtggaacaatttcggaaaatcaatggctttcctaatgctttctggggttggggtggagaagatgacgacctctggaacagagtacagaatgcaggctattctgtgagccggccagagggtgacacaggaaagtacaagtccattcctcatcaccatcgaggagaagtccagtttcttggaaggtatgctctgctgaggaagtcaaaagaacggcaagggctggatggcctcaacaacctgaactactttgcaaacatcacatacgacgccttgtataaaaacataactgtcaacctgacacccgagctggctcaggtgaacgagtactgagaggagagaatgtacgtttgctttacccaccgccaccaagaaagcagtccgatgagatttttttttggaggggggagggtctacacagcaagagaacagaaatactgtgtctcatgaaggatcacagagttcagggggaaaatgtgacagcacacgcacaaacgccttcactggatcagccgctggaactgagggagtgagcttggggacttccttcgtcagcactggctttctgttttcacaagacagacgtctgtcccgctgctctctccccatctcctaccccacatcctgtcttagccgcagtctccagaacccatgatgaactgtgatctgccgtggtcctgccgtggtcctgccgtggagcctgtccctacacatgaccttggagcctcttggccttcagagcagaggcaaacccaccacagggcagctgcgttttaggaagagcaaatgaaactccacaccattcttctagatctctggtgttctctttggtttcatttttttaaaaaattaccttctttgggtggggattgagggtggaggggagggtgtttgggaaagataaatagacataaatatataacaatcacttcttgaagaagtataattgtaaataagccatgtaaaatgcctttttaaaatttaattttctagctggctccaattcaaattgaggatttatgtattaggccacttacttggttggcaagtgcaggaactcagttaaaatgcagttgaagaatgtcatctcccgaattgctgtcactttggcgagggagtggatatagggcatgtcacaaaagaacaaaataacccgacctttattgctgggagctggcttctgtccctttcttcccccccccacgagtcttgcccttgacttctgctctggattcactcttccctgtcggccgcgcatgtgctcatcccactctccgctaagcgggaggctgctgttagagcaggctgcttcctgcctaaagcaggcccttcggggctcgctgcacacacatctctggctctccaggcttcgtgttctgtcttttcatcagcatggcggggcggggggcggggggcgggggtgtgtatgggaatccctccccctcttactttttctcttgtggaacttggccacagtttctgaacaatgtgcctacattaccagctggcttcagtgattcctctgtgtccctttttggtttctggaaagattctttgtcaacattagtaactgatacatagaaccaaggagcactcaaatagggagccaggagccagggagctggtgacacttgtgtgctgtggggcagctgggatccaggtaagaccggattgaagctttgaaattagactaacaaagctccagacagcaagagcccaggtgcactgctcacacccccacctgcattttgaagtcatattattttttgttttgttttttaagacggtctggctctgtcgcctaagctggagtgtggtggcacgatcacagctcactgcagcctccatctcctaggctcaagccattttcccacctcagcctcccgagtagctgggactacaggtgcacaccaccacacctggctaattttttgtatttttagtagagacaggggtttcttccatgttgcccaggctggtctcgaactcctggactcaagcaatccgcccaccttgacttcccaaagtgctgggattatgggcgggtgtgagccattgcgcccagccttgaagtcatgttctaaattgtatttgaatttgtgcctctttgtttttccccaaaccaaagccctcaaattgtagtctctgtcggcttctgcagaattctggaaaatgccagttttcctcccccgcccttgttttccataaaacatatttatatattgtgatgaggagtactttctgaagagtacttcgtatttttttttaattgccttgtttgccttcaacttccttgattttcatagtttacatgggtgtgtgtaggggtgtgtgtgtgtatgtgtgtgggttagggcttttttcgttgcatgtgatggttctgtggacatatgatccccacaaactgtgggagtgattggccaggccttgttttgtttgtttgtttgtttgtgtttttgttcttttgaagaatagagtggtatttagaaaataaattgcattgcaaagctcttatcggctcatatgagagagcaggttcctgcccttgaaaatgccggtaagctatagcatatgttttttaagacttaagcatttcatgctttaaaataccttcacaagtgaacattacacacagaagttcatttggttttcctttgttttatggtgcatatagcaataaagacccccctccaccctgcaacccccatcccccaccgggcctttgtccctgccttggcttttctccccttctcattctcctctcccctttcctcactgaaggctgtgagttgctttcaatgtgacaacactatgatgtcatttggaaggatttgccaggacagactgattctgagtcctgggtgccgtatgtgtatgcggcagtgttgtcaggcgatcttgtttgaagctctatgttgccataattaccatcaagtacacactgttggcaaaaggctaacacctgactttagaaaatgctgatttgagaacaaaaggaaaggtcttttttcactgcttaaagtggggtcactttgatacctttgcggtcatgtctgtgtctgatgagtgtagaatctctggatgtgcactgtcagtcatgtgtccaccaggcctcgaatatcatatgggaaatgtcatagttaaaaacgtacagccaggcccgtgtgctgttaatagtgtgaaattgtcatgttaaaaaaaaaaacaggaaccaaatgtgaccttgtgcatatattggtagctgaaaatcttcaaggctactgatgggtggccccttaatcttgtctttgattgctgtgtgcagggaaaggtgtccccgtttgttcatgctgttttggggggtgggggggtatttgcaagaatactcattttgacataataggtcctcttgtcagagatcctctaccacagacattaatagctgagcaggagccacatggattgattgtatccactcaccattgacgatggcattgagcgtagctagcttatttccatcactacgtgtttttgagcttgctcttacgttttaagaggtgccaggggtacatttttgcactgaaatctaaagatgttttaaaaaacacttttcacaaaaatagtcctttgtcattacattatttactcatgtgtttgtacatttttgtatgttaatttatgaatgattttttcagtaaaaaatacatattcaagaaccaaa

SEQ ID NO: 33724 - DNA, 2120 bp, Homo sapiens
  source 1..2120: mol_type = unassigned DNA
ctcgggccctctccccagagcctccccgcgcggaccccgctgcagtctcggggttctcagcacatttatggaagtttagggcctggacagtggccccgagtccggcctgagagcgcagcctgggctgctggcagggaagaggaagatgtctgtgctcaggcggatgatgcgggtttccaatcgctctctcctcgccttcatcttcttcttctccctctcttcgtcctgtctgtacttcatctatgtggccccaggcatcgattatcccgaaggcaataattcaagtgattatcttgttcaaacaacaacgtatctcccggaaaacttcacatactcaccatacctcccctgtccagaaaagctgccttatatgcgaggattcctcaatgtcaatgtaagcgaagtcagttttgatgaaattcatcaactcttctccaaggatttagatattgagccagggggtcattggaggccaaaagactgtaaacccagatggaaggtggcagttctcattcctttccgtaatcgccatgaacatcttccaatttttttcttacatctgattccaatgctccagaagcagcggctggaatttgcgttttatgtcattgaacagactggcacacaaccttttaaccgtgcgatgcttttcaatgtgggcttcaaagaggccatgaaagacagtgtctgggactgtgtaatcttccacgatgtggatcatctacctgaaaatgaccggaactattacggatgtggagaaatgccacgtcattttgctgcaaagctggataaatacatgtatattcttccatataaagaattttttggtggtgtaagtgggctgacagtggaacaatttagaaagatcaatggttttcctaatgccttctggggatggggaggagaagatgatgacctttggaacagagttcactatgctggatataatgtaaccagaccagagggagacttaggaaaatacaagtcaattcctcatcaccatagaggtgaagtccagtttttaggacggtataaattactaaggtattccaaggagcgtcagtacatcgatggactgaacaatttaatatataggccaaaaatactggttgataggttgtatacaaacatatctgtaaacctcatgccagagttagctccaatcgaagactattaaaagaagtggctgtcgtggcaaggtagaccacaatgctggatcataaacttggagcgcgctcttagtggaggtcagtgattggctgtgtcacagtgcccttttctctgagaagagccagcagtccacagtgtttacagagtgggactatatacagtcacccttctctcacccgtcctccctgctctgagacacacccctgtggcgagcaccgcagaaacgggaagccactacttaagatcggaagttaagagagctccctccgaagagaaaatttttatactaaaatctataatttaattcaagagaatgcttttatttccgtttaaacatattttgtatatatgtgatataaattaatgtgtgcaaattgtttaaaaattagatgtgttgcagttttgcatgtaatcggttatacctttattggacttttatagacattttttatttgcatgaaaaaaactcactaaatttacatcactaaacaaaggttaacccttgtgtgaaatgaaggaactgtcaataattgacagccaactaatacagtaaactgttatactagttttgagctttagacctcagccttttgtgtggaagaagtcacagctttcttaggctttaaaggaaaagaaggaaggacttaaatagcttttcttcctaccgggattacctatgtttttccttgcttgcaatctcatctgattttgctagaaatcacaaccatattgtttatgcatattgcatgagtattaccaagaaaaatcttaaaagttgtgatgtgacatgatataaaggatctctttatgttaaatgtctttccatgtacctctggtgtgtcagggattttgtgcctcaaaaaatgtttccaaggttgtgtgtttatactgtgtattttttttaaattcacggtgaacagcacttttattatttccagttcagaagagcc

SEQ ID NO: 33725 - DNA, 4814 bp, Homo sapiens
  source 1..4814: mol_type = unassigned DNA
ccggctttcttccgtcctgccgtccccgggcccctagcccccagtcccctctcccccctccacctcttgtccctcggcctccgcgcctcccctcccccgactctctggcctcccattcattccgtccgctccctcccatttcctcttttccgctcgggccctctccccagagcctccccgcgcggaccccgctgcagtctcggggttctcagcacatttatggaagtttagggcctggacagtggccccgagtccggcctgagagcgcagcctgggctgctggcagggaagaggaagatgtctgtgctcaggcggatgatgcgggtttccaatcgctctctcctcgccttcatcttcttcttctccctctcttcgtcctgtctgtacttcatctatgtggccccaggcatcgccaacacatatctctttatggtacaagctcgaggtataatgttgagagaaaatgtgaaaacaataggtcatatgatcaggctgtacacaaataaaaacagtacgctcaacggtacagattatcccgaaggcaataattcaagtgattatcttgttcaaacaacaacgtatctcccggaaaacttcacatactcaccatacctcccctgtccagaaaagctgccttatatgcgaggattcctcaatgtcaatgtaagcgaagtcagttttgatgaaattcatcaactcttctccaaggatttagatattgagccagggggtcattggaggccaaaagactgtaaacccagatggaaggtggcagttctcattcctttccgtaatcgccatgaacatcttccaatttttttcttacatctgattccaatgctccagaagcagcggctggaatttgcgttttatgtcattgaacagactggcacacaaccttttaaccgtgcgatgcttttcaatgtgggcttcaaagaggccatgaaagacagtgtctgggactgtgtaatcttccacgatgtggatcatctacctgaaaatgaccggaactattacggatgtggagaaatgccacgtcattttgctgcaaagctggataaatacatgtatattcttccatataaagaattttttggtggtgtaagtgggctgacagtggaacaatttagaaagatcaatggttttcctaatgccttctggggatggggaggagaagatgatgacctttggaacagagttcactatgctggatataatgtaaccagaccagagggagacttaggaaaatacaagtcaattcctcatcaccatagaggtgaagtccagtttttaggacggtataaattactaaggtattccaaggagcgtcagtacatcgatggactgaacaatttaatatataggccaaaaatactggttgataggttgtatacaaacatatctgtaaacctcatgccagagttagctccaatcgaagactattaaaagaagtggctgtcgtggcaaggtagaccacaatgctggatcataaacttggagcgcgctcttagtggaggtcagtgattggctgtgtcacagtgcccttttctctgagaagagccagcagtccacagtgtttacagagtgggactatatacagtcacccttctctcacccgtcctccctgctctgagacacacccctgtggcgagcaccgcagaaacgggaagccactacttaagatcggaagttaagagagctccctccgaagagaaaatttttatactaaaatctataatttaattcaagagaatgcttttatttccgtttaaacatattttgtatatatgtgatataaattaatgtgtgcaaattgtttaaaaattagatgtgttgcagttttgcatgtaatcggttatacctttattggacttttatagacattttttatttgcatgaaaaaaactcactaaatttacatcactaaacaaaggttaacccttgtgtgaaatgaaggaactgtcaataattgacagccaactaatacagtaaactgttatactagttttgagctttagacctcagccttttgtgtggaagaagtcacagctttcttaggctttaaaggaaaagaaggaaggacttaaatagcttttcttcctaccgggattacctatgtttttccttgcttgcaatctcatctgattttgctagaaatcacaaccatattgtttatgcatattgcatgagtattaccaagaaaaatcttaaaagttgtgatgtgacatgatataaaggatctctttatgttaaatgtctttccatgtacctctggtgtgtcagggattttgtgcctcaaaaaatgtttccaaggttgtgtgtttatactgtgtattttttttaaattcacggtgaacagcacttttattatttccagttcagaagagccaaaaaaaagtatcttcatttaaaaagaaatcaagtcagtttttttaaaagaatgatctatggaagaaaacccaatagtacttataatatacaaatgaattatactattagataagaattaaatattctatttttataaagataaatacttagtagataaaaacaaattttaagtttagttttcagacatagaatttcacttttggaggggacccttgaatgttagtttcattcaaactatattttgtttttttcacttttaagagattatatctctggtgttaattactaaaattttctttctaaaagtataatttaatagaattatcttaaaatacatgatcagtattcagtgcgctgatattataatgtcttctatatgtagtatctaaaagcataatttaatagcattgtcttaaaatacgtgatgagttatttggtgcactgatgccataatgtcttctatatgtaatatcttacatgtttgcatgagtgtcagggctttgtccagttatcttcatatgactgttctctgaaaaaaggtcttactacctgatatcaagtacatatcttaattttggatgaatttttccacagtaaagccgaacagtattcttttttgaaaattagcaattataaagattgtttaaaatatcttgatattttcacaaattttaaacaaaaaattaaatatctataaagtgaatgttcaacaacaatgatgagcaatagaaatctatatatgagaaacgtttggataatatttgcctcaaggattgtttacctaaaacagaactatggttatttatctcagattgtaagttttattttgaagtgtcatttttatggcaatattgataacacaaatgaccacaaactaaatcataaaataattgaatccttacactttgagaaaatggatagcttctgtgttatgataccaaacaaaatattttcatatttatttcttagaactatttccaaaatatttatatttcagtttttttatggtactcgaaaaatcaaaccttctgaaaattatgatatttgtacttcatttgtgtattagttcattttctgtttctattacatagtttttaaagtcaatgaaagagattgagaatgttaacatttgttgatcaatgtggagctgtccacattcggtatcttttcatttttatatatattttacagtttcaagaaaacttagtactactagtatctgccttattttcttaagtctgatgttaatttttgtttcaggagtgagatataaacattttgctttttttcagttttgaaatatagtttgtcatcctgtgaaaaccacctcgtttgctttttgtttgtttgttttgcttttttagtgtagacctaaaattatttttgcctataaacagtgaacttaatatgtttctgtgagagtgacagagctgtgcccgtttatcttcattgtattaattattacataaagattaacaaatacattgcaaatgcaaattataggatgtttggaggatttattaatgagcatgtattgattgcctattccatatccagtgcaatgctaggtatgtctatggaaggagtattattacttcatttctaaacaaatgaagtcaagcaaattgagatctttctgaaattatgaagacatcttctgataacttatctgttgtatttcctagtctcaaagtcaagaaacccgtatatgtggacctagggctaataggaggtccctatggcactaactgggaaaattacatggtgcttttcaactacagaaagaagtaatgactaatgggcctgtctgtagagaagaaaaggagaagagtacacatttgctggaactatatataattcacagtggagatagttaattctttgctaaaactagggttttatgagtattttttaaatctacatttaagtttttgtttttgtgaaaagttattcagtaagaaaactttataatattaagtagatacagttatgtattaaaaatttccttatatacccttttgccagccaagatactgatattttaaaacaaaatggaaaaatgtccaatacaatattctctttctggaggcttcctacaagtgaaagcagattttgtcattttatttggcctttgcttgtctttgatatatttctttatgtgtttttcaaatacatactgttgtagatttattgtcttgtatttgcaagtatgccggttgagagaactaaaatggttatagtattgtttatcagaaagaggaagtgtacttaagattattttatttatttagatgaaaggcttctacataaatgcactgaaataaatgctagtaatttcttgtatcccacttctttttttgcttctcatggaaatgtttgtacttttttatcattgtcttttatgaaatataatgttctaaaga

SEQ ID NO: 33726 - DNA, 1239 bp, Homo sapiens
  source 1..1239: mol_type = unassigned DNA
atggaagtttagggcctggacagtggccccgagtccggcctgagagcgcagcctgggctgctggcagggaagaggaagatgtctgtgctcaggcggatgatgcgggtttccaatcgctctctcctcgccttcatcttcttcttctccctctcttcgtcctgtctgtacttcatctatgtggccccaggcatcgccaacacatatctctttatggtacaagctcgaggtataatgttgagagaaaatgtgaaaacaataggtcatatgatcaggctgtacacaaataaaaacagtacgctcaacggtacagattatcccgaaggcaataattcaagtgattatcttgttcaaacaacaacgtatctcccggaaaacttcacatactcaccatacctcccctgtccagaaaagctgccttatatgcgaggattcctcaatgtcaatgtaagcgaagtcagttttgatgaaattcatcaactcttctccaaggatttagatattgagccagggggtcattggaggccaaaagactgtaaacccagatggaagactggcacacaaccttttaaccgtgcgatgcttttcaatgtgggcttcaaagaggccatgaaagacagtgtctgggactgtgtaatcttccacgatgtggatcatctacctgaaaatgaccggaactattacggatgtggagaaatgccacgtcattttgctgcaaagctggataaatacatgtatattcttccatataaagaattttttggtggtgtaagtgggctgacagtggaacaatttagaaagatcaatggttttcctaatgccttctggggatggggaggagaagatgatgacctttggaacagagttcactatgctggatataatgtaaccagaccagagggagacttaggaaaatacaagtcaattcctcatcaccatagaggtgaagtccagtttttaggacggtataaattactaaggtattccaaggagcgtcagtacatcgatggactgaacaatttaatatataggccaaaaatactggttgataggttgtatacaaacatatctgtaaacctcatgccagagttagctccaatcgaagactattaaaagaagtggctgtcgtggcaaggtagaccacaatgctggatcataaacttggagcgcgctcttagtggaggtcagtgattggctgtgtcacagtgcccttttctctgagaagagccagcagtccacagt

SEQ ID NO: 33727 - DNA, 1488 bp, Homo sapiens
  source 1..1488: mol_type = unassigned DNA
gcgacggctgagcaaggactctccagtcctcagtcaccttggacaaagaagtgtggatcctcagattccatcttttccaactccaaggtgccatggcagagaaggtgctggtaacaggtggggctggctacattggcagccacacggtgctggagctgctggaggctggctacttgcctgtggtcatcgataacttccataatgccttccgtggagggggctccctgcctgagagcctgcggcgggtccaggagctgacaggccgctctgtggagtttgaggagatggacattttggaccagggagccctacagcgtctcttcaaaaagtacagctttatggcggtcatccactttgcggggctcaaggccgtgggcgagtcggtgcagaagcctctggattattacagagttaacctgaccgggaccatccagcttctggagatcatgaaggcccacggggtgaagaacctggtgttcagcagctcagccactgtgtacgggaacccccagtacctgccccttgatgaggcccaccccacgggtggttgtaccaacccttacggcaagtccaagttcttcatcgaggaaatgatccgggacctgtgccaggcagacaagacttggaacgcagtgctgctgcgctatttcaaccccacaggtgcccatgcctctggctgcattggtgaggatccccagggcatacccaacaacctcatgccttatgtctcccaggtggcgatcgggcgacgggaggccctgaatgtctttggcaatgactatgacacagaggatggcacaggtgtccgggattacatccatgtcgtggatctggccaagggccacattgcagccttaaggaagctgaaagaacagtgtggctgccggatctacaacctgggcacgggcacaggctattcagtgctgcagatggtccaggctatggagaaggcctctgggaagaagatcccgtacaaggtggtggcacggcgggaaggtgatgtggcagcctgttacgccaaccccagcctggcccaagaggagctggggtggacagcagccttagggctggacaggatgtgtgaggatctctggcgctggcagaagcagaatccttcaggctttggcacgcaagcctgaggaccctcccctaccaaggaccaggaaaagcagcagctgcctgctctccagcctctggcaggaactcagggccctggagctgctggggccaagccaaggcctcccctacctcaaaccccagctgggcccgcttagcccaccaggcatgaggccaagggctccactgaccaggaggccgaggtctctaactcttatcttccacagggtccaagagttcatcaggacccccaagagtgagtgagggggcaaggctctggcacaaaacctcctcctcccaggcactcatttatattgctctgaaagagctttccaaagtatttaaaaataaaaacaagttttcttacactgg

SEQ ID NO: 33728 - DNA, 1412 bp, Homo sapiens
  source 1..1412: mol_type = unassigned DNA
cgcgggaacccgagcaggactctccagtcctcagtcaccttggacaaagaagtgtggatcctcagattccatcttttccaactccaaggtgccatggcagagaaggtgctggtaacaggtggggctggctacattggcagccacacggtgctggagctgctggaggctggctacttgcctgtggtcatcgataacttccataatgccttccgtggagggggctccctgcctgagagcctgcggcgggtccaggagctgacaggccgctctgtggagtttgaggagatggacattttggaccagggagccctacagcgtctcttcaaaaagtacagctttatggcggtcatccactttgcggggctcaaggccgtgggcgagtcggtgcagaagcctctggattattacagagttaacctgaccgggaccatccagcttctggagatcatgaaggcccacggggtgaagaacctggtgttcagcagctcagccactgtgtacgggaacccccagtacctgccccttgatgaggcccaccccacgggtggttgtaccaacccttacggcaagtccaagttcttcatcgaggaaatgatccgggacctgtgccaggcagacaagacttggaacgcagtgctgctgcgctatttcaaccccacaggtgcccatgcctctggctgcattggtgaggatccccagggcatacccaacaacctcatgccttatgtctcccaggtggcgatcgggcgacgggaggccctgaatgtctttggcaatgactatgacacagaggatggcacaggtgtccgggattacatccatgtcgtggatctggccaagggccacattgcagccttaaggaagctgaaagaacagtgtggctgccggatcccgtacaaggtggtggcacggcgggaaggtgatgtggcagcctgttacgccaaccccagcctggcccaagaggagctggggtggacagcagccttagggctggacaggatgtgtgaggatctctggcgctggcagaagcagaatccttcaggctttggcacgcaagcctgaggaccctcccctaccaaggaccaggaaaagcagcagctgcctgctctccagcctctggcaggaactcagggccctggagctgctggggccaagccaaggcctcccctacctcaaaccccagctgggcccgcttagcccaccaggcatgaggccaagggctccactgaccaggaggccgaggtctctaactcttatcttccacagggtccaagagttcatcaggacccccaagagtgagtgagggggcaaggctctggcacaaaacctcctcctcccaggcactcatttatattgctctgaaagagctttccaaagtatttaaaaataaaaacaagttttcttacactggg

SEQ ID NO: 33729 - DNA, 882 bp, Homo sapiens
  source 1..882: mol_type = unassigned DNA
ggctcgggcgtaggaggcggtgcctctgcagcaagcgtggggcgcgggaacccgagcaggactctccagtcctcagtcaccttggacaaagaagtgtggatcctcagattccatcttttccaactccaaggagggggctccctgcctgagagcctgcggcgggtccaggagctgacaggccgctctgtggagtttgaggagatggacattttggaccagggagccctacagcgtctcttcaaaaagtacagctttatggcggtcatccactttgcggggctcaaggccgtgggcgagtcggtgcagaagcctctggattattacagagttaacctgaccgggaccatccagcttctggagatcatgaaggcccacggggtgaagaacctggtgttcagcagctcagccactgtgtacgggaacccccagtacctgccccttgatgaggcccaccccacgggtggttgtaccaacccttacggcaagtccaagttcttcatcgaggaaatgatccgggacctgtgccaggcagacaagacttggaacgcagtgctgctgcgctatttcaaccccacaggtgcccatgcctctggctgcattggtgaggatccccagggcatacccaacaacctcatgccttatgtctcccaggtggcgatcgggcgacgggaggccctgaatgtctttggcaatgactatgacacagaggatggcacaggtgtccgggattacatccatgtcgtggatctggccaagggccacattgcagccttaaggaagctgaaagaacagtgtggctgccggatctacaacctgggcacgggcacaggctattcagtgctgcagatggtccaggctatggagaaggcctctgggaagaag

SEQ ID NO: 33730 - DNA, 876 bp, Homo sapiens
  source 1..876: mol_type = unassigned DNA
actcctagctcggccccgctccgcgctacagcccaaagcccagcctgagacccagccgccctcgtatgcccacggcctagctccccttccctccaacagacagactgggaaaaccgagtgggcgacggctgagcaaggtcactccgctgtcgggggcgcagccggcctcagaccagctttcgtgcttcccagggcctctctgcgaccactttcggggactctccagtcctcagtcaccttggacaaagaagtgtggatcctcagattccatcttttccaactccaaggtgccatggcagagaaggtgctggtaacaggtggggctggctacattggcagccacacggtgctggagctgctggaggctggctacttgcctgtggtcatcgataacttccataatgccttccgtggagggggctccctgcctgagagcctgcggcgggtccaggagctgacaggccgctctgtggagtttgaggagatggacattttggaccagggagccctacagcgtctcttcaaaaagtacagctttatggcggtcatccactttgcggggctcaaggccgtgggcgagtcggtgcagaagcctctggattattacagagttaacctgaccgggaccatccagcttctggagatcatgaaggcccacggggtgaagaacctggtgttcagcagctcagccactgtgtacgggaacccccagtacctgccccttgatgaggcccaccccacgggtggttgtaccaacccttacggcaagtccaagttcttcatcgaggaaatgatccgggacctgtgccaggcagacaagacttggaacgcagtgctgctgcgctatttcaaccccacaggtgcccatgcctctgg

SEQ ID NO: 33731 - DNA, 957 bp, Homo sapiens
  source 1..957: mol_type = unassigned DNA
gaaggcggaggcattggacaagcctgggtctgagcagacagaaccccttcctgcgaccctggagtcccaatcgtgctgccattttccttctgcccaggactctccagtcctcagtcaccttggacaaagaagtgtggatcctcagattccatcttttccaactccaaggagggggctccctgcctgagagcctgcggcgggtccaggagctgacaggccgctctgtggagtttgaggagatggacattttggaccagggagccctacagcgtctcttcaaaaagtacagctttatggcggtcatccactttgcggggctcaaggccgtgggcgagtcggtgcagaagcctctggattattacagagttaacctgaccgggaccatccagcttctggagatcatgaaggcccacggggtgaagaacctggtgttcagcagctcagccactgtgtacgggaacccccagtacctgccccttgatgaggcccaccccacgggtggttgtaccaacccttacggcaagtccaagttcttcatcgaggaaatgatccgggacctgtgccaggcagacaagacttggaacgcagtgctgctgcgctatttcaaccccacaggtgcccatgcctctggctgcattggtgaggatccccagggcatacccaacaacctcatgccttatgtctcccaggtggcgatcgggcgacgggaggccctgaatgtctttggcaatgactatgacacagaggatggcacaggtgtccgggattacatccatgtcgtggatctggccaagggccacattgcagccttaaggaagctgaaagaacagtgtggctgccggatcccgtacaaggtggtggcacggcgggaaggtgatgtggcagcctgttacgccaaccccagcctggcccaagaggagctggggtggacagcagccttagggctggacaggatgt

SEQ ID NO: 33732 - DNA, 792 bp, Homo sapiens
  source 1..792: mol_type = unassigned DNA
attagtcactgcgcccaggagccagtttacacctagcgaaggcggaggcattggacaagcctgggtctgagcagacagaaccccttcctgcgaccctggagtcccaatcgtgctgccattttccttctgcccaggactctccagtcctcagtcaccttggacaaagaagtgtggatcctcagattccatcttttccaactccaaggtgccatggcagagaaggtgctggtaacaggtggggctggctacattggcagccacacggtgctggagctgctggaggctggctacttgcctgtggtcatcgataacttccataatgccttccgtggagggggctccctgcctgagagcctgcggcgggtccaggagctgacaggccgctctgtggagtttgaggagatggacattttggaccagggagccctacagcgtctcttcaaaaagtacagctttatggcggtcatccactttgcggggctcaaggccgtgggcgagtcggtgcagaagcctctggattattacagagttaacctgaccgggaccatccagcttctggagatcatgaaggcccacggggtgaagaacctggtgttcagcagctcagccactgtgtacgggaacccccagtacctgccccttgatgaggcccaccccacgggtggttgtaccaacccttacggcaagtccaagttcttcatcgaggaaatgatccgggacctgtgccaggcagacaagacttggaacgcagtgctgctgcgctatttcaaccccacaggtgcccatgcctct

SEQ ID NO: 33733 - DNA, 672 bp, Homo sapiens
  source 1..672: mol_type = unassigned DNA
gtggcgatcgggcgacgggaggccctgaatgtctttggcaatgactatgacacagaggatggcacaggtgtccgggattacatccatgtcgtggatctggccaagggccacattgcagccttaaggaagctgaaagaacagtgtggctgccggatcccgtacaaggtggtggcacggcgggaaggtgatgtggcagcctgttacgccaaccccagcctggcccaagaggagctggggtggacagcagccttagggctggacaggatgtgtgaggatctctggcgctggcagaagcagaatccttcaggctttggcacgcaagcctgaggaccctcccctaccaaggaccaggaaaagcagcagctgcctgctctccagcctctggcaggaactcagggccctggagctgctggggccaagccaaggcctcccctacctcaaaccccagctgggcccgcttagcccaccaggcatgaggccaagggctccactgaccaggaggccgaggtctctaactcttatcttccacagggtccaagagttcatcaggacccccaagagtgagtgagggggcaaggctctggcacaaaacctcctcctcccaggcactcatttatattgctctgaaagagctttccaaagtatttaaaaataaaaacaagttttcttaca

SEQ ID NO: 33734 - DNA, 2720 bp, Homo sapiens
  source 1..2720: mol_type = unassigned DNA
agaggggcgggagctctggctcaggtaaaaactctttcttcggctcgcgagctgagaggagcaggtagaggggcagaggcgggactgtcgtctgggggagccgcccaggaggctcctcaggccgaccccagaccctggctggccaggatgaagtatctccggcaccggcggcccaatgccaccctcattctggccatcggcgctttcaccctcctcctcttcagtctgctagtgtcaccacccacctgcaaggtccaggagcagccaccggcgatccccgaggccctggcctggcccactccacccacccgcccagccccggccccgtgccatgccaacacctctatggtcacccacccggacttcgccacgcagccgcagcacgttcagaacttcctcctgtacagacactgccgccactttcccctgctgcaggacgtgcccccctctaagtgcgcgcagccggtcttcctgctgctggtgatcaagtcctcccctagcaactatgtgcgccgcgagctgctgcggcgcacgtggggccgcgagcgcaaggtacggggtttgcagctgcgcctcctcttcctggtgggcacagcctccaacccgcacgaggcccgcaaggtcaaccggctgctggagctggaggcacagactcacggagacatcctgcagtgggacttccacgactccttcttcaacctcacgctcaagcaggtcctgttcttacagtggcaggagacaaggtgcgccaacgccagcttcgtgctcaacggggatgatgacgtctttgcacacacagacaacatggtcttctacctgcaggaccatgaccctggccgccacctcttcgtggggcaactgatccaaaacgtgggccccatccgggctttttggagcaagtactatgtgccagaggtggtgactcagaatgagcggtacccaccctattgtgggggtggtggcttcttgctgtcccgcttcacggccgctgccctgcgccgtgctgcccatgtcttggacatcttccccattgatgatgtcttcctgggtatgtgtctggagcttgagggactgaagcctgcctcccacagcggcatccgcacgtctggcgtgcgggctccatcgcaacgcctgtcctcctttgacccctgcttctaccgagacctgctgctggtgcaccgcttcctaccttatgagatgctgctcatgtgggatgcgctgaaccagcccaacctcacctgcggcaatcagacacagatctactgagtcagcatcagggtccccagcctctgggctcctgtttccataggaaggggcgacaccttcctcccaggaagctgagacctttgtggtctgagcataagggagtgccagggaaggtttgaggtttgatgagtgaatattctggctggcgaactcctacacatccttcaaaacccacctggtactgttccagcatcttccctggatggctggaggaactccagaaaatatccatcttctttttgtggctgctaatggcagaagtgcctgtgctagagttccaactgtggatgcatccgtcccgtttgagtcaaagtcttacttccctgctctcacctactcacagacgggatgctaagcagtgcacctgcagtggtttaatggcagataagctccgtctgcagttccaggccagccagaaactcctgtgtccacatagagctgacgtgagaaatatctttcagcccaggagagaggggtcctgatcttaaccctttcctgggtctcagacaactcagaaggttggggggataccagagaggtggtggaataggaccgccccctccttacttgtgggatcaaatgctgtaatggtggaggtgtgggcagaggagggaggcaagtgtcctttgaaagttgtgagagctcagagtttctggggtcctcattaggagcccccatccctgtgttccccaagaattcagagaacagcactggggctggaatgatctttaatgggcccaaggccaacaggcatatgcctcactactgcctggagaagggagagattcaggtcctccagcagcctccctcacccagtatgttttacagattacggggggaccgggtgagccagtgaccccctgtagcccccagcttcaggcctcagtgtctgccagtcaagcttcacaggcattgtgatggggcagccttggggaatataaaattttgtgaagacttggagatctttttttttttttaagcaaatttacaagtttcaacagacaagtccacattcatccctaaaagtctcattttccagtagaaaatatacactggtaaaaacggggcatggggccgtggctcagggctgtaattctagcacattgggagaccaaagtgggaggatcacttgagcccaggagttctggatcctgtctctgcacaaaataaaaaattactcaggcgtggtggtgctcacatgcctgtagtcccagctatacttgggaggctgaggcgagaggatcgcttgagcccaggagttggaggctgcagtgaaccatgattgcgccactgtactccactgggcggcaataagaagacaaaaacataaaacaggacatgtgtgaggcaaaagctgcaggaatttctatcaggcagatctgacctcatcccacccaccccctgctcagatacccttcatagctccttattgctttcagctcataaccccacat

SEQ ID NO: 33735 - DNA, 1642 bp, Homo sapiens
  source 1..1642: mol_type = unassigned DNA
agcagcctctgcccgacccggctcgtgcggaccccaggaccgggcgcgggacgcgtgcgtccagcctccggcgctgcggagacccgcggctgggtccggggaggccccaaacccgcccccgccagaaccccgccccaaattcccacctcctccagaagccccgcccactcccgagccccgagagctccgcgcacctgggcgccatccgccctggctccgctgcacgagctccacgcccgtaccccggcgtcacgctcagcccgcggtgctcgcacacctgagactcatctcgcttcgaccccgccgccgccgccgcccggcatcctgagcacggagacagtctccagctgccgttcatgcttcctccccagccttccgcagcccaccagggaaggggcggtaggagtggccttttaccaaagggaccggcgatgctctgcaggctgtgctggctggtctcgtacagcttggctgtgctgttgctcggctgcctgctcttcctgaggaaggcggccaagcccgcaggagaccccacggcccaccagcctttctgggctcccccaacaccccgtcacagccggtgtccacccaaccacacagtgtctagcgcctctctgtccctgcctagccgtcaccgtctcttcttgacctatcgtcactgccgaaatttctctatcttgctggagccttcaggctgttccaaggataccttcttgctcctggccatcaagtcacagcctggtcacgtggagcgacgtgcggctatccgcagcacgtggggcagggtggggggatgggctaggggccggcagctgaagctggtgttcctcctaggggtggcaggatccgctcccccagcccagctgctggcctatgagagtagggagtttgatgacatcctccagtgggacttcactgaggacttcttcaacctgacgctcaaggagctgcacctgcagcgctgggtggtggctgcctgcccccaggcccatttcatgctaaagggagatgacgatgtctttgtccacgtccccaacgtgttagagttcctggatggctgggacccagcccaggacctcctggtgggagatgtcatccgccaagccctgcccaacaggaacactaaggtcaaatacttcatcccaccctcaatgtacagggccacccactacccaccctatgctggtgggggaggatatgtcatgtccagagccacagtgcggcgcctccaggctatcatggaagatgctgaactcttccccattgatgatgtctttgtgggtatgtgcctgaggcggctggggctgagccctatgcaccatgctggcttcaagacatttggaatccggcggcccctggaccccttagacccctgcctgtatagggggctcctgctggttcaccgcctcagccccctcgagatgtggaccatgtgggcactggtgacagatgaggggctcaagtgtgcagctggccccataccccagcgctgaagggtgggttgggcaacagcctgagagtggactcagtgttgattctctatcgtgatgcgaaattgatgcctgctgctctacagaaaatgccaacttggttttttaactcctctcaccctgttagctctgattaaaaacactgcaaccca

SEQ ID NO: 33736 - DNA, 2938 bp, Homo sapiens
  source 1..2938: mol_type = unassigned DNA
cagtctccagctgccgttcatgcttcctccccagccttccgcagcccaccagggaaggggcggtaggagtggccttttaccaaaggtcagattctttcaccgcctctgccagacccccttgtcccccacccccgcatagatctccagggggctcagaaaactctggccggtggctcacgcctgtagtcccaacgctttgggaggccaaggcgggaggatcgcttgaggccaggagttccagaccagcccaggcaacaaaagataccacatctctacaaaaaataaattagccgggccctgcacgcctgtagtcccagctactggggaggccgaggccggaggatcgcttgaacccaggagttccaggctgcagtgagctataattgtgccactgcactagagtctgggtgacagagacactgtctcaaaaaaaaccaacaaaacccttagctctttcactagccgggctggcctcttcctactgtaaacctgctgggcccccgtctcccttctttctcccctctctcctgccctggagctgcctgactctgcccacggcctgcagagaccccaggtcttcacgcaaggtgccattcctcactcagttcttgctcaaacgtccctccatcaaggagggctttttagctacccttggctatgggatccgtcctccgcgtcagccaattctctgcattagactgtaacttctcaacatacctggttcctatgcgttttgtgctcccctctgagagggcagcgaccctgtcttgcttgccactgcatccctagcacctagcagttgcttttctggtgacggcggctgtggcagtggccaatgcggcagactggtcagaagtgaagggacaggatgacttggcagtggaggtcaaggggaggggactggggcagagggagacaccagagggacaaaaatgagaaactgaagacaggctttgctacgtggagctcgggcaggccacactggtggattctgtctcctcatccttcttttcaggtccctgggagaaatcagcacttagaacgtggtgggaaggcggggcggggtgcctcggaagccatccctgatacaagtccccagctttcctgcttcccctcttgtggtgtgtggctttgtctccctccctccctcctggaagccccgacctctgaggcaggtgtaaagggtgtgtgctttggtggccacggccaccctgtggtgctggttctcctccgagggaagcagtgcactcctggtcatcttggagacgcccaacacaggaccccacaggcaccaagctttttttgggaaatggtttcacttcccacttgaaaagccctgaatgtcagttccacacttagtgaatttgatccaagctaaactgagtctgtgcctaaaactcatcaggtgctcgagtttcctggaagaatggctgggaacgtttatggtgtcagctgtaaagtggctgcaagtccttttgggaaaaacagacccaggagtcctcagatgatggcagaggagggcaagggctggcaaagcagctgtgcttagcccatcctcaggggagggaggactctggaaagagcctgaggatacgctgagaataaaaagtccagaggccagcagggacttagcggctggggtgcaggttaactcctgcccaactcttggggacagggacccggggctgggccctgctcaggtggctctctccttgcagggaccggcgatgctctgcaggctgtgctggctggtctcgtacagcttggctgtgctgttgctcggctgcctgctcttcctgaggaaggcggccaagcccgcaggagaccccacggcccaccagcctttctgggctcccccaacaccccgtcacagccggtgtccacccaaccacacagtgtctagcgcctctctgtccctgcctagccgtcaccgtctcttcttgacctatcgtcactgccgaaatttctctatcttgctggagccttcaggctgttccaaggataccttcttgctcctggccatcaagtcacagcctggtcacgtggagcgacgtgcggctatccgcagcacgtggggcagggtggggggatgggctaggggccggcagctgaagctggtgttcctcctaggggtggcaggatccgctcccccagcccagctgctggcctatgagagtagggagtttgatgacatcctccagtgggacttcactgaggacttcttcaacctgacgctcaaggagctgcacctgcagcgctgggtggtggctgcctgcccccaggcccatttcatgctaaagggagatgacgatgtctttgtccacgtccccaacgtgttagagttcctggatggctgggacccagcccaggacctcctggtgggagatgtcatccgccaagccctgcccaacaggaacactaaggtcaaatacttcatcccaccctcaatgtacagggccacccactacccaccctatgctggtgggggaggatatgtcatgtccagagccacagtgcggcgcctccaggctatcatggaagatgctgaactcttccccattgatgatgtctttgtgggtatgtgcctgaggcggctggggctgagccctatgcaccatgctggcttcaagacatttggaatccggcggcccctggaccccttagacccctgcctgtatagggggctcctgctggttcaccgcctcagccccctcgagatgtggaccatgtgggcactggtgacagatgaggggctcaagtgtgcagctggccccataccccagcgctgaagggtgggttgggcaacagcctgagagtggactcagtgttgattctctatcgtgatgcgaaattgatgcctgctgctctacagaaaatgccaacttggttttttaactcctctcaccctgttagctctgattaaaaacactgcaaccca

SEQ ID NO: 33737 - DNA, 2749 bp, Homo sapiens
  source 1..2749: mol_type = unassigned DNA
attcccacctcctccagaagccccgcccactcccgagccccgagagctccgcgcacctgggcgccatccgccctggctccgctgcacgagctccacgcccgtaccccggcgtcacgctcagggaccggcgatgctctgcaggctgtgctggctggtctcgtacagcttggctgtgctgttgctcggctgcctgctcttcctgaggaaggcggccaagcccgcaggagaccccacggcccaccagcctttctgggctcccccaacaccccgtcacagccggtgtccacccaaccacacagtgtctagcgcctctctgtccctgcctagccgtcaccgtctcttcttgacctatcgtcactgccgaaatttctctatcttgctggagccttcaggctgttccaaggataccttcttgctcctggccatcaagtcacagcctggtcacgtggagcgacgtgcggctatccgcagcacgtggggcagggtggggggatgggctaggggccggcagctgaagctggtgttcctcctaggggtggcaggatccgctcccccagcccagctgctggcctatgagagtagggagtttgatgacatcctccagtgggacttcactgaggacttcttcaacctgacgctcaaggagctgcacctgcagcgctgggtggtggctgcctgcccccaggcccatttcatgctaaagggagatgacgatgtctttgtccacgtccccaacgtgttagagttcctggatggctgggacccagcccaggacctcctggtgggagatgtcatccgccaagccctgcccaacaggaacactaaggtcaaatacttcatcccaccctcaatgtacagggccacccactacccaccctatgctggtgggggaggatatgtcatgtccagagccacagtgcggcgcctccaggctatcatggaagatgctgaactcttccccattgatgatgtctttgtgggtatgtgcctgaggcggctggggctgagccctatgcaccatgctggcttcaagacatttggaatccggcggcccctggaccccttagacccctgcctgtatagggggctcctgctggttcaccgcctcagccccctcgagatgtggaccatgtgggcactggtgacagatgaggggctcaagtgtgcagctggccccataccccagcgctgaagggtgggttgggcaacagcctgagagtggactcagtgttgattctctatcgtgatgcgaaattgatgcctgctgctctacagaaaatgccaacttggttttttaactcctctcaccctgttagctctgattaaaaacactgcaacccagctaacttgtccagcatatgttgaatgggagccaaagtgtagcaaatgctgccaggaacctgtcggggcattccgggcgctgcctggggcgctgcagtctgggacctcaaggaaggaggctgcataggaccccaggagagacgcattttctctttcagatgcaaacaaaatcttacactcttctcctttggatacaatagagaaacggaaagaaaggaaggaacaagaggcctgtgttaagtcctgttgatgttaagtcctgttgagagcaccaggtaaacactctgcaccccttctcttagtagtaataggtttttcactccttggcctcagctgtcctcacaggacagtgggggcagatcagagaacacatcagaaatacatacaaagaaatcgtacaaactggacaggttcccctccccctgccacaactggcatcccaacagagggaacaagtactaaatcatttttgacgacgtaaataagactgaaaacaggttaaacagttgctgaacttaagggcatgacaaaaaggactcctctctctgacccaggtaggcaaaatgctttgggtgtgaggtaaaaaaaatgggtaagagcagctgtacagagtggggtgaaatgttaaacagggtgcagtgcccaagggctaagaaccaggtccagcgcaagcctgagaccacaggaggcactcacagctcacaaaggcgtctcgcctgattggccagggcaggatctgccgcctcttctcggtgcacagacagtcatgccaaccctgggcagggtggcatctgcccctgctttccccactgagtggggagacagggcagtgtgctcaggccctcaatcctcacgcaggtaggcctcctgctccgactcagcccgctcctccccttcctcctgtgttttctgacggagctcttctatctgtgcttctgccagcttggtttctgctttccgggagagctggtgcacctcttccacctgcagtttcaccagctgaatgtgattcctggcggttatagaggcctgatctgcgcctgccaaaagatgggacaatcgggttgagcagccgtgcagggcgcggaaggctcatgtggacgttggcctgggggtgctgtggctgtcatctgaacccctcttggggtcactttccttgacctccctgtcttctctctctgcaaagaaacttccacctctatgttcaggtctggatttaactgacactctgtcaaaaacagcatttttcttcagctgtcagcggccaacatcacaattattaaatgcaactctcacaatcatctttatagctacagagcttttagtacagacctttgattaatttttttaactacacatcttccatttctttttgacaaagagatcatgaataaaattgtcaaagatc

SEQ ID NO: 33738 - DNA, 3216 bp, Homo sapiens
  source 1..3216: mol_type = unassigned DNA
agtctccccgcccctgagccgtgaaggaaatagggacctggccctgggccttgtgtagcgggagggggagctaggaagcagctgagggcagaatccaggagggcctggctgcgggggaatgaagcctccgccttcgcaggcaaaagcctttaaatacgggctcaggcccgggactcagagtgtaacgcgtggcagcctgagggaggggcgtgcgccgagagggagctcagatcgagcggggcgcgggtggagaagctgcggcggcgcggcccgtaggaaggtgctgtccgaacgatcgggataggagcggtccctgcgcttgctgctgggaagtggtacaatcatgtttgaaattaagaagatctgttgcatcggtgcaggctatgttggaggacccacatgtagtgtcattgctcatatgtgtcctgaaatcagggtaacggttgttgatgtcaatgaatcaagaatcaatgcgtggaattctcctacacttcctatttatgagccaggactaaaagaagtggtagaatcctgtcgaggaaaaaatctttttttttctaccaatattgatgatgccatcaaagaagctgatcttgtatttatttctgtgaatactccaacaaaaacctatggaatggggaaaggccgggcagcagatctgaagtatattgaagcttgtgctagacgcattgtgcaaaactcaaatgggtacaaaattgtgactgagaaaagcacagttccagtgcgggcagcagaaagtatccgtcgcatatttgatgcaaacacaaaacccaacttgaatttacaggtgctgtccaaccctgagtttctggcagagggaacagccatcaaggacctaaagaacccagacagagtactgattggaggggatgaaactccagagggccagagagctgtgcaggccctgtgtgctgtatatgagcactgggttcccagagaaaagatcctcaccactaatacttggtcttcagagctttccaaactggcagcaaatgcttttcttgcccagagaataagcagcattaactccataagtgctctgtgtgaagcaacaggagctgatgtagaagaggtagcaacagcgattggaatggaccagagaattggaaacaagtttctaaaagccagtgttgggtttggtgggagctgtttccaaaaggatgttctgaatttggtttatctctgtgaggctctgaatttgccagaagtagctcgttattggcagcaggtcatagacatgaatgactaccagaggaggaggtttgcttcccggatcatagatagtctgtttaatacagtaactgataagaagatagctattttgggatttgcattcaaaaaggacactggtgatacaagagaatcttctagtatatatattagcaaatatttgatggatgaaggtgcacatctacatatatatgatccaaaagtacctagggaacaaatagttgtggatctttctcatccaggtgtttcagaggatgaccaagtgtcccggctcgtgaccatttccaaggatccatatgaagcatgtgatggtgcccatgctgttgttatttgcactgagtgggacatgtttaaggaattggattatgaacgcattcataaaaaaatgctaaagccagcctttatcttcgatggacggcgtgtcctggatgggctccacaatgaactacaaaccattggcttccagattgaaacaattggcaaaaaggtgtcttcaaagagaattccatatgctccttctggtgaaattccgaagtttagtcttcaagatccacctaacaagaaacctaaagtgtagagattgccatttttatttgtgattttttttttttttttttggtacttcaggatagcaaatatctatctgctattaaatggtaaatgaaccaagtgtttttttttgttttttttttgagacagagtctcactgttgcccaggctggagtgcagtggtgcaatctcggctcactgcaagctctgcttcccaggttcacgccattctcctggctcagcctcccaagtagctgggactacaggcacccgccacagtgcctggctaattttttgtatttttagtagagacagggtttcaccatgtgagccaggatggtctcaatctcctgaccttgtgaaccacccgtctcggcctcccaaagtgctgggattacaggtgtgagccaccacgcctggcccatgaaccaagtgtttttaaggaaacaaaactatttttttaatcatcagatttatactagctatatggatattagcatatctggtaattatgaatctagaatttttttacatatttttataatactgttagctcagttattggatgagtgaaagataatcatgttggttttaatagtgtcaatttttgtaaaataaaaattaaacttcaaactctttactttataaattgtccataggccacactttaatatcacattataaagggaaggacagtcttcattcctcctggttattggtttgtttgtcattaaagatatattttgaatccatgaaattgctatgctaaacagcctttacatgtatggtctggttaaagttcctttgttccttttgttttaataaaatgtgtcactgattttttagctcaaaatcatcactgttaatttccagtcaccccaaatatggttaaaagattttttttttaatcatgaagagaaaattagtagcatttctttctctccccattatttattggttttcctcactaatctttttttttttagtccaaaagccaaaaatatttatcttggttttacattttaatttccattcttaattgtaatttttttctttaaataaggaaaccaatataatctcatgtataaaaacttaaatattttacaagttacatatagcatcattctaaaataagaattttttttgttttctgtctgcttttttcttatgtctcttgttgagttttatattttcagtggttatttttgcttgtgttagatcattattaaaatatatccaatgtccctttgatacttgtgctctgctgagaatgtacagtttgcattaaacatcccaggtctcatccttcaggaattttgcagttcaatgagaagagggagacaaatataaagatgaggacagaagcatctctacagatgaaaattacataaataaaacattctccatcaacaacta

SEQ ID NO: 33739 - DNA, 2826 bp, Homo sapiens
  source 1..2826: mol_type = unassigned DNA
gtaacgcgtggcagcctgagggaggggcgtgcgccgagagggagctcagatcgagcggggcgcgggtggagaagctgcggcggcgcggcccgtaggaaggtgctgtccgaacgatcgggataggagcggtccctgcgcttgctgctgggaagtggtacaatcatgtttgaaattaagaagatctgttgcatcggtgcaggctatgttggaggacccacatgtagtgtcattgctcatatgtgtcctgaaatcagggtaacggttgttgatgtcaatgaatcaagaatcaatgcgtggaattctcctacacttcctatttatgagccaggactaaaagaagtggtagaatcctgtcgaggaaaaaatctttttttttctaccaatattgatgatgccatcaaagaagctgatcttgtatttatttctgtgctgtccaaccctgagtttctggcagagggaacagccatcaaggacctaaagaacccagacagagtactgattggaggggatgaaactccagagggccagagagctgtgcaggccctgtgtgctgtatatgagcactgggttcccagagaaaagatcctcaccactaatacttggtcttcagagctttccaaactggcagcaaatgcttttcttgcccagagaataagcagcattaactccataagtgctctgtgtgaagcaacaggagctgatgtagaagaggtagcaacagcgattggaatggaccagagaattggaaacaagtttctaaaagccagtgttgggtttggtgggagctgtttccaaaaggatgttctgaatttggtttatctctgtgaggctctgaatttgccagaagtagctcgttattggcagcaggtcatagacatgaatgactaccagaggaggaggtttgcttcccggatcatagatagtctgtttaatacagtaactgataagaagatagctattttgggatttgcattcaaaaaggacactggtgatacaagagaatcttctagtatatatattagcaaatatttgatggatgaaggtgcacatctacatatatatgatccaaaagtacctagggaacaaatagttgtggatctttctcatccaggtgtttcagaggatgaccaagtgtcccggctcgtgaccatttccaaggatccatatgaagcatgtgatggtgcccatgctgttgttatttgcactgagtgggacatgtttaaggaattggattatgaacgcattcataaaaaaatgctaaagccagcctttatcttcgatggacggcgtgtcctggatgggctccacaatgaactacaaaccattggcttccagattgaaacaattggcaaaaaggtgtcttcaaagagaattccatatgctccttctggtgaaattccgaagtttagtcttcaagatccacctaacaagaaacctaaagtgtagagattgccatttttatttgtgattttttttttttttttttggtacttcaggatagcaaatatctatctgctattaaatggtaaatgaaccaagtgtttttttttgttttttttttgagacagagtctcactgttgcccaggctggagtgcagtggtgcaatctcggctcactgcaagctctgcttcccaggttcacgccattctcctggctcagcctcccaagtagctgggactacaggcacccgccacagtgcctggctaattttttgtatttttagtagagacagggtttcaccatgtgagccaggatggtctcaatctcctgaccttgtgaaccacccgtctcggcctcccaaagtgctgggattacaggtgtgagccaccacgcctggcccatgaaccaagtgtttttaaggaaacaaaactatttttttaatcatcagatttatactagctatatggatattagcatatctggtaattatgaatctagaatttttttacatatttttataatactgttagctcagttattggatgagtgaaagataatcatgttggttttaatagtgtcaatttttgtaaaataaaaattaaacttcaaactctttactttataaattgtccataggccacactttaatatcacattataaagggaaggacagtcttcattcctcctggttattggtttgtttgtcattaaagatatattttgaatccatgaaattgctatgctaaacagcctttacatgtatggtctggttaaagttcctttgttccttttgttttaataaaatgtgtcactgattttttagctcaaaatcatcactgttaatttccagtcaccccaaatatggttaaaagattttttttttaatcatgaagagaaaattagtagcatttctttctctccccattatttattggttttcctcactaatctttttttttttagtccaaaagccaaaaatatttatcttggttttacattttaatttccattcttaattgtaatttttttctttaaataaggaaaccaatataatctcatgtataaaaacttaaatattttacaagttacatatagcatcattctaaaataagaattttttttgttttctgtctgcttttttcttatgtctcttgttgagttttatattttcagtggttatttttgcttgtgttagatcattattaaaatatatccaatgtccctttgatacttgtgctctgctgagaatgtacagtttgcattaaacatcccaggtctcatccttcaggaattttgcagttcaatgagaagagggagacaaatataaagatgaggacagaagcatctctacagatgaaaattacataaataaaacattctccatc

SEQ ID NO: 33740 - DNA, 575 bp, Homo sapiens
  source 1..575: mol_type = unassigned DNA
gtaacgcgtggcagcctgagggaggggcgtgcgccgagagggagctcagatcgagcggggcgcgggtggagaagctgcggcggcgcggcccgtaggaaggtgctgtccgaacgatcgggataggagcggtccctgcgcttgctgctgggaagtggtacaatcatgtttgaaattaagaagatctgttgcatcggtgcaggctatgttggaggacccacatgtagtgtcattgctcatatgtgtcctgaaatcagggtaacggttgttgatgtcaatgaatcaagaatcaatgcgtggaattctcctacacttcctatttatgaggactaaaagaagtggtagaatcctgtcgaggaaaaaatctttttttttctaccaatattgatgatgccatcaaagaagctgatcttgtatttatttctgtgaatactccaacaaaaacctatggaatggggaaaggccgggcagcagatctgaagtatattgaagcttgtgctagacgcattgtgcaaaactcaaatgggtacaaaattgtgactgagaaaagcacagttccagtgcgggcagcagaaagt

SEQ ID NO: 33741 - DNA, 433 bp, Homo sapiens
  source 1..433: mol_type = unassigned DNA
cgcacagacatcccaaatcccggattgggcctgaggaacatctctgcaaagagcgccaggagggcgtgggggtcccgcctctctcgccagggaccagggagtggacactcactggtccagtcatgaggaactcagcatcctcctgacgggaggcgcctctttcccagaagcgtacaatcatgtttgaaattaagaagatctgttgcatcggtgcaggctatgttggaggacccacatgtagtgtcattgctcatatgtgtcctgaaatcagggtaacggttgttgatgtcaatgaatcaagaatcaatgcgtggaattctcctacacttcctatttatgagccaggactaaaagaagtggtagaatcctgtcgaggaaaaaatctttttttttctaccaatattgatgatgccatcaaagaagctgatcttgt

SEQ ID NO: 33742 - DNA, 3021 bp, Homo sapiens
  source 1..3021: mol_type = unassigned DNA
atacagagcagtagctgtctatcgacagacctcaaagacacagtgagcctttgagtttcttcaaatcccttaagaaatggagaacagtagtctttcttcaggggggttctggaaatgaaagagctgactgtctgctctgagatgtgcttattagtggccaggatccagtttaagtacaatcatgtttgaaattaagaagatctgttgcatcggtgcaggctatgttggaggacccacatgtagtgtcattgctcatatgtgtcctgaaatcagggtaacggttgttgatgtcaatgaatcaagaatcaatgcgtggaattctcctacacttcctatttatgagccaggactaaaagaagtggtagaatcctgtcgaggaaaaaatctttttttttctaccaatattgatgatgccatcaaagaagctgatcttgtatttatttctgtgaatactccaacaaaaacctatggaatggggaaaggccgggcagcagatctgaagtatattgaagcttgtgctagacgcattgtgcaaaactcaaatgggtacaaaattgtgactgagaaaagcacagttccagtgcgggcagcagaaagtatccgtcgcatatttgatgcaaacacaaaacccaacttgaatttacaggtgctgtccaaccctgagtttctggcagagggaacagccatcaaggacctaaagaacccagacagagtactgattggaggggatgaaactccagagggccagagagctgtgcaggccctgtgtgctgtatatgagcactgggttcccagagaaaagatcctcaccactaatacttggtcttcagagctttccaaactggcagcaaatgcttttcttgcccagagaataagcagcattaactccataagtgctctgtgtgaagcaacaggagctgatgtagaagaggtagcaacagcgattggaatggaccagagaattggaaacaagtttctaaaagccagtgttgggtttggtgggagctgtttccaaaaggatgttctgaatttggtttatctctgtgaggctctgaatttgccagaagtagctcgttattggcagcaggtcatagacatgaatgactaccagaggaggaggtttgcttcccggatcatagatagtctgtttaatacagtaactgataagaagatagctattttgggatttgcattcaaaaaggacactggtgatacaagagaatcttctagtatatatattagcaaatatttgatggatgaaggtgcacatctacatatatatgatccaaaagtacctagggaacaaatagttgtggatctttctcatccaggtgtttcagaggatgaccaagtgtcccggctcgtgaccatttccaaggatccatatgaagcatgtgatggtgcccatgctgttgttatttgcactgagtgggacatgtttaaggaattggattatgaacgcattcataaaaaaatgctaaagccagcctttatcttcgatggacggcgtgtcctggatgggctccacaatgaactacaaaccattggcttccagattgaaacaattggcaaaaaggtgtcttcaaagagaattccatatgctccttctggtgaaattccgaagtttagtcttcaagatccacctaacaagaaacctaaagtgtagagattgccatttttatttgtgattttttttttttttttttggtacttcaggatagcaaatatctatctgctattaaatggtaaatgaaccaagtgtttttttttgttttttttttgagacagagtctcactgttgcccaggctggagtgcagtggtgcaatctcggctcactgcaagctctgcttcccaggttcacgccattctcctggctcagcctcccaagtagctgggactacaggcacccgccacagtgcctggctaattttttgtatttttagtagagacagggtttcaccatgtgagccaggatggtctcaatctcctgaccttgtgaaccacccgtctcggcctcccaaagtgctgggattacaggtgtgagccaccacgcctggcccatgaaccaagtgtttttaaggaaacaaaactatttttttaatcatcagatttatactagctatatggatattagcatatctggtaattatgaatctagaatttttttacatatttttataatactgttagctcagttattggatgagtgaaagataatcatgttggttttaatagtgtcaatttttgtaaaataaaaattaaacttcaaactctttactttataaattgtccataggccacactttaatatcacattataaagggaaggacagtcttcattcctcctggttattggtttgtttgtcattaaagatatattttgaatccatgaaattgctatgctaaacagcctttacatgtatggtctggttaaagttcctttgttccttttgttttaataaaatgtgtcactgattttttagctcaaaatcatcactgttaatttccagtcaccccaaatatggttaaaagattttttttttaatcatgaagagaaaattagtagcatttctttctctccccattatttattggttttcctcactaatctttttttttttagtccaaaagccaaaaatatttatcttggttttacattttaatttccattcttaattgtaatttttttctttaaataaggaaaccaatataatctcatgtataaaaacttaaatattttacaagttacatatagcatcattctaaaataagaattttttttgttttctgtctgcttttttcttatgtctcttgttgagttttatattttcagtggttatttttgcttgtgttagatcattattaaaatatatccaatgtccctttgatacttgtgctctgctgagaatgtacagtttgcattaaacatcccaggtctcatccttcaggaattttgcagttcaatgagaagagggagacaaatataaagatgaggacagaagcatctctacagatgaaaa

SEQ ID NO: 33743 - DNA, 1712 bp, Homo sapiens
  source 1..1712: mol_type = unassigned DNA
gtgtaacgcgtggcagcctgagggaggggcgtgcgccgagagggagctcagatcgagcggggcgcgggtggagaagctgcggcggcgcggcccgtaggaaggtgctgtccgaacgatcgggataggagcggtccctgcgcttgctgctgggaagtggccaggactaaaagaagtggtagaatcctgtcgaggaaaaaatctttttttttctaccaatattgatgatgccatcaaagaagctgatcttgtatttatttctgtgaatactccaacaaaaacctatggaatggggaaaggccgggcagcagatctgaagtatattgaagcttgtgctagacgcattgtgcaaaactcaaatgggtacaaaattgtgactgagaaaagcacagttccagtgcgggcagcagaaagtatccgtcgcatatttgatgcaaacacaaaacccaacttgaatttacaggtgctgtccaaccctgagtttctggcagagggaacagccatcaaggacctaaagaacccagacagagtactgattggaggggatgaaactccagagggccagagagctgtgcaggccctgtgtgctgtatatgagcactgggttcccagagaaaagatcctcaccactaatacttggtcttcagagctttccaaactggcagcaaatgcttttcttgcccagagaataagcagcattaactccataagtgctctgtgtgaagcaacaggagctgatgtagaagaggtagcaacagcgattggaatggaccagagaattggaaacaagtttctaaaagccagtgttgggtttggtgggagctgtttccaaaaggatgttctgaatttggtttatctctgtgaggctctgaatttgccagaagtagctcgttattggcagcaggtcatagacatgaatgactaccagaggaggaggtttgcttcccggatcatagatagtctgtttaatacagtaactgataagaagatagctattttgggatttgcattcaaaaaggacactggtgatacaagagaatcttctagtatatatattagcaaatatttgatggatgaaggtgcacatctacatatatatgatccaaaagtacctagggaacaaatagttgtggatctttctcatccaggtgtttcagaggatgaccaagtgtcccggctcgtgaccatttccaaggatccatatgaagcatgtgatggtgcccatgctgttgttatttgcactgagtgggacatgtttaaggaattggattatgaacgcattcataaaaaaatgctaaagccagcctttatcttcgatggacggcgtgtcctggatgggctccacaatgaactacaaaccattggcttccagattgaaacaattggcaaaaaggtgtcttcaaagagaattccatatgctccttctggtgaaattccgaagtttagtcttcaagatccacctaacaagaaacctaaagtgtagagattgccatttttatttgtgattttttttttttttttttggtacttcaggatagcaaatatctatctgctattaaatggtaaatgaaccaagtgtttttttttgttttttttttgagacagagtctcactgttgcccaggctggagtgcagtggtgcaatctcggctcactgcaagctctgcttcccaggttcacgccattctcctggctcagcctcccaagtagctggga

SEQ ID NO: 33744 - DNA, 577 bp, Homo sapiens
  source 1..577: mol_type = unassigned DNA
gtaacgcgtggcagcctgagggaggggcgtgcgccgagagggagctcagatcgagcggggcgcgggtggagaagctgcggcggcgcggcccgtaggaaggtgctgtccgaacgatcgggataggagcggtccctgcgcttgctgctgggaagtggaacagtcttactgttttccttctagtacaatcatgtttgaaattaagaagatctgttgcatcggtgcaggctatgttggaggacccacatgtagtgtcattgctcatatgtgtcctgaaatcagggtaacggttgttgatgtcaatgaatcaagaatcaatgcgtggaattctcctacacttcctatttatgagccaggactaaaagaagtggtagaatcctgtcgaggaaaaaatctttttttttctaccaatattgatgatgccatcaaagaagctgatcttgtatttatttctgtgaatactccaacaaaaacctatggaatggggaaaggccgggcagcagatctgaagtatattgaagcttgtgctagacgcattgtgcaaaactcaaatgggtacaaaattgtgactgagaaaagc

SEQ ID NO: 33745 - DNA, 534 bp, Homo sapiens
  source 1..534: mol_type = unassigned DNA
gtgaaggaaatagggacctggccctgggccttgtgtagcgggagggggagctaggaagcagctgagggcagaatccaggagggcctggctgcgggggaatgaagcctccgccttcgcaggcaaaagcctttaaatacgggctcaggcccgggactcagagtgtaacgcgtggcagcctgagggaggggcgtgcgccgagagggagctcagatcgagcggggcgcgggtggagaagctgcggcggcgcggcccgtaggaaggtgctgtccgaacgatcgggataggagcggtccctgcgcttgctgctgggaagtgggtaagcgccgctcccaggctggccccgccgcccgggcgggatgctcccagtacaatcatgtttgaaattaagaagatctgttgcatcggtgcaggctatgttggaggacccacatgtagtgtcattgctcatatgtgtcctgaaatcagggtaacggttgttgatgtcaatgaatcaagaatcaatgcgtggaattctcctacacttcctatttatga

SEQ ID NO: 33746 - DNA, 549 bp, Homo sapiens
  source 1..549: mol_type = unassigned DNA
gccctaaagcctggcagacgcggagcgcacgcggcctttgcctcggccaggacagggcagcggggagagggctgctagacaacaattcttgacccctcctcgacccacgaccgccagtacaatcatgtttgaaattaagaagatctgttgcatcggtgcaggctatgttggaggacccacatgtagtgtcattgctcatatgtgtcctgaaatcagggtaacggttgttgatgtcaatgaatcaagaatcaatgcgtggaattctcctacacttcctatttatgaggactaaaagaagtggtagaatcctgtcgaggaaaaaatctttttttttctaccaatattgatgatgccatcaaagaagctgatcttgtatttatttctgtgaatactccaacaaaaacctatggaatggggaaaggccgggcagcagatctgaagtatattgaagcttgtgctagacgcattgtgcaaaactcaaatgggtacaaaattgtgactgagaaaagcacagttccagtgcgggcagcagaaagtatccgtcgcata

SEQ ID NO: 33747 - DNA, 568 bp, Homo sapiens
  source 1..568: mol_type = unassigned DNA
agacgcggagcgcacgcggcctttgcctcggccaggacagggcagcggggagagggctgctagacaacaattcttgacccctcctcgacccacgaccgccagtacaatcatgtttgaaattaagaagatctgttgcatcggtgcaggctatgttggaggacccacatgtagtgtcattgctcatatgtgtcctgaaatcagggtaacggttgttgatgtcaatgaatcaagaatcaatgcgtggaattctcctacacttcctatttatgagccaggactaaaagaagtggtagaatcctgtcgaggaaaaaatctttttttttctaccaatattgatgatgccatcaaagaagctgatcttgtatttatttctgtgaatactccaacaaaaacctatggaatggggaaaggccgggcagcagatctgaagtatattgaagcttgtgctagacgcattgtgcaaaactcaaatgggtacaaaattgtgactgagaaaagcacagttccagtgcgggcagcagaaagtatccgtcgcatatttgatgcaaacacaaaacccaacttgaat

SEQ ID NO: 33748 - DNA, 861 bp, Homo sapiens
  source 1..861: mol_type = unassigned DNA
gtagcgggagggggagctaggaagcagctgagggcagaatccaggagggcctggctgcgggggaatgaagcctccgccttcgcaggcaaaagcctttaaatacgggctcaggcccgggactcagagtgtaacgcgtggcagcctgagggaggggcgtgcgccgagagggagctcagatcgagcggggcgcgggtggagaagctgcggcggcgcggcccgtaggaaggtgctgtccgaacgatcgggataggagcggtccctgcgcttgctgctgggaagtggggcgggaaccgcattttggaactgctgtcctggggatgtggtcgtctgggcttcttattcaagactctacaatcatgtttgaaattaagaagatctgttgcatcggtgcaggctatgttggaggacccacatgtagtgtcattgctcatatgtgtcctgaaatcagggtaacggttgttgatgtcaatgaatcaagaatcaatgcgtggaattctcctacacttcctatttatgagccaggactaaaagaagtggtagaatcctgtcgaggaaaaaatctttttttttctaccaatattgatgatgccatcaaagaagctgatcttgtatttatttctgtgaatactccaacaaaaacctatggaatggggaaaggccgggcagcagatctgaagtatattgaagcttgtgctagacgcattgtgcaaaactcaaatgggtacaaaattgtgactgagaaaagcacagttccagtgcgggcagcagaaagtatccgtcgcatatttgatgcaaacacaaaacccaacttgaatttacaggtgctgtccaaccctgagtttctggcagagggaacagcca

SEQ ID NO: 33749 - DNA, 4007 bp, Homo sapiens
  source 1..4007: mol_type = unassigned DNA
gggggcgggacgcgccgaggagtggggcgcgagccgccggttttgattagtgcgcggagctgcggcggtggagctgctcggccgggagcccggcggcgagacggagaggcggcggaggtgcccgcgcgcagggtctggtgggcggccgcgaggctcgggagaggcgaaccggagcgcgggaccgcggtcgccccgaccagagccgggagaccgcagcacccgcagccgcccgcgagcgcgccgaagacagcgcgcaggcgagagcgcgcgggcgggggcgcgcaggccctgcccgccccttccgtccccacccccctccgccctttcctctccccaccttcctctcgcctcccgcgcccccgcaccgggcgcccaccctgtcctcctcctgcgggagcgttgtccgtgttggcggccgcagcgggccgggccggtccggcgggccgggggatggcgctgctggacctggccttggagggaatggccgtcttcgggttcgtcctcttcttggtgctgtggctgatgcatttcatggctatcatctacacccgattacacctcaacaagaaggcaactgacaaacagccttatagcaagctcccaggtgtctctcttctgaaaccactgaaaggggtagatcctaacttaatcaacaacctggaaacattctttgaattggattatcccaaatatgaagtgctcctttgtgtacaagatcatgatgatccagccattgatgtatgtaagaagcttcttggaaaatatccaaatgttgatgctagattgtttataggtggcaaaaaagttggcattaatcctaaaattaataatttaatgccaggatatgaagttgcaaagtatgatcttatatggatttgtgatagtggaataagagtaattccagatacgcttactgacatggtgaatcaaatgacagaaaaagtaggcttggttcacgggctgccttacgtagcagacagacagggctttgctgccaccttagagcaggtatattttggaacttcacatccaagatactatatctctgccaatgtaactggtttcaaatgtgtgacaggaatgtcttgtttaatgagaaaagatgtgttggatcaagcaggaggacttatagcttttgctcagtacattgccgaagattactttatggccaaagcgatagctgaccgaggttggaggtttgcaatgtccactcaagttgcaatgcaaaactctggctcatattcaatttctcagtttcaatccagaatgatcaggtggaccaaactacgaattaacatgcttcctgctacaataatttgtgagccaatttcagaatgctttgttgccagtttaattattggatgggcagcccaccatgtgttcagatgggatattatggtatttttcatgtgtcattgcctggcatggtttatatttgactacattcaactcaggggtgtccagggtggcacactgtgtttttcaaaacttgattatgcagtcgcctggttcatccgcgaatccatgacaatatacatttttttgtctgcattatgggacccaactataagctggagaactggtcgctacagattacgctgtgggggtacagcagaggaaatcctagatgtataactacagctttgtgactgtatataaaggaaaaaagagaagtattataaattatgtttatataaatgcttttaaaaatctaccttctgtagttttatcacatgtatgttttggtatctgttctttaatttatttttgcatggcacttgcatctgtgaaaaaaaaaaaaaacacatctgtagtcttggccaaatgatacactttattttgtggaagtagagaatcaagagaattggttctaggaacctgggttcgttcatcattgttgtttatttttttaaaataaataaataaatatatatatagatgctctgcaacaaactctgtgacagtatccttcagtagagaaagtttcttacttgtgagtacactcttttagaacatttacgggtggcagcagctttgctttagagtttagaagataatagaaggaatgactattcatgtccaaagtgaatggttttgtgcagtgaacaacacatggcgaggtactaactgagaaactttttcatgctttatgcctacctcttgtagttgttgcagagcaaatataaattgtaataagatagctaggccttgcagaaacaaacagaaaaacttaaaaaaaaatgatataagagctggagtctagtatttatatgaatctgtgagagataatttttttggtctcactgcaatgaaccaaaagcggctgagtttggtttttaattgtagccatgtattgaaggcatctttttgaccaactcttgttggttctgtcttgaaccattgttaatcactgtgctgtaattagtatagctaaatcttttccttccttgctcctcccccagcccaccccgtcttcccttaacattttttcagggggggttgggagtggtttcattttagtgtgagtggatgttttgatagttgtaaggaaaaaatgcatttcagacacatttcacacatgagctattttcttacacagtatgtcttattgttaataagaatgtaatttcatgatacaagtatttaataccttttttaagtcagtaaatattctagccatcaataaattgcagtagagtattaagaggggacaggatgagtttactcttaaaattaatcagtatcaaactaagtctactgtgtgtgttttttttttttgttttttgtttttgtttgtttactattatagtaagtctagtcttatttaaattggatttttgtattcaagtttatatgacaaaatagactagatcagcgctggttgtaaatgcatgctgtacctcactgttttctccccatcatgccgctaaacttgctcgccaggttgtgcttaacttgtggtgaactggacttgattctgttttgttttgtttttttaaaaaaaaaaaacaaaaatgtaagggacagtgcataagccttttctttgttaagtagtggtgttttgctttttcttcaggattggatggcatgttgtccacaggaatgcctactgcagggctaacactggcaatatggcagctttaaattctgagttactacagtctccatgtcaaagcataatgtgtagcatatcagcaataactacatatttatagaaaacactttttcactttactgagccaattcatttaattgtcaaatgtctatatccatggtttaaatggcaacatatctataagtatgtatacacattatatttaagcttttctctgggccaaactgcttcatccttttttctttctttttttttttttttagccttatgatgaatttgtttgaagggcattttctttatgaacaaaggcttggatgcatattcctttctttctgtgaatgggtattattccctgaggaaagttgcacagtgaaaaccagtctggttgtgacccactacatgttttgtttttaatcactattacctgagttgaactttgctcaccatgtttgtacttgttggtctgtttaatgaagtttggttgatgccatcctttgcactgccgaagcgtaatcttgtgtattacttagctctctgctgatctcagtatggacagtgtaacaacaaaaccaaaatggctggacagacttcttgtgttttgtaaatataaactaggacagttctgtaggtttgttcagtgtgctagtggagtatttccttaatgtaaaacttcacttaacagagagattctttgtttagcaagcttggagtgatgataaaatggtaagaaataatataaatgttgaagaaagcatcacaacagaactataggagtctaaatttaataaatctttaaaaaaaaccagtgtctagaatatataccatgttttattatttaaaatcattgtcttaaatttttgttcaaaaaataaaaatttgaatacaatcaaaa

SEQ ID NO: 33750 - DNA, 10650 bp, Homo sapiens
  source 1..10650: mol_type = unassigned DNA
ccctggcgttgtctctggcactgtggcggactgaccacggcccgggcatgggctgcaagggagacgcgagcggtgcgtgtgccgcgggtgcgctgccggtgacaggagtttgctataaaatgggagttctggttgtactcactgttctgtggctgttctcctcagtaaaggccgactcaaaagccattacaacctctcttacaacaaaatggttttccactccattgttgttagaagccagtgagtttttagcagaagacagtcaagagaaattttggaattttgtagaagccagtcaaaatattggatcatcagatcatgacggtaccgattattcctactatcatgcaatattggaggctgcatttcagtttctgtcacccctccagcagaatttgtttaaattttgtctgtcccttcgttcttactcagctacaatccaagccttccagcagatagcagctgatgaacctccaccagaaggatgtaattcgtttttttcagtgcatggaaagaagacttgtgaatctgatacccttgaggctcttctactgacagcctctgaaagacccaaacctttattgttcaaaggagatcacagatatccctcgtctaatcctgaaagccctgtggtgattttctactctgagattggctctgaggaattttccaattttcaccgccagcttatatcaaaaagcaatgcaggcaaaatcaattatgtattcagacattatatatttaatcccaggaaggagcctgtttacctctctggctatggcgtggaattggccattaagagcactgagtacaaggccaaggatgatactcaggtgaaaggaactgaggtaaacaccacagtgattggtgaaaatgatcctattgatgaggttcaggggttcctctttggaaaattaagagatctgcaccccgacctggagggacagttgaaagaactcagaaagcatcttgtagagagcaccaatgaaatggcacctttaaaggtttggcagttgcaagatctcagtttccagactgctgctcgaatcttggcttctcctgttgagttggctttggttgtcatgaaggatcttagtcagaattttcctaccaaagccagagcaataacaaaaacagctgtgagctcagaacttagaaccgaagtggaagagaatcagaagtatttcaagggaactttaggattacaacctggagattcagccctcttcatcaatggacttcacatggatttagatacacaggatatattcagtctgtttgatgtgttgaggaatgaagctcgggtaatggagggtctgcatagattgggaatagaaggcctttctctgcataatgttttgaagctgaacatccagccctctgaggcagactatgccgtagacatccggagtcctgctatttcatgggtcaacaacctggaggttgatagcagatataattcgtggccttctagtttacaagagttgcttcgacccacctttcctggtgttattcggcagatcaggaaaaacttacataatatggttttcatagttgatcctgcacatgagaccacagcagagttgatgaacacagctgagatgttccttagtaatcatataccactaagaattggttttatctttgtggttaatgactctgaagatgttgatgggatgcaagatgctggagtggctgttcttagagcatataattatgttgcccaagaagtggatgattatcatgccttccagactctgacacatatctataacaaggtgaggactggagaaaaagtgaaagttgaacatgtggtcagtgtcctggagaagaaatatccgtatgtagaagtgaatagcattttggggattgattctgcttatgatcggaatcggaaggaagcaagaggctactatgagcagactggagttggacctctgcccgttgtgctgttcaatggaatgccctttgaaagggaacagctagaccctgatgagttagaaaccatcacaatgcataaaatcctggagaccaccaccttcttccaaagagcggtgtacttgggtgaactgccccatgatcaagatgtggtagagtatatcatgaatcagccaaatgttgttccacgaatcaattctaggattttgacagctgaacgagactacctggatttaacagcgagtaataacttctttgtggatgattatgctagatttactatcttggattcccaaggcaagactgctgctgtagccaatagtatgaactatctgacaaagaaaggaatgtcctccaaggaaatctatgatgattcttttattaggccagtaactttttggattgttggggattttgatagcccttctggacggcagttactgtatgatgccatcaaacatcagaaatccagtaacaatgttagaataagcatgatcaataatcctgccaaagagataagctatgagaacactcagatctccagagcaatctgggcagctctccaaactcagacttccaacgctgctaagaacttcatcaccaaaatggccaaggagggggctgcagaggccctggctgcaggagctgacattgcggagttctctgttgggggaatggatttcagtctttttaaagaggtctttgagtcttccaaaatggatttcattttgtctcatgccgtgtactgcagggatgttctgaagctgaagaagggacagagggcagtgatcagcaatggaaggatcattgggccactggaggatagtgagctctttaatcaagacgatttccacctcctcgaaaatatcatcttaaaaacctcaggacagaaaataaaatctcatattcaacagcttcgggtagaagaagatgtggcaagcgacttggtaatgaaggtggatgctcttctgtcagcgcaaccaaaaggagatccaagaatcgagtaccagttttttgaagacagacacagtgcaatcaaactgaggccgaaggaaggggagacatactttgatgttgtggctgtcgttgaccctgtcaccagagaagcacagagacttgctcctttgctcttggttttggctcagctgataaacatgaatctgagagtatttatgaactgccaatccaaactttctgacatgcctttaaaaagcttttaccgttatgtcttagaaccagagatttctttcacttcagacaatagttttgctaagggtccaatcgcaaaatttttggatatgcctcagtctccactgttcactctgaatttgaacacacctgagagctggatggtagaatctgtcagaacaccatatgatcttgataatatttatttagaagaggtggacagtgtagtggctgctgagtatgagctggaatacctgttactggaaggtcattgctacgacatcaccacaggccagcctccacggggactacagtttaccttaggaacttcagccaacccggtcattgtggacaccattgttatggccaatctgggctactttcagctgaaagccaacccaggagcttggatcctcagacttaggaagggacgctctgaagatatttatagaatttacagccacgatggcactgattctccccctgatgctgatgaggtggttatcgtcctcaacaacttcaaaagcaaaattattaaagtgaaggttcagaagaaggcagatatggtgaacgaagacttgctgagtgatggaacgagtgagaatgaatctggattttgggattccttcaaatggggctttacaggacagaagactgaggaagtgaagcaagataaagatgacataattaatattttctccgttgcatctggtcatctctacgaaagatttcttcgcataatgatgctatccgtgctgaagaataccaagactcctgtgaaattctggttcttgaagaattacttgtcccccacatttaaggagtttataccttacatggcaaatgaatacaatttccagtatgagcttgttcagtacaaatggccccggtggcttcatcaacaaactgaaaaacagcgtatcatctggggttacaagatcctcttcctggatgtacttttcccactagttgttgacaagttcctgtttgtggatgctgatcagattgtacgaacagatctgaaagagttaagagatttcaatttggatggtgctccttatggttacactcctttctgtgacagccgaagagaaatggacggctacaggttctggaagtcagggtactgggccagtcatttagccgggcgaaagtatcatatcagtgcactatatgttgtggatctgaagaagtttaggaaaatagctgctggtgacagactcaggggacagtaccaaggtctgagtcaggaccctaacagcctttcaaatcttgatcaagatctgcccaataacatgattcatcaggtgccaattaaatccctccctcaagaatggctttggtgtgaaacgtggtgtgatgacgcctctaagaaaagggcaaaaaccattgatttgtgtaataatccgatgaccaaagagccgaaactggaagcagctgtgcggattgtcccggagtggcaggactacgaccaagagatcaaacagctacagatccgctttcagaaggagaaagaaacgggagcactgtacaaagagaagacaaaagaaccaagccgagaaggtcctcagaaacgtgaagaattatgatctctggagaaggacaggaaatcaccccatttgaaaaacagtttttataataaatgctagttttttctgatctgtctatacaactgctgataagccggctgggcaggagtgccacaccttttgattctgagcatttgattctgacttctgtactctggtggccactggatctttgggattaaagctctgttggatttgtacctcagaggaagaccaagtggctgatcctttggactctgtaaagagcattcttctagtcagagggtggaatggcagcagcaactggaagaaaatgagttttttggtgcccacacccaagagcacacacatgctgcactgtctcggaaagcagggccagctagagccaccatgttcttccttacctcagtttacctgcggcctgcgctgcactgcagatgcccaccctgccctgggtctggccggcggaagctctgtccaaggtccacacacctccaggtttacgccaacatccttgtgccctccccaccttctcttccaacgcattaggtgcattgtttaattgaaatccaaccaacaattgtgtgtcaaggctggtttggtgcagtggctgggcaaattaattttgggccaggatgggggtgggttgcagtgagggtagggaaaatgtcaggagtaggaaggttcgggggttaagggaagggaaggaagaccagaactggccatcctcttttataatccattagtagcaccatggctcatttgaaatgaaaatattacacttattccccacccaaccgcagtgaactttctaggtaattgttttgaaaacaatttttgtatctgtgaaagtctttgctttttctttccaccttctagaaaagtctgctaccagtttccttactgaatacagccatactcagcccctctcgcatccagcccgtcagggtcagggtcagggtcaggctccctcaagacgagcaccgcattgtctgccctcttttgcgtaggatttttctctcagacccaggggacattgccttggacttttctctacaaatgccctcagatgtaagaccagaaatgattctgcttgtggaactcgtggctttctgtcctattttccttttatgtgagccctgcaggttgcctttggcgcccacaccagttctgtcttcatgtcgctgcatcgtgaagccccatttgcctttagtccctgctttgtgtgtcttcacttccacagccagtgttgcccctcagggcatactttgctggtgaacgggctgtagagtcttgagtatgttattggcctaagtgggcatgaggccccagcatccgactccatctgccaggctgcagggcacagcagcactggcatagacaggcacgctctgtcttccaacgtgcaccagccttttcttacatattttgcctgtttttaaaaaatacgaggagagggtgcagatggatactgtgccctcaccctcctaagccaggtaatatattgatgtgcagacttttaagaaatcttagtcttatcacaaatatcaagtaatttattttttccattttcaaatgcaaaagttagcctaggaagcctcccagtcatcctgaaggaccttttgactttgcttttataattctgttaaaaattgaggaggggattaatgagtacaatgaaaacaaaacaaaacaaaaaattaagaagaggaaagctcaaaagaggataagagactgaaaaggcacctcagaatggctgctgtgggcagagtctgtgacatgactttccccgccctgcccctctgttcagagcagctggaaagatgggatcagtaagattaaaaaacttttgttcggccaggcgtggtggctcacacctgtaatcccagcactttgggaggctgaggcggacggatcatgaggtcaggagttcaagaccagcctggccaatatggtgaaaccccgtctctactaaaaatacaaaaattagccgggtgttgtggctcaccctctattcccagctactcgggaggcagagacaggagaatcgcctgaacccaggaggcagaggttgcagtgagctgagatcgtgccactgcactccagcctgggtgacagagcgagactccatctcagaaaacaaacaaacaaaaagaaacttttgttcaagctgcatcttcacattgaatgaaagcattcagacgggtgactgctgctgtccacaactgtgggcggaagtgtgccttttcccagtttctcgtccaggaggttgcatagcaaatactcaagtcactgggatatatgctttccaaatgctggcccccatagcacctttccccatgtctttctaccaagcctcttatgtttaatctgtgcagggaagacaagagtagaccatattctctgtgtgctgtgcatgtcctggtgtcactcattgcctcttatctgtcgccattctaatataagtcagcttaatagttgactctgaataatgcaaaacccagcttgcttccagaatggcctaggaccctcctcctcctgccagtttttttttttttttttggttcatgtggcataatcatctttcaaaattaaccaaatgccccagaaaatgatgttaccactaaaatattttctccaagaaggcatactgtaacagaaaagataggtaagatatttttttcccaagaagtaagaattgattgtgctgaatgttcaaactctggaaactgttcacagtatgttgttcttagctgttatttatataaagtgaattattttctctctcaatcatgccatagtggagacttttgtttgtgagtaagtgacagagtaatatgaaataatgtgatatgtcagagtgacatgcagcatcctgagcctgtttttatgttctgtgtacagtggcatttgattgagatcaaagcctgtcacagcctgctgctgggggtgtggggatatgccagagtcctgtgtttggttttagaagtttactgaatgtttcccacatggagaataatggatggcatgttagtttctttaagagtggtaaagttgtacatctgtcattgttgcatttcgaattgaacacatagatgcttgcctgtctgcttgggtgaatgcctcttgggagagcgaagattacgtgcatgatgtatgttaagaaacagtttccggtcaggcacagtggcttacacctgtaatcccagcactttgggaagccgaggcgggcggattatgaggtcaagagatagagaccatcctggccaacacggtgaaaccccgtctctactaaaaatacaaaaattagctgggcatggtggcacacacctgtagtcccagctactcgggaggctgaggcaggagaatcacttgaacccgggaggtggaggttgcagtgagccgagatcatgccactgcactccagcctggcaatagagcgagactccgtctcaaaaaaaaaaaaaaaaaaaaaaaaaaaattaaaacagtttccataaatggagcttaatttgctctgctgtccttaagccctcgtgggtttttttttaagagagtctcattctgtcacccaggctggagtgcagtggtgcgatcttggctcacttcaacctctgcctcccaagttcaaacaattctcctgcctcagcctcctgagtagctgggattacaggcgcctgccaccatgcctggttaatttttgtatttttagtagagatggggttttaccatgttggttggccaggctgatctcaaactcctgacctcaggtggtgatctgcccacctcggcctcccaaagtgctgggattacaggcgtgagccactatgtccggtcaagccctcgtgttctgaaccttgtcaaggctctgcctgaatgagttttcatctgattgtggggaccaagtccctgagtagagggccaagagctagggacagggggaagagactggcccaggtggtagggaggaaagaactcccagagtttcctttagccaggaaacctgctctactgaccccgtgacttggacagtcagacatcaccctgagagtgacaagtgtaaaatgactcccttcctcccccgccctccggaagtatatttagatacttgaaagcagtccttttctaaaatggccttacctatgtggcctgaacgattaaaagaaagaactcagagttacaagggaaaaagaaaaagagttacaagggaattgtagtctttttctgaatagaatattagtactgtggtattgcatttcatgggaatggaaatgtattggtaaagctacctgatggaagctttctcttggtaacaaaaatggagggtgtattatgtgcagttatttaaatatatgtattccattgttgcgtggtttttttcccccctcaagacagagatttgctcttgttgcccagggtggagtacaatggtgtgaccttggctcactgcaacctctgcctcctgggttcaggtgattctcctgcctcagccttccgagtagctgggattacaggtgtgcgccaccacacccggctaatttttgctttttttttttttgagacagaatctcgctctgttgctcaggctggagtggagtgcagtggcacaatctcagctcactgcagcctctgcctcccgggttcaagagattctcctgactcaacctcctgagtagctgggattacaggtgcctgccactatgcctagctaatttttgtatttttagtagagacggggttttgccatgttggccagggtggtctcgaactcctgacctcaagtgatccacccgcatcggccccccaaagtgctgggattataggcgtgaaccaccgcgcctgtcccattgttgtgtaattttaataattagttttttaagtacttgattttatgggcacatttttgtgggatgattggagttaatcaaataaagcttgtcatgtgtgtagtttggtaagataacttctttaaattcatgttttctctgccttgaggtagtgagggaaagatcttaatcagtattttggtaattaactgattgaattcaagcaaatgagacatcatgaacttcagtggttattgatatttcagggtatatacctgaaatgcctagaggatacagatttctcatttcattctttggtctttcatttctctatatacagaaatgaaatgacacttctgggaggcagtagaagcaggaagtcaatgaattgagtagagggtcccattccctcaggctgtcattgatcagtgacaatttataaaaacaaactgcaaagtctgtggcaagtggctgcctgcttcctagaaggagcccatgaaggttaaactctgtggtcggtatttgcaagcgccgggcgtggtggctcacgcctgtaatcctagcaccttgggaggccaaggcaggcggatcacccgaggtcaggagtttgaggatttgcaagcaaaaggtcctctcctgagtctttcccagatacccagcagtgcagaggctagctgtggaaggttgcagtgggacaggaatgtattgtatgccttgccttacttgtcaccattgagatttccagagaaatgggcataacgtctcttaacaacaacagcagaaagcaaaatacattaacttaaggttgacaacaaaagattatcaagtaccatgttttccaaccaaccagttattcgtggtaataataaaataaaggtgggaaaatgttataatttttaaggaaactgtgtactttaaaaatcttctttatgaatatccaatgttactgtaatcctgctccattaaatgcagcattgttgtcaggtgctgcctcttgcttgggaacagcattgggcttttaaatgtctgcagaatctctgcgttcgaagggaattgagaatgaacttcctggtactgtaatgaaaataaggtctgctcaacacagtaaacgtttcctctcttctttaaaa

SEQ ID NO: 33751 - DNA, 10930 bp, Homo sapiens
  source 1..10930: mol_type = unassigned DNA
aattgctttgcgaggctgggtgttgagtcgagccgcgggaaaggcgcgtgtcggcctctcactggcgcagcctgcactgccgctgccgcctcgccccgccctgccctggcgttgtctctggcactgtggcggactgaccacggcccgggcatgggctgcaagggagacgcgagcggtgcgtgtgccgcgggtgcgctgccggtgacaggtacccaggggtggcgtgaggaggcctcgtggacaaagagagggtttggggcacaaggcgaccctgtgcccctgtcacattgagcttccgcctctaccgtgactcagtttaccctctggtgtcctatcccttcccctattcgcgagcgccccgagttgccctcagtggtcttcttggcaaggagtttgctataaaatgggagttctggttgtactcactgttctgtggctgttctcctcagtaaaggccgactcaaaagccattacaacctctcttacaacaaaatggttttccactccattgttgttagaagccagtgagtttttagcagaagacagtcaagagaaattttggaattttgtagaagccagtcaaaatattggatcatcagatcatgacggtaccgattattcctactatcatgcaatattggaggctgcatttcagtttctgtcacccctccagcagaatttgtttaaattttgtctgtcccttcgttcttactcagctacaatccaagccttccagcagatagcagctgatgaacctccaccagaaggatgtaattcgtttttttcagtgcatggaaagaagacttgtgaatctgatacccttgaggctcttctactgacagcctctgaaagacccaaacctttattgttcaaaggagatcacagatatccctcgtctaatcctgaaagccctgtggtgattttctactctgagattggctctgaggaattttccaattttcaccgccagcttatatcaaaaagcaatgcaggcaaaatcaattatgtattcagacattatatatttaatcccaggaaggagcctgtttacctctctggctatggcgtggaattggccattaagagcactgagtacaaggccaaggatgatactcaggtgaaaggaactgaggtaaacaccacagtgattggtgaaaatgatcctattgatgaggttcaggggttcctctttggaaaattaagagatctgcaccccgacctggagggacagttgaaagaactcagaaagcatcttgtagagagcaccaatgaaatggcacctttaaaggtttggcagttgcaagatctcagtttccagactgctgctcgaatcttggcttctcctgttgagttggctttggttgtcatgaaggatcttagtcagaattttcctaccaaagccagagcaataacaaaaacagctgtgagctcagaacttagaaccgaagtggaagagaatcagaagtatttcaagggaactttaggattacaacctggagattcagccctcttcatcaatggacttcacatggatttagatacacaggatatattcagtctgtttgatgtgttgaggaatgaagctcgggtaatggagggtctgcatagattgggaatagaaggcctttctctgcataatgttttgaagctgaacatccagccctctgaggcagactatgccgtagacatccggagtcctgctatttcatgggtcaacaacctggaggttgatagcagatataattcgtggccttctagtttacaagagttgcttcgacccacctttcctggtgttattcggcagatcaggaaaaacttacataatatggttttcatagttgatcctgcacatgagaccacagcagagttgatgaacacagctgagatgttccttagtaatcatataccactaagaattggttttatctttgtggttaatgactctgaagatgttgatgggatgcaagatgctggagtggctgttcttagagcatataattatgttgcccaagaagtggatgattatcatgccttccagactctgacacatatctataacaaggtgaggactggagaaaaagtgaaagttgaacatgtggtcagtgtcctggagaagaaatatccgtatgtagaagtgaatagcattttggggattgattctgcttatgatcggaatcggaaggaagcaagaggctactatgagcagactggagttggacctctgcccgttgtgctgttcaatggaatgccctttgaaagggaacagctagaccctgatgagttagaaaccatcacaatgcataaaatcctggagaccaccaccttcttccaaagagcggtgtacttgggtgaactgccccatgatcaagatgtggtagagtatatcatgaatcagccaaatgttgttccacgaatcaattctaggattttgacagctgaacgagactacctggatttaacagcgagtaataacttctttgtggatgattatgctagatttactatcttggattcccaaggcaagactgctgctgtagccaatagtatgaactatctgacaaagaaaggaatgtcctccaaggaaatctatgatgattcttttattaggccagtaactttttggattgttggggattttgatagcccttctggacggcagttactgtatgatgccatcaaacatcagaaatccagtaacaatgttagaataagcatgatcaataatcctgccaaagagataagctatgagaacactcagatctccagagcaatctgggcagctctccaaactcagacttccaacgctgctaagaacttcatcaccaaaatggccaaggagggggctgcagaggccctggctgcaggagctgacattgcggagttctctgttgggggaatggatttcagtctttttaaagaggtctttgagtcttccaaaatggatttcattttgtctcatgccgtgtactgcagggatgttctgaagctgaagaagggacagagggcagtgatcagcaatggaaggatcattgggccactggaggatagtgagctctttaatcaagacgatttccacctcctcgaaaatatcatcttaaaaacctcaggacagaaaataaaatctcatattcaacagcttcgggtagaagaagatgtggcaagcgacttggtaatgaaggtggatgctcttctgtcagcgcaaccaaaaggagatccaagaatcgagtaccagttttttgaagacagacacagtgcaatcaaactgaggccgaaggaaggggagacatactttgatgttgtggctgtcgttgaccctgtcaccagagaagcacagagacttgctcctttgctcttggttttggctcagctgataaacatgaatctgagagtatttatgaactgccaatccaaactttctgacatgcctttaaaaagcttttaccgttatgtcttagaaccagagatttctttcacttcagacaatagttttgctaagggtccaatcgcaaaatttttggatatgcctcagtctccactgttcactctgaatttgaacacacctgagagctggatggtagaatctgtcagaacaccatatgatcttgataatatttatttagaagaggtggacagtgtagtggctgctgagtatgagctggaatacctgttactggaaggtcattgctacgacatcaccacaggccagcctccacggggactacagtttaccttaggaacttcagccaacccggtcattgtggacaccattgttatggccaatctgggctactttcagctgaaagccaacccaggagcttggatcctcagacttaggaagggacgctctgaagatatttatagaatttacagccacgatggcactgattctccccctgatgctgatgaggtggttatcgtcctcaacaacttcaaaagcaaaattattaaagtgaaggttcagaagaaggcagatatggtgaacgaagacttgctgagtgatggaacgagtgagaatgaatctggattttgggattccttcaaatggggctttacaggacagaagactgaggaagtgaagcaagataaagatgacataattaatattttctccgttgcatctggtcatctctacgaaagatttcttcgcataatgatgctatccgtgctgaagaataccaagactcctgtgaaattctggttcttgaagaattacttgtcccccacatttaaggagtttataccttacatggcaaatgaatacaatttccagtatgagcttgttcagtacaaatggccccggtggcttcatcaacaaactgaaaaacagcgtatcatctggggttacaagatcctcttcctggatgtacttttcccactagttgttgacaagttcctgtttgtggatgctgatcagattgtacgaacagatctgaaagagttaagagatttcaatttggatggtgctccttatggttacactcctttctgtgacagccgaagagaaatggacggctacaggttctggaagtcagggtactgggccagtcatttagccgggcgaaagtatcatatcagtgcactatatgttgtggatctgaagaagtttaggaaaatagctgctggtgacagactcaggggacagtaccaaggtctgagtcaggaccctaacagcctttcaaatcttgatcaagatctgcccaataacatgattcatcaggtgccaattaaatccctccctcaagaatggctttggtgtgaaacgtggtgtgatgacgcctctaagaaaagggcaaaaaccattgatttgtgtaataatccgatgaccaaagagccgaaactggaagcagctgtgcggattgtcccggagtggcaggactacgaccaagagatcaaacagctacagatccgctttcagaaggagaaagaaacgggagcactgtacaaagagaagacaaaagaaccaagccgagaaggtcctcagaaacgtgaagaattatgatctctggagaaggacaggaaatcaccccatttgaaaaacagtttttataataaatgctagttttttctgatctgtctatacaactgctgataagccggctgggcaggagtgccacaccttttgattctgagcatttgattctgacttctgtactctggtggccactggatctttgggattaaagctctgttggatttgtacctcagaggaagaccaagtggctgatcctttggactctgtaaagagcattcttctagtcagagggtggaatggcagcagcaactggaagaaaatgagttttttggtgcccacacccaagagcacacacatgctgcactgtctcggaaagcagggccagctagagccaccatgttcttccttacctcagtttacctgcggcctgcgctgcactgcagatgcccaccctgccctgggtctggccggcggaagctctgtccaaggtccacacacctccaggtttacgccaacatccttgtgccctccccaccttctcttccaacgcattaggtgcattgtttaattgaaatccaaccaacaattgtgtgtcaaggctggtttggtgcagtggctgggcaaattaattttgggccaggatgggggtgggttgcagtgagggtagggaaaatgtcaggagtaggaaggttcgggggttaagggaagggaaggaagaccagaactggccatcctcttttataatccattagtagcaccatggctcatttgaaatgaaaatattacacttattccccacccaaccgcagtgaactttctaggtaattgttttgaaaacaatttttgtatctgtgaaagtctttgctttttctttccaccttctagaaaagtctgctaccagtttccttactgaatacagccatactcagcccctctcgcatccagcccgtcagggtcagggtcagggtcaggctccctcaagacgagcaccgcattgtctgccctcttttgcgtaggatttttctctcagacccaggggacattgccttggacttttctctacaaatgccctcagatgtaagaccagaaatgattctgcttgtggaactcgtggctttctgtcctattttccttttatgtgagccctgcaggttgcctttggcgcccacaccagttctgtcttcatgtcgctgcatcgtgaagccccatttgcctttagtccctgctttgtgtgtcttcacttccacagccagtgttgcccctcagggcatactttgctggtgaacgggctgtagagtcttgagtatgttattggcctaagtgggcatgaggccccagcatccgactccatctgccaggctgcagggcacagcagcactggcatagacaggcacgctctgtcttccaacgtgcaccagccttttcttacatattttgcctgtttttaaaaaatacgaggagagggtgcagatggatactgtgccctcaccctcctaagccaggtaatatattgatgtgcagacttttaagaaatcttagtcttatcacaaatatcaagtaatttattttttccattttcaaatgcaaaagttagcctaggaagcctcccagtcatcctgaaggaccttttgactttgcttttataattctgttaaaaattgaggaggggattaatgagtacaatgaaaacaaaacaaaacaaaaaattaagaagaggaaagctcaaaagaggataagagactgaaaaggcacctcagaatggctgctgtgggcagagtctgtgacatgactttccccgccctgcccctctgttcagagcagctggaaagatgggatcagtaagattaaaaaacttttgttcggccaggcgtggtggctcacacctgtaatcccagcactttgggaggctgaggcggacggatcatgaggtcaggagttcaagaccagcctggccaatatggtgaaaccccgtctctactaaaaatacaaaaattagccgggtgttgtggctcaccctctattcccagctactcgggaggcagagacaggagaatcgcctgaacccaggaggcagaggttgcagtgagctgagatcgtgccactgcactccagcctgggtgacagagcgagactccatctcagaaaacaaacaaacaaaaagaaacttttgttcaagctgcatcttcacattgaatgaaagcattcagacgggtgactgctgctgtccacaactgtgggcggaagtgtgccttttcccagtttctcgtccaggaggttgcatagcaaatactcaagtcactgggatatatgctttccaaatgctggcccccatagcacctttccccatgtctttctaccaagcctcttatgtttaatctgtgcagggaagacaagagtagaccatattctctgtgtgctgtgcatgtcctggtgtcactcattgcctcttatctgtcgccattctaatataagtcagcttaatagttgactctgaataatgcaaaacccagcttgcttccagaatggcctaggaccctcctcctcctgccagtttttttttttttttttggttcatgtggcataatcatctttcaaaattaaccaaatgccccagaaaatgatgttaccactaaaatattttctccaagaaggcatactgtaacagaaaagataggtaagatatttttttcccaagaagtaagaattgattgtgctgaatgttcaaactctggaaactgttcacagtatgttgttcttagctgttatttatataaagtgaattattttctctctcaatcatgccatagtggagacttttgtttgtgagtaagtgacagagtaatatgaaataatgtgatatgtcagagtgacatgcagcatcctgagcctgtttttatgttctgtgtacagtggcatttgattgagatcaaagcctgtcacagcctgctgctgggggtgtggggatatgccagagtcctgtgtttggttttagaagtttactgaatgtttcccacatggagaataatggatggcatgttagtttctttaagagtggtaaagttgtacatctgtcattgttgcatttcgaattgaacacatagatgcttgcctgtctgcttgggtgaatgcctcttgggagagcgaagattacgtgcatgatgtatgttaagaaacagtttccggtcaggcacagtggcttacacctgtaatcccagcactttgggaagccgaggcgggcggattatgaggtcaagagatagagaccatcctggccaacacggtgaaaccccgtctctactaaaaatacaaaaattagctgggcatggtggcacacacctgtagtcccagctactcgggaggctgaggcaggagaatcacttgaacccgggaggtggaggttgcagtgagccgagatcatgccactgcactccagcctggcaatagagcgagactccgtctcaaaaaaaaaaaaaaaaaaaaaaaaaaaattaaaacagtttccataaatggagcttaatttgctctgctgtccttaagccctcgtgggtttttttttaagagagtctcattctgtcacccaggctggagtgcagtggtgcgatcttggctcacttcaacctctgcctcccaagttcaaacaattctcctgcctcagcctcctgagtagctgggattacaggcgcctgccaccatgcctggttaatttttgtatttttagtagagatggggttttaccatgttggttggccaggctgatctcaaactcctgacctcaggtggtgatctgcccacctcggcctcccaaagtgctgggattacaggcgtgagccactatgtccggtcaagccctcgtgttctgaaccttgtcaaggctctgcctgaatgagttttcatctgattgtggggaccaagtccctgagtagagggccaagagctagggacagggggaagagactggcccaggtggtagggaggaaagaactcccagagtttcctttagccaggaaacctgctctactgaccccgtgacttggacagtcagacatcaccctgagagtgacaagtgtaaaatgactcccttcctcccccgccctccggaagtatatttagatacttgaaagcagtccttttctaaaatggccttacctatgtggcctgaacgattaaaagaaagaactcagagttacaagggaaaaagaaaaagagttacaagggaattgtagtctttttctgaatagaatattagtactgtggtattgcatttcatgggaatggaaatgtattggtaaagctacctgatggaagctttctcttggtaacaaaaatggagggtgtattatgtgcagttatttaaatatatgtattccattgttgcgtggtttttttcccccctcaagacagagatttgctcttgttgcccagggtggagtacaatggtgtgaccttggctcactgcaacctctgcctcctgggttcaggtgattctcctgcctcagccttccgagtagctgggattacaggtgtgcgccaccacacccggctaatttttgctttttttttttttgagacagaatctcgctctgttgctcaggctggagtggagtgcagtggcacaatctcagctcactgcagcctctgcctcccgggttcaagagattctcctgactcaacctcctgagtagctgggattacaggtgcctgccactatgcctagctaatttttgtatttttagtagagacggggttttgccatgttggccagggtggtctcgaactcctgacctcaagtgatccacccgcatcggccccccaaagtgctgggattataggcgtgaaccaccgcgcctgtcccattgttgtgtaattttaataattagttttttaagtacttgattttatgggcacatttttgtgggatgattggagttaatcaaataaagcttgtcatgtgtgtagtttggtaagataacttctttaaattcatgttttctctgccttgaggtagtgagggaaagatcttaatcagtattttggtaattaactgattgaattcaagcaaatgagacatcatgaacttcagtggttattgatatttcagggtatatacctgaaatgcctagaggatacagatttctcatttcattctttggtctttcatttctctatatacagaaatgaaatgacacttctgggaggcagtagaagcaggaagtcaatgaattgagtagagggtcccattccctcaggctgtcattgatcagtgacaatttataaaaacaaactgcaaagtctgtggcaagtggctgcctgcttcctagaaggagcccatgaaggttaaactctgtggtcggtatttgcaagcgccgggcgtggtggctcacgcctgtaatcctagcaccttgggaggccaaggcaggcggatcacccgaggtcaggagtttgaggatttgcaagcaaaaggtcctctcctgagtctttcccagatacccagcagtgcagaggctagctgtggaaggttgcagtgggacaggaatgtattgtatgccttgccttacttgtcaccattgagatttccagagaaatgggcataacgtctcttaacaacaacagcagaaagcaaaatacattaacttaaggttgacaacaaaagattatcaagtaccatgttttccaaccaaccagttattcgtggtaataataaaataaaggtgggaaaatgttataatttttaaggaaactgtgtactttaaaaatcttctttatgaatatccaatgttactgtaatcctgctccattaaatgcagcattgttgtcaggtgctgcctcttgcttgggaacagcattgggcttttaaatgtctgcagaatctctgcgttcgaagggaattgagaatgaacttcctggtactgtaatgaaaataaggtctgctcaacacagtaaacgtttcctctcttcttt

SEQ ID NO: 33752 - DNA, 2240 bp, Homo sapiens
  source 1..2240: mol_type = unassigned DNA
agcgggaagagccggccgaagcgtggcggccacagactgtgggtaccgggtccgagggactcgcgcttttctctccgtgccatggcgccagcgaaagccacgaacgtggtgcggctgctactaggctccacagcgctgtggctttcgcagctcggctccgggacggtcgccgcgtccaagtcggtgactgcccacttggccgcgaagtggcccgagaccccgctgctgctggaggcaagtgaatttatggcagaagaaagtaatgaaaaattttggcagtttttggaaactgtgcaagaattagcaatttataagcaaacagaatcagattattcttattacaacttaatcctgaagaaagctggacagtttctagacaatttacacatcaaccttttaaagtttgctttctctataagggcatactccccagctattcagatgtttcagcagattgcagctgatgagccaccaccagatggttgtaatgcatttgtggttattcataagaagcacacctgtaaaattaatgagattaaaaagctgctgaagaaagctgcttcaaggactagaccttatctatttaaaggagatcacaaatttcctacaaacaaagagaacttaccagtggtgattctctatgccgaaatgggtactagaacatttagtgcatttcacaaagtattgtctgaaaaagctcaaaatgaggaaattctgtatgttcttcgccattatattcagaaaccaagctcacggaaaatgtacttatctgggtatggtgtggagctagcaattaagagtacagaatacaaagcactggatgatacccaagttaaaactgtgactaatactactgtagaggatgagactgaaacaaatgaagttcaaggatttctctttgggaaactaaagcttgtctattgactattgaaaatacgtgttttcaatgagacaccatctcacaccagttagaatgacaatcattaaaaaggaaacgacagatgctggaggggatgtggagaaataggaaggcttttacactgttggtgtgtgtgtagatgagttcaaccgttgtggaagacagtgtggcaattcctcaaggatctagaaccagaaataccatttgacccagcaatgcccattactgggtgtatacccaaaggattataaatcattctactataaagacacatgcacacgtatgttgattgtagcactattcacaatagcaaagacttcgaaccaacccaaatgtccatcaatgatagactggataaagaaaatgtggcacatatacaccatagaatactctgcatccataaaaaaggataagttcatgtcctttgcagggacatggatgaagctggaaactatcattctcagcaaactaacacaggaacagaaaaccaaacaccacatgttcttactcaaaagtgggactcgaacagtgagaacacatggacacagggaggggaatatcacacaccgtggcttgtcgggggtggggagctaggagagggatagcattaggagaaatacctaatgtggataacgggttgatgggtgcagcagaccaccatgacacgtgtatacctgtgtaacaaacctgcacgttctacacatgtatcccagaacttaaagtataataaaatgaaaatatgtattttgtaagttgtgctgatagtaacttttttaaattgtatttctccatttaaatctgaaatggcaccatgtcttgatttcatgagtgatagaggaaagaagattacagtttagattgtgtgtatagtaaaataccattctactacatcattatttggctctctaaaagatgcctagagatgtttaacaatgggtaaaattatcttattttagttttttataagaatcaaagatggaacttttcagaaataaactctgattgtatgaggcatttttgactttccttatagtttttattttcaattataaaagcaaggcttgcaatttataaaatgttaaacaaaaagtatgtaatatgaaaacataagtctgccctcatccttgcatcgcttacagttgacactaacaattgagagtatattcctccagattttgttttgtttcatatatttaataaaagagacctgtatatcttcctcattatttttaagttccgtgaatatagctgtatcacaatttatgattatcttaatgatgaatgattcatttatgtctaattacatggaatatgtaatttc

SEQ ID NO: 33753 - DNA, 1233 bp, Homo sapiens
  source 1..1233: mol_type = unassigned DNA
cgcgccggagcgggacacgcatgcgccggtctggacccggcacccagtaacggactcgagctcctcccaccggaagtgggcagccgcgcagcgggaagagccggccgaagcgtggcggccacagactgtgggtaccgggtccgagggactcgcgcttttctctccgtgccatggcgccagcgaaagccacgaacgtggtgcggctgctactaggctccacagcgctgtggctttcgcagctcggctccgggacggtcgccgcgtccaagtcggtgactgcccacttggccgcgaagtggcccgagaccccgctgctgctggaggcaagtgaatttatggcagaagaaagtaatgaaaaattttggcagtttttggaaactgtgcaagaattagcaatttataagcaaacagaatcagattattcttattacaacttaatcctgaagaaagctggacagtttctagacaatttacacatcaaccttttaaagtttgctttctctataagggcatactccccagctattcagatgtttcagcagattgcagctgatgagccaccaccagatggttgtaatgcatttgtggttattcataagaagcacacctgtaaaattaatgagattaaaaagctgctgaagaaagctgcttcaaggactagaccttatctatttaaaggagatcacaaatttcctacaaacaaagagaacttaccagtggtgattctctatgccgaaatgggtactagaacatttagtgcatttcacaaagtattgtctgaaaaagctcaaaatgaggaaattctgtatgttcttcgccattatattcagaaaccaagctcacggaaaatgtacttatctgggtatggtgtggagctagcaattaagagtacagaatacaaagcactggatgatacccaagttaaaactgtgactaatactactgtagaggatgagactgaaacaaatgaagttcaaggatttctctttgggaaactaaaatcttagttttcaagcagcttctcaaataatgtccgctccagtttatgattccattaaattaatgaaagacatttcacagaacttccccataaaagccagatctctaaccagaattgctgtaaatcaacatatgagagaagaaataaaggaaaatcaaaagtatattccagaatttcttccgaggtagtatggttttcttcataggataaagaataaaggctgtgagttaatt

SEQ ID NO: 33754 - DNA, 1945 bp, Homo sapiens
  source 1..1945: mol_type = unassigned DNA
gggactcgcgcttttctctccgtgccatggcgccagcgaaagccacgaacgtggtgcggctgctactaggctccacagcgctgtggctttcgcagctcggctccgggacggtcgccgcgtccaagtcggtgactgcccacttggccgcgaagtggcccgagaccccgctgctgctggaggcaagtgaatttatggcagaagaaagtaatgaaaaattttggcagtttttggaaactgtgcaagaattagcaatttataagcaaacagaatcagattattcttattacaacttaatcctgaagaaagctggacagtttctagacaatttacacatcaaccttttaaagtttgctttctctataagggcatactccccagctattcagatgtttcagcagattgcagctgatgagccaccaccagatggttgtaatgcatttgtggttattcataagaagcacacctgtaaaattaatgagattaaaaagctgctgaagaaagctgcttcaaggactagaccttatctatttaaaggagatcacaaatttcctacaaacaaagagaacttaccagtggtgattctctatgccgaaatgggtactagaacatttagtgcatttcacaaagtattgtctgaaaaagctcaaaatgaggaaattctgtatgttcttcgccattatattcagaaaccaagctcacggaaaatgtacttatctgggtatggtgtggagctagcaattaagagtacagaatacaaagcactggatgatacccaagttaaagtgttccaagatccagaggcttttttttaagtcagttttctcaagtcagatgttaacaataaaagtatgggaacatttatcttccattaataagtttgttaaataatatagtgcacttatttttaatgacgttaaattatatagttttatttatacttgtgatttcatatttgttagcattttaatatttctcattaataagtatgttatagaagtagtatttagacatcttgcctattagtttataacaatttataggaagctttacctttttaatgttatttttttctctaaaacaaaactactttctcttgaacatattgtttgattttgtgtgtgtgtttttaggaagtaattcctcacatggctaaagagtatggattccgatatgaactagttcaatataggtggccccgttggcttcgtcaacagactgaaagacagaggattatttggggttacaaaattcttttccttgatgttcttttcccactagcagtggacaaaatcatttttgttgatgctgaccagattgtgagacatgatctaaaagaacttcgagatttcgatctggatggagctccttatgggtatactccattttgtgatagccgcagggaaatggatggatatcgtttctggaaaacaggatactgggcatcacatcttttaagacggaaataccatatcagtgctttatatgtagtggatctcaagaagttcaggagaattggagcaggtgacaggctcaggagccagtatcaagctctcagtcaagatccaaacagtctttcaaacctagatcaggatctccccaataatatgatttaccaagtcgccattaagtctcttcctcaagactggctgtggtgtgaaacctggtgtgatgatgaatccaaacaaagagccaaaacaattgatctgtgcaataatcccaaaacaaaagaatccaaactaaaagctgctgccagaattgtcccagaatgggtggagtatgatgctgagataagacaactattagatcatcttgaaaacaagaagcaagatacaattttgacacatgatgaactctagcactggtgtatatgagaaggaaggcgaaagcatgacaggaaacctgccgcctgctggggaagtctggagcccctgctgagacgatttgg

SEQ ID NO: 33755 - DNA, 4832 bp, Homo sapiens
  source 1..4832: mol_type = unassigned DNA
gccggccgaagcgtggcggccacagactgtgggtaccgggtccgagggactcgcgcttttctctccgtgccatggcgccagcgaaagccacgaacgtggtgcggctgctactaggctccacagcgctgtggctttcgcagctcggctccgggacggtcgccgcgtccaagtcggtgactgcccacttggccgcgaagtggcccgagaccccgctgctgctggaggcaagtgaatttatggcagaagaaagtaatgaaaaattttggcagtttttggaaactgtgcaagaattagcaatttataagcaaacagaatcagattattcttattacaacttaatcctgaagaaagctggacagtttctagacaatttacacatcaaccttttaaagtttgctttctctataagggcatactccccagctattcagatgtttcagcagattgcagctgatgagccaccaccagatggttgtaatgcatttgtggttattcataagaagcacacctgtaaaattaatgagattaaaaagctgctgaagaaagctgcttcaaggactagaccttatctatttaaaggagatcacaaatttcctacaaacaaagagaacttaccagtggtgattctctatgccgaaatgggtactagaacatttagtgcatttcacaaagtattgtctgaaaaagctcaaaatgaggaaattctgtatgttcttcgccattatattcagaaaccaagctcacggaaaatgtacttatctgggtatggtgtggagctagcaattaagagtacagaatacaaagcactggatgatacccaagttaaaactgtgactaatactactgtagaggatgagactgaaacaaatgaagttcaaggatttctctttgggaaactaaaagaaatatattcagatcttagagataatctgacagcattccaaaaatacctgattgagagtaacaaacaaatgatgcctttgaaagtctgggaactacaagatcttagttttcaagcagcttctcaaataatgtccgctccagtttatgattccattaaattaatgaaagacatttcacagaacttccccataaaagccagatctctaaccagaattgctgtaaatcaacatatgagagaagaaataaaggaaaatcaaaaggatcttcaagttagatttaaaattcagccaggcgatgctcgtctatttataaatggccttcgtgttgatatggatgtttatgacgcttttagtattttggatatgctgaaattagaaggaaaaatgatgaatggccttcgcaatcttgggatcaatggggaagatatgagcaaatttttaaaattaaattcacacatttgggaatatacttatgtattagatattcgacattcttctataatgtggattaatgacttagaaaatgatgatttgtatattacatggcctacaagttgccagaaacttctgaagccagtatttcctggaagtgtaccttccataaggcgcaattttcataatttggttctgtttattgatccggcccaagaatataccttggattttataaaacttgctgatgttttctattctcacgaagttcctcttagaattggttttgtgttcattcttaatacagatgatgaagttgatggagcaaatgatgctggagttgctctctggcgagctttcaactatattgcagaagaatttgatatatcagaagcatttatttctatagtacacatgtaccaaaaagtgaagaaggatcaaaatatactcactgtggacaatgtgaagagtgttctccaaaatacatttcctcatgctaatatttgggatattttgggaattcattctaaatatgatgaagaaagaaaggctggagcaagcttttataagatgactggcctgggtcctttgcctcaagctctttataatggtgaaccctttaaacatgaagagatgaatattaaagaactaaaaatggctgttcttcaaagaatgatggatgcatctgtatatttacaaagagaagtttttttgggcacattaaatgatcgcacgaatgcaattgattttctaatggataggaataatgttgtaccccgtataaatactttgattttgcgtactaaccagcagtacctcaatttaatatctacatcagtaactgctgatgttgaagatttctctactttctttttcttggattcacaagataagagtgctgtaattgcaaagaacatgtattatttaacccaagacgatgagagtataatttctgcagtcactctctggattattgcagattttgataagccttctgggagaaaacttctttttaatgcattaaagcacatgaaaacaagtgttcatagtcggttggggattatttataatcctacatcaaaaataaatgaagagaacacagctatttctagaggaattttggcagcttttcttacacagaagaacatgtttttgagaagctttcttgggcaactggcaaaggaagaaattgctacagctatttactctggagataaaattaaaacattccttattgaggggatggataagaatgcttttgagaaaaaatataatactgttggagtgaatatttttcgaactcaccagttgttctgtcaagatgtacttaaattacgtcctggagaaatgggtattgtcagcaatgggagattcttaggacctttagatgaagatttttatgcagaagatttttacttgttggaaaagataacatttagtaatttaggagagaaaattaaaggcattgttgaaaatatgggaatcaacgcaaataacatgagtgactttattatgaaagttgatgcccttatgtcctctgtgcctaagcgtgcatctcgatatgatgtcacatttcttagggagaatcacagtgttataaagacgaatcctcaagagaatgatatgttcttcaatgtcattgctattgttgatccattaacaagagaagcacagaaaatggcacagttgttggttgtacttggcaagattatcaacatgaagataaagttgttcatgaactgtaggggcaggctttcagaagcccctttagaaagcttttaccgttttgttctggaaccagaactgatgtcaggggctaatgacgtttcttctcttggaccagtggcaaaatttttggatattcctgaatcacccctcctaatcctcaacatgattactccagaaggctggttggttgaaacagtgcacagcaactgtgaccttgataatattcacttaaaggatactgagaaaactgttacagcagaatatgaactagaatacttactactggaaggacaatgctttgataaagtgacagaacagcctcctcggggtctgcagttcacactaggcacaaaaaataaacctgctgtggttgatacaatagtgatggcacatcatgggtattttcaattaaaagcaaacccaggtgcttggatactgaggttacaccaaggaaaatctgaagatatttatcaaatagttgggcatgaaggaactgactctcaagcagacctagaagatatcattgttgtattaaacagcttcaaaagcaagatactcaaagtaaaagtgaaaaaagaaacagacaaaattaaggaagatatccttaccgatgaagatgaaaaaacaaaaggactgtgggattccattaaaagtttcacagtaagcttgcataaagaaaacaaaaaggaaaaagatgtcctaaacattttttcagttgcttctggtcatttatatgaacgttttttaagaattatgatgctttctgttttgcgtaacaccaaaacaccagtgaaattctggttgctaaaaaattatctctcaccgacatttaaagaagtaattcctcacatggctaaagagtatggattccgatatgaactagttcaatataggtggccccgttggcttcgtcaacagactgaaagacagaggattatttggggttacaaaattcttttccttgatgttcttttcccactagcagtggacaaaatcatttttgttgatgctgaccagattgtgagacatgatctaaaagaacttcgagatttcgatctggatggagctccttatgggtatactccattttgtgatagccgcagggaaatggatggatatcgtttctggaaaacaggatactgggcatcacatcttttaagacggaaataccatatcagtgctttatatgtagtggatctcaagaagttcaggagaattggagcaggtgacaggctcaggagccagtatcaagctctcagtcaagatccaaacagtctttcaaacctagatcaggatctccccaataatatgatttaccaagtcgccattaagtctcttcctcaagactggctgtggtgtgaaacctggtgtgatgatgaatccaaacaaagagccaaaacaattgatctgtgcaataatcccaaaacaaaagaatccaaactaaaagctgctgccagaattgtcccagaatgggtggagtatgatgctgagataagacaactattagatcatcttgaaaacaagaagcaagatacaattttgacacatgatgaactctagcactggtgtatatgagaaggaaggcgaaagcatgacaggaaacctgccgcctgctggggaagtctggagcccctgctgagacgatttggaagtctcgttaagatcagtgacatattctttaattttaaaaaattgtaattatttaaaacagttatttaatgtattgaatgagtttaagttatataataaatgaccattgagtatttaaaa

SEQ ID NO: 33756 - DNA, 1547 bp, Homo sapiens
  source 1..1547: mol_type = unassigned DNA
gccgcgcagcgggaagagccggccgaagcgtggcggccacagactgtgggtaccgggtccgagggactcgcgcttttctctccgtgccatggcgccagcgaaagccacgaacgtggtgcggctgctactaggctccacagcgctgtggctttcgcagctcggctccgggacggtcgccgcgtccaagtcggtgactgcccacttggccgcgaagtggcccgagaccccgctgctgctggaggcaagtgaatttatggcagaagaaagtaatgaaaaattttggcagtttttggaaactgtgcaagaattagcaatttataagcaaacagaatcagattattcttattacaacttaatcctgaagaaagctggacagtttctagacaatttacacatcaaccttttaaagtttgctttctctataagggcatactccccagctattcagatgtttcagcagattgcagctgatgagccaccaccagatggttgtaatgcatttgtggttattcataagaagcacacctgtaaaattaatgagattaaaaagctgctgaagaaagctgcttcaaggactagaccttatctatttaaaggagatcacaaatttcctacaaacaaagagaacttaccagtggtgattctctatgccgaaatgggtactagaacatttagtgcatttcacaaagtattgtctgaaaaagctcaaaatgaggaaattctgtatgttcttcgccattatattcagaaaccaagctcacggaaaatgtacttatctgggtatggtgtggagctagcaattaagagtacagaatacaaagcactggatgatacccaagttaaaactgtgactaatactactgtagaggatgagactgaaacaaatgaagttcaaggatttctctttgggaaactaaaagaaatatattcagatcttagagataatctgacagcattccaaaaatacctgattgagagtaacaaacaaatgatgcctttgaaagtctgggaactacaagatcttagttttcaagcagcttctcaaataatgtccgctccagtttatgattccattaaattaatgaaagacatttcacagaacttccccataaaagccagattaagaatgaatatattgatatgcctctttcagtcaactttaaatgtcaagaatttgagaagtcgtcatttatataataaaacatgaaatatatatgggtgtgtataaatgtcatatctgtttagccataatattttaattaatggccgttataaaaattattagatcaaatacaaataaagtaaaataactttagtcttgatcagacagttgattagctctattgatgctaagtcagtataactgttcagaggttctgatgcaaaactctgctgttaatctgtaattaagaaaaaattataaaatatgctaacattgcttaatggctaaattgtaggcttgagcatatctctaaaaccacttggtagacaatctgtaaatgtttgttgaaatgaaatatttgctaaataaatgaaaaatttgcctt

SEQ ID NO: 33757 - DNA, 2338 bp, Homo sapiens
  source 1..2338: mol_type = unassigned DNA
ggttttcgggggaggcgtttggggcctggacggcggcgcggggagggggcagctaggggcgcggcctgccagtgcctcctgcagtacagccctggagggcgtggggacttgggggcggtgaaatagccgctgtaggtccgcctctttcattgaagaaatttaagttcgtgtggttttaccttttccgggagtctccagctggccctcatttgtgtccggagctcaggagttcccaaaccgactcagtcgcaccaagtttccgtcttttggaattggggaaggagtttctttctttcttttcttttttcttgagccagttttaatcgctttgaataaatactcccttaagtagttaaatataggaggagaaagaatacatcggttgttaaagcaggagaggaagagagacctgccctgtagcgtgactcctctagaaaaaaaaaaaaaaagccggagtattttactaagcccctaaaatgtcgagatttgtacaagatcttagcaaagcaatgtctcaagatggtgcttctcagttccaagaagtcattcggcaagagctagaattatctgtgaagaaggaactagaaaaaatactcaccacagcatcatcacatgaatttgagcacaccaaaaaagacctggatggatttcggaagctatttcatagatttttgcaagaaaaggggccttctgtggattggggaaaaatccagagaccccctgaagattcgattcaaccctatgaaaagataaaggccaggggcttgcctgataatatatcttccgtgttgaacaaactagtggtggtgaaactcaatggtggtttgggaaccagcatgggctgcaaaggccctaaaagtctgattggtgtgaggaatgagaatacctttctggatctgactgttcagcaaattgaacatttgaataaaacctacaatacagatgttcctcttgttttaatgaactcttttaacacggatgaagataccaaaaaaatactacagaagtacaatcattgtcgtgtgaaaatctacactttcaatcaaagcaggtacccgaggattaataaagaatctttacttcctgtagcaaaggacgtgtcttactcaggggaaaatacagaagcttggtaccctccaggtcatggtgatatttacgccagtttctacaactctggattgcttgatacctttataggagaaggcaaagagtatatttttgtgtctaacatagataatctgggtgccacagtggatctgtatattcttaatcatctaatgaacccacccaatggaaaacgctgtgaatttgtcatggaagtcacaaataaaacacgtgcagatgtaaagggcgggacactcactcaatatgaaggcaaactgagactggtggaaattgctcaagtgccaaaagcacatgtagacgagttcaagtctgtatcaaagttcaaaatatttaatacaaacaacctatggatttctcttgcagcagttaaaagactgcaggagcaaaatgccattgacatggaaatcattgtgaatgcaaagactttggatggaggcctgaatgtcattcaattagaaactgcagtaggggctgccatcaaaagttttgagaattctctaggtattaatgtgccaaggagccgttttctgcctgtcaaaaccacatcagatctcttgctggtgatgtcaaacctctatagtcttaatgcaggatctctgacaatgagtgaaaagcgggaatttcctacagtgcccttggttaaattaggcagttcttttacgaaggttcaagattatctaagaagatttgaaagtataccagatatgcttgaattggatcacctcacagtttcaggagatgtgacatttggaaaaaatgtttcattaaagggaacggttatcatcattgcaaatcatggtgacagaattgatatcccacctggagcagtattagagaacaagattgtgtctggaaaccttcgcatcttggaccactgaaatgaaaaatactgtggacacttaaataatgggctagtttcttacaatgaaatgttctctaggattctaaaataggcaggtactttactatgttactgtaccctgcagtgttgatttttaaaatagagttttctgcagtatgcttttagtctaagaaaagcacagatggagcaatactttccttctttgaagagaatcccaaaagttagttcatcttaaagtgcaatattgtttaatcttaaaactgggcaactttggaagaacttttaacagaagcctcaatgatgatcactttgaattgcttgtgatttcaaaaataaagcagtgaagcaata

SEQ ID NO: 33758 - DNA, 2136 bp, Homo sapiens
  source 1..2136: mol_type = unassigned DNA
ctgtcggtccgtgcggcagggacatttccgcattgaaggggctgctccgaatggagggggaggggaggtgtttaggagaaagtaggggctgtgggtgtcgggagccggctgacgggtggacaagggggggttagcagctgggctgcgaccgttagggaggggctcaaggtgtgcatgtgtgagggaagagagagagagagaagggcgcctcagaggtgactttcagcctgcgagccttcttcccggggcgccataaacgcccccaatttcccagctgctaaaggaagaggaagatcttagcaaagcaatgtctcaagatggtgcttctcagttccaagaagtcattcggcaagagctagaattatctgtgaagaaggaactagaaaaaatactcaccacagcatcatcacatgaatttgagcacaccaaaaaagacctggatggatttcggaagctatttcatagatttttgcaagaaaaggggccttctgtggattggggaaaaatccagagaccccctgaagattcgattcaaccctatgaaaagataaaggccaggggcttgcctgataatatatcttccgtgttgaacaaactagtggtggtgaaactcaatggtggtttgggaaccagcatgggctgcaaaggccctaaaagtctgattggtgtgaggaatgagaatacctttctggatctgactgttcagcaaattgaacatttgaataaaacctacaatacagatgttcctcttgttttaatgaactcttttaacacggatgaagataccaaaaaaatactacagaagtacaatcattgtcgtgtgaaaatctacactttcaatcaaagcaggtacccgaggattaataaagaatctttacttcctgtagcaaaggacgtgtcttactcaggggaaaatacagaagcttggtaccctccaggtcatggtgatatttacgccagtttctacaactctggattgcttgatacctttataggagaaggcaaagagtatatttttgtgtctaacatagataatctgggtgccacagtggatctgtatattcttaatcatctaatgaacccacccaatggaaaacgctgtgaatttgtcatggaagtcacaaataaaacacgtgcagatgtaaagggcgggacactcactcaatatgaaggcaaactgagactggtggaaattgctcaagtgccaaaagcacatgtagacgagttcaagtctgtatcaaagttcaaaatatttaatacaaacaacctatggatttctcttgcagcagttaaaagactgcaggagcaaaatgccattgacatggaaatcattgtgaatgcaaagactttggatggaggcctgaatgtcattcaattagaaactgcagtaggggctgccatcaaaagttttgagaattctctaggtattaatgtgccaaggagccgttttctgcctgtcaaaaccacatcagatctcttgctggtgatgtcaaacctctatagtcttaatgcaggatctctgacaatgagtgaaaagcgggaatttcctacagtgcccttggttaaattaggcagttcttttacgaaggttcaagattatctaagaagatttgaaagtataccagatatgcttgaattggatcacctcacagtttcaggagatgtgacatttggaaaaaatgtttcattaaagggaacggttatcatcattgcaaatcatggtgacagaattgatatcccacctggagcagtattagagaacaagattgtgtctggaaaccttcgcatcttggaccactgaaatgaaaaatactgtggacacttaaataatgggctagtttcttacaatgaaatgttctctaggattctaaaataggcaggtactttactatgttactgtaccctgcagtgttgatttttaaaatagagttttctgcagtatgcttttagtctaagaaaagcacagatggagcaatactttccttctttgaagagaatcccaaaagttagttcatcttaaagtgcaatattgtttaatcttaaaactgggcaactttggaagaacttttaacagaagcctcaatgatgatcactttgaattgcttgtgatttcaaaaataaagcagtgaagcaata

SEQ ID NO: 33759 - DNA, 1955 bp, Homo sapiens
  source 1..1955: mol_type = unassigned DNA
cttttcgttgaattgtcatctgagctgccttgagctgctgggttgacgttccagacgcgtataatttatgctcctgtaccctgctgggtttagttttgcctccctgaaatcagatcttagcaaagcaatgtctcaagatggtgcttctcagttccaagaagtcattcggcaagagctagaattatctgtgaagaaggaactagaaaaaatactcaccacagcatcatcacatgaatttgagcacaccaaaaaagacctggatggatttcggaagctatttcatagatttttgcaagaaaaggggccttctgtggattggggaaaaatccagagaccccctgaagattcgattcaaccctatgaaaagataaaggccaggggcttgcctgataatatatcttccgtgttgaacaaactagtggtggtgaaactcaatggtggtttgggaaccagcatgggctgcaaaggccctaaaagtctgattggtgtgaggaatgagaatacctttctggatctgactgttcagcaaattgaacatttgaataaaacctacaatacagatgttcctcttgttttaatgaactcttttaacacggatgaagataccaaaaaaatactacagaagtacaatcattgtcgtgtgaaaatctacactttcaatcaaagcaggtacccgaggattaataaagaatctttacttcctgtagcaaaggacgtgtcttactcaggggaaaatacagaagcttggtaccctccaggtcatggtgatatttacgccagtttctacaactctggattgcttgatacctttataggagaaggcaaagagtatatttttgtgtctaacatagataatctgggtgccacagtggatctgtatattcttaatcatctaatgaacccacccaatggaaaacgctgtgaatttgtcatggaagtcacaaataaaacacgtgcagatgtaaagggcgggacactcactcaatatgaaggcaaactgagactggtggaaattgctcaagtgccaaaagcacatgtagacgagttcaagtctgtatcaaagttcaaaatatttaatacaaacaacctatggatttctcttgcagcagttaaaagactgcaggagcaaaatgccattgacatggaaatcattgtgaatgcaaagactttggatggaggcctgaatgtcattcaattagaaactgcagtaggggctgccatcaaaagttttgagaattctctaggtattaatgtgccaaggagccgttttctgcctgtcaaaaccacatcagatctcttgctggtgatgtcaaacctctatagtcttaatgcaggatctctgacaatgagtgaaaagcgggaatttcctacagtgcccttggttaaattaggcagttcttttacgaaggttcaagattatctaagaagatttgaaagtataccagatatgcttgaattggatcacctcacagtttcaggagatgtgacatttggaaaaaatgtttcattaaagggaacggttatcatcattgcaaatcatggtgacagaattgatatcccacctggagcagtattagagaacaagattgtgtctggaaaccttcgcatcttggaccactgaaatgaaaaatactgtggacacttaaataatgggctagtttcttacaatgaaatgttctctaggattctaaaataggcaggtactttactatgttactgtaccctgcagtgttgatttttaaaatagagttttctgcagtatgcttttagtctaagaaaagcacagatggagcaatactttccttctttgaagagaatcccaaaagttagttcatcttaaagtgcaatattgtttaatcttaaaactgggcaactttggaagaacttttaacagaagcctcaatgatgatcactttgaattgcttgtgatttcaaaaataaagcagtgaagcaat

SEQ ID NO: 33760 - DNA, 2057 bp, Homo sapiens
  source 1..2057: mol_type = unassigned DNA
gcattgaaggggctgctccgaatggagggggaggggaggtgtttaggagaaagtaggggctgtgggtgtcgggagccggctgacgggtggacaagggggggttagcagctgggctgcgaccgttagggaggggctcaaggtgtgcatgtgtgagggaagagagagagagagaagggcgcctcagaggtgactttcagcctgcgagccttcttcccggggcgccataaacgcccccaatttcccagctgctaaaggaagaggaaggtacctgtgcgtgcacgcagacgggaagggctggggaagcgggaggactgagaaaagccggatcttagcaaagcaatgtctcaagatggtgcttctcagttccaagaagtcattcggcaagagctagaattatctgtgaagaaggaactagaaaaaatactcaccacagcatcatcacatgaatttgagcacaccaaaaaagacctggatggatttcggaagctatttcatagatttttgcaagaaaaggggccttctgtggattggggaaaaatccagagaccccctgaagattcgattcaaccctatgaaaagataaaggccaggggcttgcctgataatatatcttccgtgttgaacaaactagtggtggtgaaactcaatggtggtttgggaaccagcatgggctgcaaaggccctaaaagtctgattggtgtgaggaatgagaatacctttctggatctgactgttcagcaaattgaacatttgaataaaacctacaatacagatgttcctcttgttttaatgaactcttttaacacggatgaagataccaaaaaaatactacagaagtacaatcattgtcgtgtgaaaatctacactttcaatcaaagcaggtacccgaggattaataaagaatctttacttcctgtagcaaaggacgtgtcttactcaggggaaaatacagaagcttggtaccctccaggtcatggtgatatttacgccagtttctacaactctggattgcttgatacctttataggagaaggcaaagagtatatttttgtgtctaacatagataatctgggtgccacagtggatctgtatattcttaatcatctaatgaacccacccaatggaaaacgctgtgaatttgtcatggaagtcacaaataaaacacgtgcagatgtaaagggcgggacactcactcaatatgaaggcaaactgagactggtggaaattgctcaagtgccaaaagcacatgtagacgagttcaagtctgtatcaaagttcaaaatatttaatacaaacaacctatggatttctcttgcagcagttaaaagactgcaggagcaaaatgccattgacatggaaatcattgtgaatgcaaagactttggatggaggcctgaatgtcattcaattagaaactgcagtaggggctgccatcaaaagttttgagaattctctaggtattaatgtgccaaggagccgttttctgcctgtcaaaaccacatcagatctcttgctggtgatgtcaaacctctatagtcttaatgcaggatctctgacaatgagtgaaaagcgggaatttcctacagtgcccttggttaaattaggcagttcttttacgaaggttcaagattatctaagaagatttgaaagtataccagatatgcttgaattggatcacctcacagtttcaggagatgtgacatttggaaaaaatgtttcattaaagggaacggttatcatcattgcaaatcatggtgacagaattgatatcccacctggagcagtattagagaacaagattgtgtctggaaaccttcgcatcttggaccactgaaatgaaaaatactgtggacacttaaataatgggctagtttcttacaatgaaatgttctctaggattctaaaataggcaggtactttactatgttactgtaccctgcagtgttgatttttaaaatagagttttctgcagtatgcttttagtctaagaaaagcacagatggagcaatactttccttctttgaagagaatcccaaaagttagttcatcttaaagtgc

SEQ ID NO: 33761 - DNA, 558 bp, Homo sapiens
  source 1..558: mol_type = unassigned DNA
atttctcgagtttgatcctgtgtctgggattttttcaagtctgcctctgaaacttagacctgtgttgacagagagcacatgcaatattaaatatcttagcaaagcaatgtctcaagatggtgcttctcagttccaagaagtcattcggcaagagctagaattatctgtgaagaaggaactagaaaaaatactcaccacagcatcatcacatgaatttgagcacaccaaaaaagacctggatggatttcggaagctatttcatagatttttgcaagaaaaggggccttctgtggattggggaaaaatccagagaccccctgaagattcgattcaaccctatgaaaagataaaggccaggggcttgcctgataatatatcttccgtgttgaacaaactagtggtggtgaaactcaatggtggtttgggaaccagcatgggctgcaaaggccctaaaagtctgattggtgtgaggaatgagaatacctttctggatctgactgttcagcaaattgaacatttgaataaaacctacaatacagatgttcctcttgttttaat

SEQ ID NO: 33762 - DNA, 560 bp, Homo sapiens
  source 1..560: mol_type = unassigned DNA
gttagtagtaccgtcgctttcctggatagtggctatcttagcaaagcaatgtctcaagatggtgcttctcagttccaagaagtcattcggcaagagctagaattatctgtgaagaaggaactagaaaaaatactcaccacagcatcatcacatgaatttgagcacaccaaaaaagacctggatggatttcggaagctatttcatagatttttgcaagaaaaggggccttctgtggattggggaaaaatccagagaccccctgaagattcgattcaaccctatgaaaagataaaggccaggggcttgcctgataatatatcttccgtgttgaacaaactagtggtggtgaaactcaatggtggtttgggaaccagcatgggctgcaaaggccctaaaagtctgattggtgtgaggaatgagaatacctttctggatctgactgttcagcaaattgaacatttgaataaaacctacaatacagatgttcctcttgttttaatgaactcttttaacacggatgaagataccaaaaaaatactacagaagtacaatcattgtcg

SEQ ID NO: 33763 - DNA, 505 bp, Homo sapiens
  source 1..505: mol_type = unassigned DNA
agggggaggggaggtgtttaggagaaagtaggggctgtgggtgtcgggagccggctgacgggtggacaagggggggttagcagctgggctgcgaccgttagggaggggctcaaggtgtgcatgtgtgagggaagagagagagagagaagggcgcctcagaggtgactttcagcctgcgagccttcttcccggggcgccataaacgcccccaatttcccagctgctaaaggaagaggaaggtacctgtgcgtgcacgcagacgggaagggctggggaagcgggaggactgagaaaagccgggatctgcctctgtcacccaggctggagtgcggtggcgcgatctcgcctcactgcagcctctgcctcctcggctcaagatcttagcaaagcaatgtctcaagatggtgcttctcagttccaagaagtcattcggcaagagctagaattatctgtgaagaaggaactagaaaaaatactcaccacagcatcatcacatgaatttgag

SEQ ID NO: 33764 - DNA, 645 bp, Homo sapiens
  source 1..645: mol_type = unassigned DNA
gcattgaaggggctgctccgaatggagggggaggggaggtgtttaggagaaagtaggggctgtgggtgtcgggagccggctgacgggtggacaagggggggttagcagctgggctgcgaccgttagggaggggctcaaggtgtgcatgtgtgagggaagagagagagagagaagggcgcctcagaggtgactttcagcctgcgagccttcttcccggggcgccataaacgcccccaatttcccagctgctaaaggaagaggaagtctgcctctgaaacttagacctgtgttgacagagagcacatgcaatattaaatatcttagcaaagcaatgtctcaagatggtgcttctcagttccaagaagtcattcggcaagagctagaattatctgtgaagaaggaactagaaaaaatactcaccacagcatcatcacatgaatttgagcacaccaaaaaagacctggatggatttcggaagctatttcatagatttttgcaagaaaaggggccttctgtggattggggaaaaatccagagaccccctgaagattcgattcaaccctatgaaaagataaaggccaggggcttgcctgataatatatcttccgtgttgaacaaactagtggtggtgaaactcaatggtgg

SEQ ID NO: 33765 - DNA, 553 bp, Homo sapiens
  source 1..553: mol_type = unassigned DNA
ggcagggacatttccgcattgaaggggctgctccgaatggagggggaggggaggtgtttaggagaaagtaggggctgtgggtgtcgggagccggctgacgggtggacaagggggggttagcagctgggctgcgaccgttagggaggggctcaaggtgtgcatgtgtgagggaagagagagagagagaagggcgcctcagaggtgactttcagcctgcgagccttcttcccggggcgccataaacgcccccaatttcccagctgctaaaggaagaggaagtagttaaatataggaggagaaagaatacatcggttgttaaagcaggagaggaagagagacctgccctgtagcgtgactcctctagaaaaaaaaaaaaaaagccggagtattttactaagcccctaaaatgtcgagatttgtacaagatcttagcaaagcaatgtctcaagatggtgcttctcagttccaagaagtcattcggcaagagctagaattatctgtgaagaaggaactagaaaaaatactcaccacagcatcatcacatgaatttgag

SEQ ID NO: 33766 - DNA, 784 bp, Homo sapiens
  source 1..784: mol_type = unassigned DNA
ctccagctggccctcatttgtgtccggagctcaggagttcccaaaccgactcagtcgcaccaagtttccgtcttttggaattggggaaggagtttctttctttcttttcttttttcttgagccagttttaatcgctttgaataaatactcccttaagtagttaaatataggaggagaaagaatacatcggttgttaaagcaggagaggaagagagacctgccctgtagcgtgactcctctagaaaaaaaaaaaaaaagccggagtattttactaagcccctaaaatgtcgagatttgtacaaggtacctgtgcgtgcacgcagacgggaagggctggggaagcgggaggactgagaaaagccggatcttagcaaagcaatgtctcaagatggtgcttctcagttccaagaagtcattcggcaagagctagaattatctgtgaagaaggaactagaaaaaatactcaccacagcatcatcacatgaatttgagcacaccaaaaaagacctggatggatttcggaagctatttcatagatttttgcaagaaaaggggccttctgtggattggggaaaaatccagagaccccctgaagattcgattcaaccctatgaaaagataaaggccaggggcttgcctgataatatatcttccgtgttgaacaaactagtggtggtgaaactcaatggtggtttgggaaccagcatgggctgcaaaggccctaaaagtctgattggtgtgaggaatgagaatacctttctggatctgactgttcagcaaattg

SEQ ID NO: 33767 - DNA, 753 bp, Homo sapiens
  source 1..753: mol_type = unassigned DNA
gctattctgctgttgggtcaccttctgcctacttgtgacattccttctgctcttccttgctccagggattgttccagggcccccagttattctaaatggatatcttagcaaagcaatgtctcaagatggtgcttctcagttccaagaagtcattcggcaagagctagaattatctgtgaagaaggaactagaaaaaatactcaccacagcatcatcacatgaatttgagcacaccaaaaaagacctggatggatttcggaagctatttcatagatttttgcaagaaaaggggccttctgtggattggggaaaaatccagagaccccctgaagattcgattcaaccctatgaaaagataaaggccaggggcttgcctgataatatatcttccgtgttgaacaaactagtggtggtgaaactcaatggtggtttgggaaccagcatgggctgcaaaggccctaaaagtctgattggtgtgaggaatgagaatacctttctggatctgactgttcagcaaattgaacatttgaataaaacctacaatacagatgttcctcttgttttaatgaactcttttaacacggatgaagataccaaaaaaatactacagaagtacaatcattgtcgtgtgaaaatctacactttcaatcaaagcaggtacccgaggattaataaagaatctttacttcctgtagcaaaggacgtgtcttactcaggggaaaatacagaagcttggtaccctccaggtcatgg

SEQ ID NO: 33768 - DNA, 2099 bp, Homo sapiens
  source 1..2099: mol_type = unassigned DNA
ggcggggctctcggggccgctgccgccgccgccgccgcgcattgtgcagcaggcgggcccccgcgcggtagggccctggacccgcgcggctcccggggatggtgagcaaggcgctgctgcgcctcgtgtctgccgtcaaccgcaggaggatgaagctgctgctgggcatcgccttgctggcctacgtcgcctctgtttggggcaacttcgttaatatgagctttctactcaacaggtctatccaggaaaatggtgaactaaaaattgaaagcaagattgaagagatggttgaaccactaagagagaaaatcagagatttagaaaaaagctttacccagaaatacccaccagtaaagtttttatcagaaaaggatcggaaaagaattttgataacaggaggcgcagggttcgtgggctcccatctaactgacaaactcatgatggacggccacgaggtgaccgtggtggacaatttcttcacgggcaggaagagaaacgtggagcactggatcggacatgagaacttcgagttgattaaccacgacgtggtggagcccctctacatcgaggttgaccagatataccatctggcatctccagcctcccctccaaactacatgtataatcctatcaagacattaaagaccaatacgattgggacattaaacatgttggggctggcaaaacgagtcggtgcccgtctgctcctggcctccacatcggaggtgtatggagatcctgaagtccaccctcaaagtgaggattactggggccacgtgaatccaataggacctcgggcctgctacgatgaaggcaaacgtgttgcagagaccatgtgctatgcctacatgaagcaggaaggcgtggaagtgcgagtggccagaatcttcaacacctttgggccacgcatgcacatgaacgatgggcgagtagtcagcaacttcatcctgcaggcgctccagggggagccactcacggtatacggatccgggtctcagacaagggcgttccagtacgtcagcgatctagtgaatggcctcgtggctctcatgaacagcaacgtcagcagcccggtcaacctggggaacccagaagaacacacaatcctagaatttgctcagttaattaaaaaccttgttggtagcggaagtgaaattcagtttctctccgaagcccaggatgacccacagaaaagaaaaccagacatcaaaaaagcaaagctgatgctggggtgggagcccgtggtcccgctggaggaaggtttaaacaaagcaattcactacttccgtaaagaactcgagtaccaggcaaataatcagtacatccccaaaccaaagcctgccagaataaagaaaggacggactcgccacagctgaactcctcacttttaggacacaagactaccattgtacacttgatgggatgtatttttggcttttttttgttgtcgtttaaagaaagactttaacaggtgtcatgaagaacaaactggaatttcattctgaagcttgctttaatgaaatggatgtgcctaaaagctcccctcaaaaaactgcagattttgccttgcactttttgaatctctctttttatgtaaaatagcgtagatgcatctctgcgtattttcaagtttttttatcttgctgtgagagcatatgttgtgactgtcgttgacagttttatttactggtttctttgtgaagctgaaaaggaacattaagcgggacaaaaaatgccgattttatttatgaaagtgggtacttaataaatgagtcgttatactatgcataaagaaaaatcctagcagtattgtcaggtggtggtgcgccggcattgattttagggcagataaaagaattctgtgtgagagctttatgtttctcttttaattcagagtttttccaaggtctacttttgagttgcaaacttgactttgaaatattcctgttggtcatgatcaaggatatttgaaatcactactgtgttttgctgcgtatctggggcgggggcaggttggggggcacaaagttaacatattcttggttaaccatggttaaatatgctattttaataaattattgaaactcaccagtcatgga

SEQ ID NO: 33769 - DNA, 1935 bp, Homo sapiens
  source 1..1935: mol_type = unassigned DNA
aggataggaactggagttattgttaatgttacaggaagaacacattctcaaaggagaggggggtggtgggaaactttgattttcatagggttttcagtttcctctcaaatgggaggatgcagcagtgccgctacttaactgaacgtctcgacagtctgatggggcggccctcagccttccggagcagcagtgggactgacctgtccagtgaggaagaaacactgaaccagatggaatggcctttggggatggaaaaaccccagtttacgctcatctcttctctcagctaacttttgtggagccctgttcccaaactggcctgggccagagcaccgtggaggggtatttgttgtaaatggaaggtttccaggcccgcctggaaatcctgaagggtgagacctgcagtgggctcaggagtctgcatttgtgggtgaccgagggggcctcccctccctctagagtccacactgtggagagcatcaggaagggaaaggcctgcatcttgtgctcagtgagctcatcgtctagtgaggaaggcatgtgtgaatctctggacaaggcagcgctgagctgttgtggactagtggtgcaggcaagggattatttctgaccaaggatggtgagaaggtttcccatacagactgacgtctggattgagctttgaagaagaaagccaggactggagcagacgacgaggagggaagagtttgaccagatataccatctggcatctccagcctcccctccaaactacatgtataatcctatcaagacattaaagaccaatacgattgggacattaaacatgttggggctggcaaaacgagtcggtgcccgtctgctcctggcctccacatcggaggtgtatggagatcctgaagtccaccctcaaagtgaggattactggggccacgtgaatccaataggacctcgggcctgctacgatgaaggcaaacgtgttgcagagaccatgtgctatgcctacatgaagcaggaaggcgtggaagtgcgagtggccagaatcttcaacacctttgggccacgcatgcacatgaacgatgggcgagtagtcagcaacttcatcctgcaggcgctccagggggagccactcacggtatacggatccgggtctcagacaagggcgttccagtacgtcagcgatctagtgaatggcctcgtggctctcatgaacagcaacgtcagcagcccggtcaacctggggaacccagaagaacacacaatcctagaatttgctcagttaattaaaaaccttgttggtagcggaagtgaaattcagtttctctccgaagcccaggatgacccacagaaaagaaaaccagacatcaaaaaagcaaagctgatgctggggtgggagcccgtggtcccgctggaggaaggtttaaacaaagcaattcactacttccgtaaagaactcgagtaccaggcaaataatcagtacatccccaaaccaaagcctgccagaataaagaaaggacggactcgccacagctgaactcctcacttttaggacacaagactaccattgtacacttgatgggatgtatttttggcttttttttgttgtcgtttaaagaaagactttaacaggtgtcatgaagaacaaactggaatttcattctgaagcttgctttaatgaaatggatgtgcctaaaagctcccctcaaaaaactgcagattttgccttgcactttttgaatctctctttttatgtaaaatagcgtagatgcatctctgcgtattttcaagtttttttatcttgctgtgagagcatatgttgtgactgtcgttgacagttttatttactggtttctttgtgaagctgaaaaggaacattaagcgggacaaaaaatgccgattttatttatgaaagtgggtacttaataaatgagtcgttatactatgcataaagaaaaa

SEQ ID NO: 33770 - DNA, 1839 bp, Homo sapiens
  source 1..1839: mol_type = unassigned DNA
attgtgcagcaggcgggcccccgcgcggtagggccctggacccgcgcggctcccggggatggtgagcaaggcgctgctgcgcctcgtgtctgccgtcaaccgcaggaggatgaagctgctgctgggcatcgccttgctggcctacgtcgcctctgtttggggcaacttcgttaatatgaggtctatccaggaaaatggtgaactaaaaattgaaagcaagattgaagagatggttgaaccactaagagagaaaatcagagatttagaaaaaagctttacccagaaatacccaccagtaaagtttttatcagaaaaggatcggaaaagaattttgataacaggaggcgcagggttcgtgggctcccatctaactgacaaactcatgatggacggccacgaggtgaccgtggtggacaatttcttcacgggcaggaagagaaacgtggagcactggatcggacatgagaacttcgagttgattaaccacgacgtggtggagcccctctacatcgaggttgaccagatataccatctggcatctccagcctcccctccaaactacatgtataatcctatcaagacattaaagaccaatacgattgggacattaaacatgttggggctggcaaaacgagtcggtgcccgtctgctcctggcctccacatcggaggtgtatggagatcctgaagtccaccctcaaagtgaggattactggggccacgtgaatccaataggacctcgggcctgctacgatgaaggcaaacgtgttgcagagaccatgtgctatgcctacatgaagcaggaaggcgtggaagtgcgagtggccagaatcttcaacacctttgggccacgcatgcacatgaacgatgggcgagtagtcagcaacttcatcctgcaggcgctccagggggagccactcacggtatacggatccgggtctcagacaagggcgttccagtacgtcagcgatctagtgaatggcctcgtggctctcatgaacagcaacgtcagcagcccggtcaacctggggaacccagaagaacacacaatcctagaatttgctcagttaattaaaaaccttgttggtagcggaagtgaaattcagtttctctccgaagcccaggatgacccacagaaaagaaaaccagacatcaaaaaagcaaagctgatgctggggtgggagcccgtggtcccgctggaggaaggtttaaacaaagcaattcactacttccgtaaagaactcgagtaccaggcaaataatcagtacatccccaaaccaaagcctgccagaataaagaaaggacggactcgccacagctgaactcctcacttttaggacacaagactaccattgtacacttgatgggatgtatttttggcttttttttgttgtcgtttaaagaaagactttaacaggtgtcatgaagaacaaactggaatttcattctgaagcttgctttaatgaaatggatgtgcctaaaagctcccctcaaaaaactgcagattttgccttgcactttttgaatctctctttttatgtaaaatagcgtagatgcatctctgcgtattttcaagtttttttatcttgctgtgagagcatatgttgtgactgtcgttgacagttttatttactggtttctttgtgaagctgaaaaggaacattaagcgggacaaaaaatgccgattttatttatgaaagtgggtacttaataaatgagtcgttatactatgcataaagaaaaatcctagcagtattgtcaggtggtggtgcgccggcattgattttagggcagataaaagaattctgtgtgagagctttatgtttctcttttaattcag

SEQ ID NO: 33771 - DNA, 701 bp, Homo sapiens
  source 1..701: mol_type = unassigned DNA
ttctaagctgacagcttggattaacatttgtttccatggccccggatgcacactccacagtcctgcgcctccgctcctcactgaattggttttctccctgcaccgcgttttcccatatgtagctatattcccattcccgagcggtcttgactctaaaatcatatacacggtagagaaggagccctgaagctttacccagaaatacccaccagtaaagtttttatcagaaaaggatcggaaaagaattttgttgaccagatataccatctggcatctccagcctcccctccaaactacatgtataatcctatcaagacattaaagaccaatacgattgggacattaaacatgttggggctggcaaaacgagtcggtgcccgtctgctcctggcctccacatcggaggtgtatggagatcctgaagtccaccctcaaagtgaggattactggggccacgtgaatccaataggacctcgggcctgctacgatgaaggcaaacgtgttgcagagaccatgtgctatgcctacatgaagcaggaaggcgtggaagtgcgagtggccagaatcttcaacacctttgggccacgcatgcacatgaacgatgggcgagtagtcagcaacttcatcctgcaggcgctccagggggagccactcacggtatacggatccgggtctcagacaagggcgttccagtacgtcag

SEQ ID NO: 33772 - DNA, 966 bp, Homo sapiens
  source 1..966: mol_type = unassigned DNA
attgtgcagcaggcgggcccccgcgcggtagggccctggacccgcgcggctcccggggatggtgagcaaggcgctgctgcgcctcgtgtctgccgtcaaccgcaggaggatgaagctgctgctgggcatcgccttgctggcctacgtcgcctggctggcaaaacgagtcggtgcccgtctgctcctggcctccacatcggaggtgtatggagatcctgaagtccaccctcaaagtgaggattactggggccacgtgaatccaataggacctcgggcctgctacgatgaaggcaaacgtgttgcagagaccatgtgctatgcctacatgaagcaggaaggcgtggaagtgcgagtggccagaatcttcaacacctttgggccacgcatgcacatgaacgatgggcgagtagtcagcaacttcatcctgcaggcgctccagggggagccactcacggtatacggatccgggtctcagacaagggcgttccagtacgtcagcgatctagtgaatggcctcgtggctctcatgaacagcaacgtcagcagcccggtcaacctggtgagtgctcctctccctccactctgcaggacagctcagactttcgttcatttgtgaaaccatgagcagcaccaggctttgcttcatttgccatcggcacacttaggacatttgtgtttgttgcttgctaaatactagaggaaaaacaaacaaacacaaagtaagagtatacaaagaagtaaaacatctgcaaggcacgggtgagtgatgtaatcagtccctccaccttctgaagggcctgggtctaagattgtgtgaagccttttggtggtagtaggtggacgtgtgtgtgcatctcgttctctatttaacaggcgggtcatcattataaggcctgattgcatttttagaagatggaggttgttcagagggaaaattttccggttgctgatgatgtctgtcattta

SEQ ID NO: 33773 - DNA, 502 bp, Homo sapiens
  source 1..502: mol_type = unassigned DNA
agtttcctctcaaatgggaggatgcagcagtgccgctacttaactgaacgtctcgacagtctgatggggcggccctcagccttccggagcagcagtgggactgacctgtccagtgaggaagaaacactgaaccagatggaatggcctttggggatggaaaaaccccagtttacgctcatctcttctctcagctaacttttgtggagccctgttcccaaactggcctgggccagagcaccgtggaggggtatttgttgtaaatggaaggtttccaggcccgcctggaaatcctgaaggttgaccagatataccatctggcatctccagcctcccctccaaactacatgtataatcctatcaagacattaaagaccaatacgattgggacattaaacatgttggggctggcaaaacgagtcggtgcccgtctgctcctggcctccacatcggaggtgtatggagatcctgaagtccaccctcaaagtgaggattactggggcca

SEQ ID NO: 33774 - DNA, 800 bp, Homo sapiens
  source 1..800: mol_type = unassigned DNA
ccggatgcacactccacagtcctgcgcctccgctcctcactgaattggttttctccctgcaccgcgttttcccatatgtagctatattcccattcccgagcggtcttgactctaaaatcatatacacggtagagaaggagccctgaagctttacccagaaatacccaccagtaaagtttttatcagaaaaggatcggaaaagaattttgataacaggaggcgcagggttcgtgggctcccatctaactgacaaactcatgatggacggccacgaggtgaccgtggtggacaatttcttcacgggcaggaagagaaacgtggagcactggatcggacatgagaacttcgagttgattaaccacgacgtggtggagcccctctacatcgaggttgaccagatataccatctggcatctccagcctcccctccaaactacatgtataatcctatcaagacattaaagaccaatacgattgggacattaaacatgttggggctggcaaaacgagtcggtgcccgtctgctcctggcctccacatcggaggtgtatggagatcctgaagtccaccctcaaagtgaggattactggggccacgtgaatccaataggacctcgggcctgctacgatgaaggcaaacgtgttgcagagaccatgtgctatgcctacatgaagcaggaaggcgtggaagtgcgagtggccagaatcttcaacacctttgggccacgcatgcacatgaacgatgggcgagtagtcagcaacttcatcctgcaggcgctccagggggagccactcacggta

SEQ ID NO: 33775 - DNA, 1987 bp, Homo sapiens
  source 1..1987: mol_type = unassigned DNA
gcgcattgtgcagcaggcgggcccccgcgcggtagggccctggacccgcgcggctcccggggatggtgagcaaggcgctgctgcgcctcgtgtctgccgtcaaccgcaggaggatgaagctgctgctgggcatcgccttgctggcctacgtcgcctctgtttggggcaacttcgttaatatgagatggttgaaccactaagagagaaaatcagagatttagaaaaaagctttacccagaaatacccaccagtaaagtttttatcagaaaaggatcggaaaagaattttgataacaggaggcgcagggttcgtgggctcccatctaactgacaaactcatgatggacggccacgaggtgaccgtggtggacaatttcttcacgggcaggaagagaaacgtggagcactggatcggacatgagaacttcgagttgattaaccacgacgtggtggagcccctctacatcgaggttgaccagatataccatctggcatctccagcctcccctccaaactacatgtataatcctatcaagacattaaagaccaatacgattgggacattaaacatgttggggctggcaaaacgagtcggtgcccgtctgctcctggcctccacatcggaggtgtatggagatcctgaagtccaccctcaaagtgaggattactggggccacgtgaatccaataggacctcgggcctgctacgatgaaggcaaacgtgttgcagagaccatgtgctatgcctacatgaagcaggaaggcgtggaagtgcgagtggccagaatcttcaacacctttgggccacgcatgcacatgaacgatgggcgagtagtcagcaacttcatcctgcaggcgctccagggggagccactcacggtatacggatccgggtctcagacaagggcgttccagtacgtcagcgatctagtgaatggcctcgtggctctcatgaacagcaacgtcagcagcccggtcaacctggggaacccagaagaacacacaatcctagaatttgctcagttaattaaaaaccttgttggtagcggaagtgaaattcagtttctctccgaagcccaggatgacccacagaaaagaaaaccagacatcaaaaaagcaaagctgatgctggggtgggagcccgtggtcccgctggaggaaggtttaaacaaagcaattcactacttccgtaaagaactcgagtaccaggcaaataatcagtacatccccaaaccaaagcctgccagaataaagaaaggacggactcgccacagctgaactcctcacttttaggacacaagactaccattgtacacttgatgggatgtatttttggcttttttttgttgtcgtttaaagaaagactttaacaggtgtcatgaagaacaaactggaatttcattctgaagcttgctttaatgaaatggatgtgcctaaaagctcccctcaaaaaactgcagattttgccttgcactttttgaatctctctttttatgtaaaatagcgtagatgcatctctgcgtattttcaagtttttttatcttgctgtgagagcatatgttgtgactgtcgttgacagttttatttactggtttctttgtgaagctgaaaaggaacattaagcgggacaaaaaatgccgattttatttatgaaagtgggtacttaataaatgagtcgttatactatgcataaagaaaaatcctagcagtattgtcaggtggtggtgcgccggcattgattttagggcagataaaagaattctgtgtgagagctttatgtttctcttttaattcagagtttttccaaggtctacttttgagttgcaaacttgactttgaaatattcctgttggtcatgatcaaggatatttgaaatcactactgtgttttgctgcgtatctggggcgggggcaggttggggggcacaaagttaacatattcttggttaaccatggttaaatatgctattttaataaattattgaaactc

SEQ ID NO: 33776 - DNA, 3847 bp, Homo sapiens
  source 1..3847: mol_type = unassigned DNA
ggtatgaacgtgatttctgatgaaactggattggaataattttcatgatctttgtatatttatatatatatatttttaaattttgcatttgacttaaagtgccatgagaaaatttgcatactgcaaggtggtcctagccacctccttgatttgggtactcttggatatgttcctgctgctttacttcagtgaatgcaacaaatgtgatgaaaaaaaggagagaggacttcctgctggagatgttctagagccagtacaaaagcctcatgaaggtcctggagaaatggggaaaccagtcgtcattcctaaagaggatcaagaaaagatgaaagagatgtttaaaatcaatcagttcaatttaatggcaagtgagatgattgcactcaacagatctttaccagatgttaggttagaagggtgtaaaacaaaggtgtatccagataatcttcctacaacaagtgtggtgattgttttccacaatgaggcttggagcacacttctgcgaactgtccatagtgtcattaatcgctcaccaagacacatgatagaagaaattgttctagtagatgatgccagtgaaagagactttttgaaaaggcctttagagagttatgtgaaaaaactaaaagtaccagttcatgtaattcgaatggaacaacgttctggattgatcagagctagattaaaaggagctgctgtgtctaaaggccaagtgatcaccttcctggatgcccattgtgagtgtacagtgggatggctggagcctctcttggccaggatcaaacatgacaggagaacagtggtgtgtcccatcatcgatgtgatcagtgatgatacttttgagtacatggcaggctctgatatgacctatggtgggttcaactggaagctcaattttcgctggtatcctgttccccaaagagaaatggacagaaggaaaggtgatcggactcttcctgtcaggacacctaccatggcaggaggccttttttcaatagacagagattactttcaggaaattggaacatatgatgctggaatggatatttggggaggagaaaacctagaaatttcctttaggatttggcagtgtggaggaactttggaaattgttacatgctcacatgttggacatgtgtttcggaaagctacaccttacacgtttccaggaggcacagggcagattatcaataaaaataacagacgacttgcagaagtgtggatggatgaattcaagaatttcttctatataatttctccaggtgttacaaaggtagattatggagatatatcgtcaagagttggtctaagacacaaactacaatgcaaacctttttcctggtacctagagaatatatatcctgattctcaaattccacgtcactatttctcattgggagagatacgaaatgtggaaacgaatcagtgtctagataacatggctagaaaagagaatgaaaaagttggaatttttaattgccatggtatggggggtaatcaggttttctcttatactgccaacaaagaaattagaacagatgacctttgcttggatgtttccaaacttaatggcccagttacaatgctcaaatgccaccacctaaaaggcaaccaactctgggagtatgacccagtgaaattaaccctgcagcatgtgaacagtaatcagtgcctggataaagccacagaagaggatagccaggtgcccagcattagagactgcaatggaagtcggtcccagcagtggcttcttcgaaacgtcaccctgccagaaatattctgagaccaaatttacaaaaaaacgaaaaaaataaggattgactgggctacctcagcatacatttctgccacattcttaagtagcaaaaaaggaaaagtgctttcctcctctgcaggatgtaaggtttatcagccattaaaacttagacttctctagcttttcactagctgtgaaccagccttcctgtccatggacgtgaaactgcatagtaatgagactgtgcacactgatgtttacaagattgaaagagtctttctccgaaaatcatggtaaagaatactgagacaatgaaaaaaaatcaacaaaatatgctttctggagaactgtaccttttatggtttgcttgcacatcagtagtttctgctgaacgtgctgtcataatgaagagatttccaagattttttttcctgattagaactggtagccagtatattaaatattgatataaaaataaaagaactggaaccagattcagaatcatgaaaacaacatttttacaacaacaaaaaaactatattaaacagggtttaaaggaaattaaaacagaactatgagaagtacaatttgttatagtatagtatcaaatttctatatagattttatacctcagtggggaaaaataactgattccaatgacattcattttgttttcatctgtgatagtcatggatgcttttattttccttggggtgctgaaattgagctgaaaaaaaaaggctctttgaatatagttttaatttctctctacagttttttttgtttggtttgtgggctgttggaattgtaatttttaattgccttctaaaaaatggaaatttaacaatgtctgatctcagctgaacaaattagatgtttcagttgctcttgggtcaactggcttacagatttacatgtgcacacacacacaaatttcttatcacattttcgacttcttcacttgacctaactgattatgcgaaatacccaagattcatgctactgtaccacagatttgttttcacagcaataaatcttcagttctttgtttatgattccacttaacaaaaggcctgcagaagtgatttattatttgggtatttggagataatacatttgatggttttttggaaaacctttttcactccatactcagatatgcttcattgtcaaatgcatatttagattagattattgaattgtaatgtttatctgctgctttttttaaataaaatttgactgaaaatgtttaattggcattttttaatgacttagccaaagaagtgcagctattattccatattaataggcttgcatttcttttcctaaatcttatttaggctaaatcagttttatttttctctgattttttttaataccacagaatcacctgagtgtcaattgaaagttgtcaattaaaaggtaaccttttaatctcgtaggaggaatctcattaagacatttttcctgatatgtagagcagtctgttggcaaaaatgcatatattttctttcatatttgtaaaattatatttaatggaattcttttctttgattatcaaggactttcactgcaggcagtgctatttcttgtgcctaagaatgtttccaaaagtcgcatcgctaatgatatttgccaagttgagtgtacacaaagtttctcatatcctgttcaagttaatcaacatcaagcacatggggatgctttagggtgagtctatagtacaaaatgcataaaccatgtccccaggaaatttgaaaggaagcaggtgctgaatggaatttttttccttttccatgagctgtgttaattctatctccagtaggcctaatgcttgaataagcaagatgtctaatcaataaattattttcatgctcagaatttcaggtttttgtactccagcatagcttggtcttatttcttactgtatgaaagcttaacagcaatgtgatttaaggttttgttttaaatgggagatgtaagtgatttaattcatgggtacttttagaacctgatagataatcccattgcctttatttttctaattaaagaattcctaaatactttgaaaatacaaaatattcctgaata

SEQ ID NO: 33777 - DNA, 1770 bp, Homo sapiens
  source 1..1770: mol_type = unassigned DNA
aagtgccatgagaaaatttgcatactgcaaggtggtcctagccacctccttgatttgggtactcttggatatgttcctgctgctttacttcagtgaatgcaacaaatgtgatgaaaaaaaggagagaggacttcctgctggagatgcgcaggtaaattgaacatgaaattggaaattgacaaggatgttgaagtagcagaaagttaccagtgagttaagttctagagccagtacaaaagcctcatgaaggtcctggagaaatggggaaaccagtcgtcattcctaaagaggatcaagaaaagatgaaagagatgtttaaaatcaatcagttcaatttaatggcaagtgagatgattgcactcaacagatctttaccagatgttaggttagaagggtgtaaaacaaaggtgtatccagataatcttcctacaacaagtgtggtgattgttttccacaatgaggcttggagcacacttctgcgaactgtccatagtgtcattaatcgctcaccaagacacatgatagaagaaattgttctagtagatgatgccagtgaaagagactttttgaaaaggcctttagagagttatgtgaaaaaactaaaagtaccagttcatgtaattcgaatggaacaacgttctggattgatcagagctagattaaaaggagctgctgtgtctaaaggccaagtgatcaccttcctggatgcccattgtgagtgtacagtgggatggctggagcctctcttggccaggatcaaacatgacaggagaacagtggtgtgtcccatcatcgatgtgatcagtgatgatacttttgagtacatggcaggctctgatatgacctatggtgggttcaactggaagctcaattttcgctggtatcctgttccccaaagagaaatggacagaaggaaaggtgatcggactcttcctgtcaggacacctaccatggcaggaggccttttttcaatagacagagattactttcaggaaattggaacatatgatgctggaatggatatttggggaggagaaaacctagaaatttcctttaggatttggcagtgtggaggaactttggaaattgttacatgctcacatgttggacatgtgtttcggaaagctacaccttacacgtttccaggaggcacagggcagattatcaataaaaataacagacgacttgcagaagtgtggatggatgaattcaagaatttcttctatataatttctccaggtgttacaaaggtagattatggagatatatcgtcaagagttggtctaagacacaaactacaatgcaaacctttttcctggtacctagagaatatatatcctgattctcaaattccacgtcactatttctcattgggagagatacgaaatgtggaaacgaatcagtgtctagataacatggctagaaaagagaatgaaaaagttggaatttttaattgccatggtatggggggtaatcaggttttctcttatactgccaacaaagaaattagaacagatgacctttgcttggatgtttccaaacttaatggcccagttacaatgctcaaatgccaccacctaaaaggcaaccaactctgggagtatgacccagtgaaattaaccctgcagcatgtgaacagtaatcagtgcctggataaagccacagaagaggatagccaggtgcccagcattagagactgcaatggaagtcggtcccagcagtggcttcttcgaaacgtcaccctgccagaaatattctgagaccaaattt

SEQ ID NO: 33778 - DNA, 2190 bp, Homo sapiens
  source 1..2190: mol_type = unassigned DNA
atcgcggtcgccaggcgcaggctcagcgcggctgacagcgctccagctcccgcgctcgcggccgcctcaggcagccgaccgggttggggcggccccgcgctcggcccgggagccgatccgctgtgagggctcctccatctcctcccaccccgtgacctgctcgacgcgcaacagcccgagccggcccggaggacgcctgccgccgccgccgccgcgcgcctagcgaggtgccatgagaaaatttgcatactgcaaggtggtcctagccacctccttgatttgggtactcttggatatgttcctgctgctttacttcagtgaatgcaacaaatgtgatgaaaaaaaggagagaggacttcctgctggagatgttctagagccagtacaaaagcctcatgaaggtcctggagaaatggggaaaccagtcgtcattcctaaagaggatcaagaaaagatgaaagagatgtttaaaatcaatcagttcaatttaatggcaagtgagatgattgcactcaacagatctttaccagatgttaggttagaagggtgtaaaacaaaggtgtatccagataatcttcctacaacaagtgtggtgattgttttccacaatgaggcttggagcacacttctgcgaactgtccatagtgtcattaatcgctcaccaagacacatgatagaagaaattgttctagtagatgatgccagtgaaagagactttttgaaaaggcctttagagagttatgtgaaaaaactaaaagtaccagttcatgtaattcgaatggaacaacgttctggattgatcagagctagattaaaaggagctgctgtgtctaaaggccaagtgatcaccttcctggatgcccattgtgagtgtacagtgggatggctggagcctctcttggccaggatcaaacatgacaggagaacagtggtgtgtcccatcatcgatgtgatcagtgatgatacttttgagtacatggcaggctctgatatgacctatggtgggttcaactggaagctcaattttcgctggtatcctgttccccaaagagaaatggacagaaggaaaggtgatcggactcttcctgtcaggacacctaccatggcaggaggccttttttcaatagacagagattactttcaggaaattggaacatatgatgctggaatggatatttggggaggagaaaacctagaaatttcctttaggatttggcagtgtggaggaactttggaaattgttacatgctcacatgttggacatgtgtttcggaaagctacaccttacacgtttccaggaggcacagggcagattatcaataaaaataacagacgacttgcagaagtgtggatggatgaattcaagaatttcttctatataatttctccaggtgttacaaaggtagattatggagatatatcgtcaagagttggtctaagacacaaactacaatgcaaacctttttcctggtacctagagaatatatatcctgattctcaaattccacgtcactatttctcattgggagagatacgaaatgtggaaacgaatcagtgtctagataacatggctagaaaagagaatgaaaaagttggaatttttaattgccatggtatggggggtaatcaggttttctcttatactgccaacaaagaaattagaacagatgacctttgcttggatgtttccaaacttaatggcccagttacaatgctcaaatgccaccacctaaaaggcaaccaactctgggagtatgacccagtgaaattaaccctgcagcatgtgaacagtaatcagtgcctggataaagccacagaagaggatagccaggtgcccagcattagagactgcaatggaagtcggtcccagcagtggcttcttcgaaacgtcaccctgccagaaatattctgagaccaaatttacaaaaaaacgaaaaaaataaggattgactgggctacctcagcatacatttctgccacattcttaagtagcaaaaaaggaaaagtgctttcctcctctgcaggatgtaaggtttatcagccattaaaacttagacttctctagcttttcactagctgtgaaccagccttcctgtccatggacgtgaaactgcatagtaatgagactgtgcacactgatgtttacaagattgaaagagtctttctccgaaaatcatggtaaagaatact

SEQ ID NO: 33779 - DNA, 5961 bp, Homo sapiens
  source 1..5961: mol_type = unassigned DNA
gcggagttggagcggggccggcgccgcagccgcttctgctggctgagctgctgccgccgccgggcggacgggcggacgcgcggagctgggggcggcgcggcggggccggcggggcgcggcggggctgaccggccccgatgaggcggaaggagaagcggctcctgcaggcggtggcgctggtgctggcggccctggtcctcctgcccaacgtggggctttgggcgctgtaccgcgagcggcagcccgacggcacccctgggggatcgggggcggcggtggcgccggcggcgggacagggctcacacagtcgacaaaagaaaacgtttttcttgggagatgggcagaagctgaaggactggcatgacaaggaggccatccggagggacgctcagcgcgtaggaaatggagaacaaggaagaccttaccccatgaccgatgctgagagagtggatcaggcataccgagaaaatggatttaacatctacgtcagtgataaaatctccttgaatcgctctctcccagatatccggcacccaaactgcaacagcaagcgctacctggagacacttcccaacacaagcatcatcatccccttccacaacgagggctggtcctccctcctccgcaccgtccacagtgtgctcaatcgctcgcctccagagctggtcgccgagattgtactggtcgacgacttcagtgatcgagagcacctgaagaagcctcttgaagactacatggcccttttccccagtgtgaggattcttcgaaccaagaaacgggaagggctgataaggacccgaatgctgggggcctcagtggcaactggggatgtcatcacattcttggattcacactgtgaagccaatgtcaactggcttccccccttgcttgaccgcattgctcggaaccgcaagaccattgtgtgcccgatgattgatgtaattgaccatgacgactttcggtacgagacacaggcaggggatgccatgcggggagcctttgactgggagatgtactacaagcggatcccgatccctccagaactgcagaaagctgaccccagcgacccatttgagtctcccgtgatggccggtggactgttcgccgtggatcggaagtggttctgggaactcggcgggtatgacccaggcttggagatctggggaggggagcagtatgaaatctccttcaaggtgtggatgtgtgggggccgcatggaggacatcccctgctccagggtgggccatatctacaggaagtatgtgccctacaaggtcccggccggagtcagcctggcccggaaccttaagcgggtggccgaagtgtggatggatgagtacgcagagtacatttaccagcgccggcctgaataccgccacctctccgctggggatgtcgcagtccagaaaaagctccgcagctcccttaactgcaagagtttcaagtggtttatgacgaagatagcctgggacctgcccaaattctacccacccgtggagcccccggctgcagcttggggggagatccgaaatgtgggcacagggctgtgtgcagacacaaagcacggggccttgggctccccactaaggctagagggctgcgtccgaggccgtggggaggctgcctggaacaacatgcaggtattcaccttcacctggagagaggacatccggcctggagacccccagcacaccaagaagttctgctttgatgccatttcccacaccagccctgtcacgctgtacgactgccacagcatgaagggcaaccagctgtggaaataccgcaaagacaagaccctgtaccaccctgtcagtggcagctgcatggactgcagtgaaagtgaccataggatcttcatgaacacctgcaacccatcctctctcacccagcagtggctgtttgaacacaccaactcaacagtcttggaaaaattcaataggaactgagccctcatgtccccttggcaggccccccagggtctggcactcactgcagacttcctctttcaagggaggcagggcccctgtgggcactaggtgtaaaaggtgctggccaaatggttcagggtgaagagggctcttgattcaggggctggggtctgcctggtccttgagcccctgagttgtgggggtagggtgaagagcatatcccacaagaggccccacagggagcagagactgctttaatccctgctgacatcacggaaaagcaacagagccttttcaactttgtcactatgtccccttgaacattatgtgggagaacaccaaggtagcctaggccacccaaaagtgagtcctgcgaggttgcccagccctcagatggctctcctacatgatggtgctttagaaacaaaggtaaaatttgcctgtttggggcagcttttagtatcgatgccactcatctgcagcagaagagaaagaagtcctcttggggctttttagtttctgccgtcctggggggaacattgcagttactgcacagcttctgttctctgtcacaaccccaggtgatttggtccggtcaaaggccatacttggggccctaagagtgttcagtattgaatgctgatcagctgccaggtgaggagtcagaagagggagcccccctagacatttctttgcagctatggacatgcgggatatctccccctgctctctgggtatttgaaatgtcaattttagcactctccaggcacaaggacagcccagcaccagctttacagggcagtgtttcagatggccctgagcccacggaaaaggccaggtagacctccaaactagaaatgctggctgatttgccctgatccatgcttccatttccctgtctctcttccccaggcaattactggcctcaaaagaggaacagaggtgctgcgaggtgctcacctcacagagtctggaggcctccaggatcaactgtgggcaaagtgcctgcctctgacctcatcatggttctagttctcatacagaactccagaatttttaaagaactctataattggattgcaaactaggatgctacataggattctggtattccacatccaatatggatttctagaatgctgtgattaaaggagccagccaggtgtaatacagtcaaggcagcccccagcctagagacaatctgtgaaatccaaagttggtggtgttgggaaagcagggggacatgtgtccctcagctcagcagaggctgtggtacaacatggtccttggtgaagacctgcacccctggaacctcccaccatcatcacaactgtagtctcatttgcagtggagaaaagaacccgacgtcccacagccagatatacacccagctccatgccagcccttcatgtttaccttttgctttgttaattacatgtcagactcctagagggcctccagactaataggaagcatttctgtaaccaacctgccacccactgattcagaaatggaaatcacattccacaatctatggcttccaccagctagcccaggaaatacttgaaatcagcattccaattagtgttgagtctcttgattgtgtcatttaccaattaaataactgagacctaagtctgggaacagagccacgaatctgcctttgagatgctggcagatctcaaggccatcaattattgggggagggagggacaaacactcccaatcatccaccagtcagactgaatgtgtagctggcgaggaattacttccacttctggcccagcacaagccctgctttggccacctgtctgcaagagaggcggcccctgtgcttgcaacgcttacgtgttgatcccagtgtccttttccaaatgagtgctgtagctttagaagtggccctctatagaaagaagtcaaaagatgaggccccttctagaatctaggataacaagagtgttgacagtttgaggagtcgaattgagattcatcatcaaagagcaatgcagcgtcgttaaaataaaaactgtgccttttaaaaagaaaaatgcaaatatagagcaaatccctaaacttgaaccatttcctagtgccttgctagacaaacataaaggggcagggttgtggggaggggaacgtttttggtggtgtgtgcagttcctactggatgagtgtgtgtttcttaatgtctcatttcaagcaggagatgttgggtctggagcaagatctgagactgagatgtcccccaagggtgacaggtcagatttatttcagtcagtgcaagtcacactccaaactaaaggctgggcagtgcgtttagtctgtggcctagaagacctcatcagcccccgagaggaggccttgcattacctcactgggacctgtttgggggccatccctgcggtccaccctctgaacccccagcatgtttgtcctgtttctcaccattgggttaaggggtgccgagcactagctagacttccacatagtcccaccccaagtgggcggcagtgttcctggcatgaccaggattcctgtgaaagcaggagcagcagcaagccgtcccgggcctgcctttcccatcctttggttctcctttccagtctgggttcacaccctgaaaagggatgggtgtgtcctctgagcactctggcatttgtcattgctgagcccatatcagtaggtcctgggacttgacaaagtatgtgggaggggaaggaaggacagaacttgactggctccatttcatggaccaactgatcaattgccagtactaagccactcattgttatggcttcctttttgaaaaccacctgtctcaaggattcaggtttctgctcacatccccagctgatgctcaataaaactcagccaggagcatatggagatgctgacagccaggtaatgggtgagactgtggggtcccttttcctctaaagcctttactctgaggataaggtcacaaagtagggtgtgacttgaaagtatcgtgaccatgtggcccaccagcagcctttccaaaggggaactccagagacatttcataatgcaaacagcactgttgctttaagaacaaggcctttggaggtggctaaacttgcacgcacgtgtgtgaaaagccatcccatcttctgcctccagttggagctttcagctgttaaaacagtcagaaactattgattcttccctttaggaaaaaatgctcaggcagaacggggtacatccacaggaggaatcggacgagaggatgtgacattcggtccaggagagaaagagcagtttctgttaaagatgtaacaaatggatttccaaagtctacatgacattcacttttcaaacttcccaccagttgaatttctttttttccttaagaaacaggtgatgtcttggaaaacagctccttatgtctctctgtgcatctccattttcctagtctctggagtctcaaaaagagtggcaaagcactttacagtagtaactgaggaatcagagtctctgcttcagcgatatctagtttgtacagttgggtgatcttttgtaattcctaggaggtaatgcatttttaatgttttctgaagctttgtaagtgtgagagagggacaagaagtgcagttctgttctggaattccttattgctttcaacggacactctttgtgaaaaatccaagtaatattttagttcaaacttgatcttgagccaaggcccactgccacctctgggatgggagtcggacctacataccaagtgacaagttcaccttaacatctgcttccagaatggctttgattcagccgtgccaggcaacagaacagggtcagactcctgctctgttattggcttgaagactaggatcccaaaggggttggaggcagggaatatttgaaaattcagactggaattccaggccaaaagctcaagaccaccagcctctcctcctgcctggaaaaataagcctttgtgaaagactgatttaccatgtacaattgtgattgtgaacgttgttgagtaaacctccagactttctctaaa

SEQ ID NO: 33780 - DNA, 4840 bp, Homo sapiens
  source 1..4840: mol_type = unassigned DNA
atgctggcctggcgggatggtgaactggaagcagaaacgtcatcctctctcttccttcttgccatgcaggtgtggatgtgtgggggccgcatggaggacatcccctgctccagggtgggccatatctacaggaagtatgtgccctacaaggtcccggccggagtcagcctggcccgggtaaggaaccttaagcgggtggccgaagtgtggatggatgagtacgcagagtacatttaccagcgccggcctgaataccgccacctctccgctggggatgtcgcagtccagaaaaagctccgcagctcccttaactgcaagagtttcaagtggtttatgacgaagatagcctgggacctgcccaaattctacccacccgtggagcccccggctgcagcttggggggagatccgaaatgtgggcacagggctgtgtgcagacacaaagcacggggccttgggctccccactaaggctagagggctgcgtccgaggccgtggggaggctgcctggaacaacatgcaggtattcaccttcacctggagagaggacatccggcctggagacccccagcacaccaagaagttctgctttgatgccatttcccacaccagccctgtcacgctgtacgactgccacagcatgaagggcaaccagctgtggaaataccgcaaagacaagaccctgtaccaccctgtcagtggcagctgcatggactgcagtgaaagtgaccataggatcttcatgaacacctgcaacccatcctctctcacccagcagtggctgtttgaacacaccaactcaacagtcttggaaaaattcaataggaactgagccctcatgtccccttggcaggccccccagggtctggcactcactgcagacttcctctttcaagggaggcagggcccctgtgggcactaggtgtaaaaggtgctggccaaatggttcagggtgaagagggctcttgattcaggggctggggtctgcctggtccttgagcccctgagttgtgggggtagggtgaagagcatatcccacaagaggccccacagggagcagagactgctttaatccctgctgacatcacggaaaagcaacagagccttttcaactttgtcactatgtccccttgaacattatgtgggagaacaccaaggtagcctaggccacccaaaagtgagtcctgcgaggttgcccagccctcagatggctctcctacatgatggtgctttagaaacaaaggtaaaatttgcctgtttggggcagcttttagtatcgatgccactcatctgcagcagaagagaaagaagtcctcttggggctttttagtttctgccgtcctggggggaacattgcagttactgcacagcttctgttctctgtcacaaccccaggtgatttggtccggtcaaaggccatacttggggccctaagagtgttcagtattgaatgctgatcagctgccaggtgaggagtcagaagagggagcccccctagacatttctttgcagctatggacatgcgggatatctccccctgctctctgggtatttgaaatgtcaattttagcactctccaggcacaaggacagcccagcaccagctttacagggcagtgtttcagatggccctgagcccacggaaaaggccaggtagacctccaaactagaaatgctggctgatttgccctgatccatgcttccatttccctgtctctcttccccaggcaattactggcctcaaaagaggaacagaggtgctgcgaggtgctcacctcacagagtctggaggcctccaggatcaactgtgggcaaagtgcctgcctctgacctcatcatggttctagttctcatacagaactccagaatttttaaagaactctataattggattgcaaactaggatgctacataggattctggtattccacatccaatatggatttctagaatgctgtgattaaaggagccagccaggtgtaatacagtcaaggcagcccccagcctagagacaatctgtgaaatccaaagttggtggtgttgggaaagcagggggacatgtgtccctcagctcagcagaggctgtggtacaacatggtccttggtgaagacctgcacccctggaacctcccaccatcatcacaactgtagtctcatttgcagtggagaaaagaacccgacgtcccacagccagatatacacccagctccatgccagcccttcatgtttaccttttgctttgttaattacatgtcagactcctagagggcctccagactaataggaagcatttctgtaaccaacctgccacccactgattcagaaatggaaatcacattccacaatctatggcttccaccagctagcccaggaaatacttgaaatcagcattccaattagtgttgagtctcttgattgtgtcatttaccaattaaataactgagacctaagtctgggaacagagccacgaatctgcctttgagatgctggcagatctcaaggccatcaattattgggggagggagggacaaacactcccaatcatccaccagtcagactgaatgtgtagctggcgaggaattacttccacttctggcccagcacaagccctgctttggccacctgtctgcaagagaggcggcccctgtgcttgcaacgcttacgtgttgatcccagtgtccttttccaaatgagtgctgtagctttagaagtggccctctatagaaagaagtcaaaagatgaggccccttctagaatctaggataacaagagtgttgacagtttgaggagtcgaattgagattcatcatcaaagagcaatgcagcgtcgttaaaataaaaactgtgccttttaaaaagaaaaatgcaaatatagagcaaatccctaaacttgaaccatttcctagtgccttgctagacaaacataaaggggcagggttgtggggaggggaacgtttttggtggtgtgtgcagttcctactggatgagtgtgtgtttcttaatgtctcatttcaagcaggagatgttgggtctggagcaagatctgagactgagatgtcccccaagggtgacaggtcagatttatttcagtcagtgcaagtcacactccaaactaaaggctgggcagtgcgtttagtctgtggcctagaagacctcatcagcccccgagaggaggccttgcattacctcactgggacctgtttgggggccatccctgcggtccaccctctgaacccccagcatgtttgtcctgtttctcaccattgggttaaggggtgccgagcactagctagacttccacatagtcccaccccaagtgggcggcagtgttcctggcatgaccaggattcctgtgaaagcaggagcagcagcaagccgtcccgggcctgcctttcccatcctttggttctcctttccagtctgggttcacaccctgaaaagggatgggtgtgtcctctgagcactctggcatttgtcattgctgagcccatatcagtaggtcctgggacttgacaaagtatgtgggaggggaaggaaggacagaacttgactggctccatttcatggaccaactgatcaattgccagtactaagccactcattgttatggcttcctttttgaaaaccacctgtctcaaggattcaggtttctgctcacatccccagctgatgctcaataaaactcagccaggagcatatggagatgctgacagccaggtaatgggtgagactgtggggtcccttttcctctaaagcctttactctgaggataaggtcacaaagtagggtgtgacttgaaagtatcgtgaccatgtggcccaccagcagcctttccaaaggggaactccagagacatttcataatgcaaacagcactgttgctttaagaacaaggcctttggaggtggctaaacttgcacgcacgtgtgtgaaaagccatcccatcttctgcctccagttggagctttcagctgttaaaacagtcagaaactattgattcttccctttaggaaaaaatgctcaggcagaacggggtacatccacaggaggaatcggacgagaggatgtgacattcggtccaggagagaaagagcagtttctgttaaagatgtaacaaatggatttccaaagtctacatgacattcacttttcaaacttcccaccagttgaatttctttttttccttaagaaacaggtgatgtcttggaaaacagctccttatgtctctctgtgcatctccattttcctagtctctggagtctcaaaaagagtggcaaagcactttacagtagtaactgaggaatcagagtctctgcttcagcgatatctagtttgtacagttgggtgatcttttgtaattcctaggaggtaatgcatttttaatgttttctgaagctttgtaagtgtgagagagggacaagaagtgcagttctgttctggaattccttattgctttcaacggacactctttgtgaaaaatccaagtaatattttagttcaaacttgatcttgagccaaggcccactgccacctctgggatgggagtcggacctacataccaagtgacaagttcaccttaacatctgcttccagaatggctttgattcagccgtgccaggcaacagaacagggtcagactcctgctctgttattggcttgaagactaggatcccaaaggggttggaggcagggaatatttgaaaattcagactggaattccaggccaaaagctcaagaccaccagcctctcctcctgcctggaaaaataagcctttgtgaaagactgatttaccatgtacaattgtgattgtgaacgttgttgagtaaacctccagactttctct

SEQ ID NO: 33781 - DNA, 3778 bp, Homo sapiens
  source 1..3778: mol_type = unassigned DNA
gagctgctgccgccgccgggcggacgggcggacgcgcggagctgggggcggcgcggcggggccggcggggcgcggcggggctgaccggccccgatgaggcggaaggagaagcggctcctgcaggcggtggcgctggtgctggcggccctggtcctcctgcccaacgtggggctttgggcgctgtaccgcgagcggcagcccgacggcacccctgggggatcgggggcggcggtggcgccggcggcgggacagggctcacacagtcgacaaaagaaaacgtttttcttgggagatgggcagaagctgaaggactggcatgacaaggaggccatccggagggacgctcagcgcgtaggaaatggagaacaaggaagaccttaccccatgaccgatgctgagagagtggatcaggcataccgagaaaatggatttaacatctacgtcagtgataaaatctccttgaatcgctctctcccagatatccggcacccaaactgcaacagcaagcgctacctggagacacttcccaacacaagcatcatcatccccttccacaacgagggctggtcctccctcctccgcaccgtccacagtgtgctcaatcgctcgcctccagagctggtcgccgagattgtactggtcgacgacttcagtgatcgagaccgcattgctcggaaccgcaagaccattgtgtgcccgatgattgatgtaattgaccatgacgactttcggtacgagacacaggcaggggatgccatgcggggagcctttgactgggagatgtactacaagcggatcccgatccctccagaactgcagaaagctgaccccagcgacccatttgagtctcccgtgatggccggtggactgttcgccgtggatcggaagtggttctgggaactcggcgggtatgacccaggcttggagatctggggaggggagcagtatgaaatctccttcaaggtgtggatgtgtgggggccgcatggaggacatcccctgctccagggtgggccatatctacaggaagtatgtgccctacaaggtcccggccggagtcagcctggcccggaaccttaagcgggtggccgaagtgtggatggatgagtacgcagagtacatttaccagcgccggcctgaataccgccacctctccgctggggatgtcgcagtccagaaaaagctccgcagctcccttaactgcaagagtttcaagtggtttatgacgaagatagcctgggacctgcccaaattctacccacccgtggagcccccggctgcagcttggggggagatccgaaatgtgggcacagggctgtgtgcagacacaaagcacggggccttgggctccccactaaggctagagggctgcgtccgaggccgtggggaggctgcctggaacaacatgcaggtattcaccttcacctggagagaggacatccggcctggagacccccagcacaccaagaagttctgctttgatgccatttcccacaccagccctgtcacgctgtacgactgccacagcatgaagggcaaccagctgtggaaataccgcaaagacaagaccctgtaccaccctgtcagtggcagctgcatggactgcagtgaaagtgaccataggatcttcatgaacacctgcaacccatcctctctcacccagcagtggctgtttgaacacaccaactcaacagtcttggaaaaattcaataggaactgagccctcatgtccccttggcaggccccccagggtctggcactcactgcagacttcctctttcaagggaggcagggcccctgtgggcactaggtgtaaaaggtgctggccaaatggttcagggtgaagagggctcttgattcaggggctggggtctgcctggtccttgagcccctgagttgtgggggtagggtgaagagcatatcccacaagaggccccacagggagcagagactgctttaatccctgctgacatcacggaaaagcaacagagccttttcaactttgtcactatgtccccttgaacattatgtgggagaacaccaaggtagcctaggccacccaaaagtgagtcctgcgaggttgcccagccctcagatggctctcctacatgatggtgctttagaaacaaaggtaaaatttgcctgtttggggcagcttttagtatcgatgccactcatctgcagcagaagagaaagaagtcctcttggggctttttagtttctgccgtcctggggggaacattgcagttactgcacagcttctgttctctgtcacaaccccaggtgatttggtccggtcaaaggccatacttggggccctaagagtgttcagtattgaatgctgatcagctgccaggtgaggagtcagaagagggagcccccctagacatttctttgcagctatggacatgcgggatatctccccctgctctctgggtatttgaaatgtcaattttagcactctccaggcacaaggacagcccagcaccagctttacagggcagtgtttcagatggccctgagcccacggaaaaggccaggtagacctccaaactagaaatgctggctgatttgccctgatccatgcttccatttccctgtctctcttccccaggcaattactggcctcaaaagaggaacagaggtgctgcgaggtgctcacctcacagagtctggaggcctccaggatcaactgtgggcaaagtgcctgcctctgacctcatcatggttctagttctcatacagaactccagaatttttaaagaactctataattggattgcaaactaggatgctacataggattctggtattccacatccaatatggatttctagaatgctgtgattaaaggagccagccaggtgtaatacagtcaaggcagcccccagcctagagacaatctgtgaaatccaaagttggtggtgttgggaaagcagggggacatgtgtccctcagctcagcagaggctgtggtacaacatggtccttggtgaagacctgcacccctggaacctcccaccatcatcacaactgtagtctcatttgcagtggagaaaagaacccgacgtcccacagccagatatacacccagctccatgccagcccttcatgtttaccttttgctttgttaattacatgtcagactcctagagggcctccagactaataggaagcatttctgtaaccaacctgccacccactgattcagaaatggaaatcacattccacaatctatggcttccaccagctagcccaggaaatacttgaaatcagcattccaattagtgttgagtctcttgattgtgtcatttaccaattaaataactgagacctaagtctgggaacagagccacgaatctgcctttgagatgctggcagatctcaaggccatcaattattgggggagggagggacaaacactcccaatcatccaccagtcagactgaatgtgtagctggcgaggaattacttccacttctggcccagcacaagccctgctttggccacctgtctgcaagagaggcggcccctgtgcttgcaacgcttacgtgttgatcccagtgtccttttccaaatgagtgctgtagctttagaagtggccctctatagaaagaagtcaaaagatgaggccccttctagaatctaggataacaagagtgttgacagtttgaggagtcgaattgagattcatcatcaaagagcaatgcagcgtcgttaaaataaaaactgtgccttttaaaaagaaaaatgcaaatatagagcaaatccctaaacttg

SEQ ID NO: 33782 - DNA, 4344 bp, Homo sapiens
  source 1..4344: mol_type = unassigned DNA
gcggagttggagcggggccggcgccgcagccgcttctgctggctgagctgctgccgccgccgggcggacgggcggacgcgcggagctgggggcggcgcggcggggccggcggggcgcggcggggctgaccggccccgatgaggcggaaggagaagcggctcctgcaggcggtggcgctggtgctggcggccctggtcctcctgcccaacgtggggctttgggcgctgtaccgcgagcggcagcccgacggcacccctgggggatcgggggcggcggtggcgccggcggcgggacagggctcacacagtcgacaaaagaaaacgtttttcttgggagatgggcagaagctgaaggactggcatgacaaggaggccatccggagggacgctcagcgcgtaggaaatggagaacaaggaagaccttaccccatgaccgatgctgagagagtggatcaggcataccgagaaaatggatttaacatctacgtcagtgataaaatctccttgaatcgctctctcccagatatccggcacccaaactgcaacagcaagcgctacctggagacacttcccaacacaagcatcatcatccccttccacaacgagggctggtcctccctcctccgcaccgtccacagtgtgctcaatcgctcgcctccagagctggtcgccgagattgtactggtcgacgacttcagtgatcgagagcacctgaagaagcctcttgaagactacatggcccttttccccagtgtgaggattcttcgaaccaagaaacgggaagggctgataaggacccgaatgctgggggcctcagtggcaactggggatgtcatcacattcttggattcacactgtgaagccaatgtcaactggcttccccccttgcttgaccgcattgctcggaaccgcaagaccattgtgtgcccgatgattgatgtaattgaccatgacgactttcggtacgagacacaggcaggggatgccatgcggggagcctttgactgggagatgtactacaagcggatcccgatccctccagaactgcagaaagctgaccccagcgacccatttgagtctcccgtgatggccggtggactgttcgccgtggatcggaagtggttctgggaactcggcgggtatgacccaggcttggagatctggggaggggagcagtatgaaatctccttcaaggtgagccagctctccagacgccccgttcttggcacagcctcctgagtgcctgtcccagtaggtgtctcagcttctgcctgagcttggaaagactggaggcctcagggttctgtagcccttctgcccatcaggtgaagaagacaggggctcatgggccactctttgttgtggggtgggggggtgtgggagggaaggggagtactctccagctgccaaaggctggtcctcaccacagctctgactggcatttgccttgtgtcttcttaagatgttggaataaggtcttgcttctactcagatggcaggtctgagattgagatgtccagcaaataagcagtgggccagagaagctaggaaggccaaacaggatacgtaggcctagaggagtcctctcagtcaccccaagttttccctttgtacctgttgctctaggagtttgacaaagaccagtgagcataagctccagttgtaaagttacaaaggcctggattcagatcccagctccatcatcaggagctatctgactttgggcaagttagatcacccccccgagctttctttcctcatctgaaataagggaataataatactacctagcttacagagctatcgtgaagattaaatgagatcatgtctagaaagtgcttagcatacaacctgggaacatgaccagcaattaataattggtagaaattgttaaagtttcggtgagtaaatatttactgtaacctacttgaccagcctatggactctggaagctttctgacagtagtggtaaaggagttactagttaactaataactaattaagcacccaaacttccaaggctacattctccactttatttgtgggagtctgtcttgttctcaagtgaaagcttggaccttctgaggggagggttagcttgtcccatgcccttgtggcctgtcagagtcagcttctaacagcttagacccctggctaaggcatatccccagcccacaagggacagatagcaccattactgatctgacccctgtgaacacacaactctgatgccccctcatcgggcctcaactttcagtgcaaaggaccattgtcaggcacagtgaattaaggctttggtattggtgccagagtgccacgatcagatcctagctctgccgtgtcctgccagctgtgtgatcttgggcaaggaatcctcacctcactgagccttggtttctacttccataaagtgggtttaatgaaacgttaatcctcacagagttgttgagaggattaagtgagaccatgcttattaggtgcttcttaataaattatcctaaagattattatcaatacattaatattattatctgcaacagtggttgagtagttcagaactggagaacataaattcttgattagcccaaaaaaaaaaaaaacctacaattcttttgatgttatttaggtttgaaaagcagtttatatcctttttttttcttttcttttcttttgtttttttttttttgagatggagtttcactctgctgcccaggctggagtgcagtagtgcgatcttggctcactgcagcctccacctcctgggttcaagtgattctcctgcctcagcctcctgagtagctgggactacaggcgcccaccaccacgcccagctaatgtagagatagggtttcgacatgttgaccaggctggtcttgaccccctgacctcaggtgatccacccacctcggcctttcaaagtgctgggattacaggtgtgagccactgtgcctggccagtttatatctattttaaccaccagagttctgaagttgtctcccataaggagaccagccccctaaataaaattaatattcacataagggtaatgttcaaaatatgtaacaactgtgataacacaagcacatccagtcagaacagataccagctataaacaatggtgcatccactccagcgtgtaacaagtgaagttcggtcctgatcatagctaacaggacagtgtgccaagcccttcatacatgctgacttgtttaatcctcacaacaaccttaggagagttgtatcattattatacccgtttcaccaggaaggcaagcaaagctcagaccaaggcctcgcacagccggaagaagcagaactggggcccaaacgcaggtctgcttgactccaaagcccacgctctgacctgctatttttgttgttgtttaaatcatacccagactgttctgaaaacctgccatgttttatggacctctgcctcaccctttctgggattttttttttttttttgcctcttctggtattattcctagtttacttggatattctgcaatttcttagttaatggaattaataacaatctaagtcggaagtggcaaatagggccaggaatggtggccgagatgggaggatctcttgagcctaggagtttgagaccagcctggacaacacaacacgaccccatctcattaaaaaaaaaaaaaaaaagaaggaaagaaagagagagagagaaggagtggggagggagagagggagggggaaagggagagagagagacagagagagagacacagcaaataggtttctactccctgccaggccaactctgatccattggtaggggctgccccaggtgggtgttgatatgcattctgaggctgcttccaagcttatcagcaaagagtagtcagtgggggagggatctttttgtgtttcactcaccgccatatcccaagtacctaaagcctggtccaacacagaaaagacactatgagaccaatttttatgagtcataatttttattattgtattaaatcttttctaaaattatatttatataaatatcttataaatattctaaaaatatgtaaaatgtataaaagtctagtagttctgatataacactgtcagccataattctggttatcatgttaaaatactacatataataaaataactaaattcaagaccagcctggccaacattgtgaaaccccatctttactaaaaatacaaaaattagccaggcgtggtggtacatgcctgtaattccagctactcaggaggtggagacaggagaattgcttgaagctgggaggcagaggttgcagtgagccgagatcgtgccactgcactctaatctgggcgacaaagcgagactccatgtc

SEQ ID NO: 33783 - DNA, 2735 bp, Homo sapiens
  source 1..2735: mol_type = unassigned DNA
atgtgggggcgcacggcgcggcggcgctgcccgcgggaactgcggcgcggccgggaggcgctgttggtgctcctggcgctactggcgttggccgggctgggctcggtgctgcgggcgcagcgtggggccggggccggggctgccgagccgggacccccgcgcaccccgcgccccgggcggcgcgagccggtcatgccgcggccgccggtgccggcgaacgcgctgggcgcgcggggcgaggcggtgcggctgcagctgcagggcgaggagctgcggctgcaggaggagagcgtgcggctgcaccagattaacatctacctcagcgaccgcatctcactgcaccgccgcctgcccgagcgctggaacccgctgtgcaaagagaagaaatatgattatgataatttgcccaggacatctgttatcatagcattttataatgaagcctggtcaactctccttcggacagtttacagtgtccttgagacatccccggatatcctgctagaagaagtgatccttgtagatgactacagtgatagagagcacctgaaggagcgcttggccaatgagctttcgggactgcccaaggtgcgcctgatccgcgccaacaagagagagggcctggtgcgagcccggctgctgggggcgtctgcggcgaggggcgatgttctgaccttcctggactgtcactgtgagtgccacgaagggtggctggagccgctgctgcagaggatccatgaagaggagtcggcagtggtgtgcccggtgattgatgtgatcgactggaacaccttcgaatacctggggaactccggggagccccagatcggcggtttcgactggaggctggtgttcacgtggcacacagttcctgagagggagaggatacggatgcaatcccccgtcgatgtcatcaggtctccaacaatggctggtgggctgtttgctgtgagtaagaaatattttgaatatctggggtcttatgatacaggaatggaagtttggggaggagaaaacctcgaattttcctttaggatctggcagtgtggtggggttctggaaacacacccatgttcccatgttggccatgttttccccaagcaagctccctactcccgcaacaaggctctggccaacagtgttcgtgcagctgaagtatggatggatgaatttaaagagctctactaccatcgcaacccccgtgcccgcttggaaccttttggggatgtgacagagaggaagcagctccgggacaagctccagtgtaaagacttcaagtggttcttggagactgtgtatccagaactgcatgtgcctgaggacaggcctggcttcttcgggatgctccagaacaaaggactaacagactactgctttgactataaccctcccgatgaaaaccagattgtgggacaccaggtcattctgtacctctgtcatgggatgggccagaatcagtttttcgagtacacgtcccagaaagaaatacgctataacacccaccagcctgagggctgcattgctgtggaagcaggaatggatacccttatcatgcatctctgcgaagaaactgccccagagaatcagaagttcatcttgcaggaggatggatctttatttcacgaacagtccaagaaatgtgtccaggctgcgaggaaggagtcgagtgacagtttcgttccactcttacgagactgcaccaactcggatcatcagaaatggttcttcaaagagcgcatgttatgaagcctcgtgtatcaaggagcccatcgaaggagactgtggagccaggactctgcccaacaaagacttagctaagcagtgaccagaacccaccaaaaactaggctgcattgctttgaagaggcaatcattttgccatttgtgaaagttgtgttggatttagtaaaaatgtgaataagctttgtacttattttgagaactttttaaatgttccaaaataccctattttcaaagggtaatcgtaagatgttaacccttggtatttagaaaattaaaaccttataatatttttctatcaagatgtatattttacagtcgtgccttttactctcattagcaaaaaagataaagattttattttggtatttacaagaattcccaggtacgaagatatctgcatgggtggaaatcaggttcaagcaacgtactttgcattaactgataatacctcagctgcggggttaaagttttcccagtatagagagactgtcactaggaacattgtattgatttattcaggtcattgagatcttctagatgtattttaaaaagaatgctttttggttatgtgttgctaccacagttaacactccataatgttcatgtcagccaaagaggactaaccaaagctgaaatctcagagaacaatttgctttactaagctgagtcaacttgagagcgaacttctaacaatgccgcactgtagtgtggctggttctaccactatgactttaaaacatgtttatatcatttttaatttttatgatacggtagtgtcagggagaaatgtaatgttctatatgaaattcctttttcaagtttgttcattaataacagttattaatttaaatcagcgttagagtttgtgctgctgcaactgctgtgaaaatttctctgagtaattctgatttgtgaatgatcccagaccaaccctgagattttgtcaacctgattaagtcaatatgaatgattaaaaagatgtgagaacactga

SEQ ID NO: 33784 - DNA, 5536 bp, Homo sapiens
  source 1..5536: mol_type = unassigned DNA
gggagaagtgaccaggcggcggcggctctgctgaggtgacaacgtgctagcagccctcgctcgctctgggcgcctcctcggcctcagcgtccgctctggccgcgctcgaggagcccttcagcccgccgctgcgctatgaaggcccctctctggggctggccgaggctggagccggctccctctgctcgcgggcaagtgtgaagagagaggcgcgggcgggagccggggctgcgcgcggcgctcgcgggccggcgcgggttccaggtgagcgcggactcggcgagccccgcactcggcgcggccggccggcgcctgctgggcttgatctgaggctgaatcccgtgtgtggaccgccgttccctcttcgcgggatcgttggccaggatagcagatgcatttttgtagaagcattttgaggatgaatgtttgcaaatcattttgaaattgccaagtgccacatacatggaatgtatcctgctttcatcttggagttcacctgtgtggcttggatttatcacagtagcatttgtcttcaatctgtgtgttaactagaaatcaaggaaagacatgaggagatttgtctactgcaaggtggttctagccacttcgctgatgtgggttcttgttgatgtcttcttactgctgtacttcagtgaatgtaacaaatgtgatgacaagaaggagagatctctgctgcctgcattgagggctgttatttcaagaaaccaagaagggccaggagaaatgggaaaagctgtgttgattcctaaagatgaccaggagaaaatgaaagagctgtttaaaatcaatcagtttaaccttatggccagtgatttgattgcccttaatagaagtctgccagatgtaagattagaaggatgtaagacaaaagtctaccctgatgaacttccaaacacaagtgtagtcattgtgtttcataatgaagcttggagcactctccttagaactgtttacagtgtgataaatcgttccccacactatctactctcagaggtcatcttggtagatgatgccagtgaaagagattttctcaagttgacattagagaattacgtgaaaaatttagaagtgccagtaaaaattattaggatggaagaacgctctgggttaatacgtgcccgtcttcgaggagcagctgcttcaaaagggcaggtcataacttttcttgatgcacactgtgaatgcacgttaggatggctggagcctttgctggcaagaataaaggaagacaggaaaacggttgtctgccctatcattgatgtgattagtgatgatacttttgaatatatggctgggtcagacatgacttatgggggttttaactggaaactgaatttccgctggtatcctgttccccaaagagaaatggacaggaggaaaggagacagaacattacctgtcaggacccctactatggctggtggcctattttctattgacagaaactactttgaagagataggaacttacgatgcaggaatggatatctggggtggagagaatcttgaaatgtcttttaggatttggcaatgtggaggctccttggagattgttacttgctcccatgttggtcatgtttttcggaaggcaactccatacacttttcctggtggcactggtcatgtcatcaacaagaacaacaggagactggcagaagtttggatggatgaatttaaagatttcttctacatcatatccccaggtgttgtcaaagtggattatggagatgtgtcagtcagaaaaacactaagagaaaatctgaagtgtaagcccttttcttggtacctagaaaacatctatccggactcccagatcccaagacgttattactcacttggtgagataagaaatgttgaaaccaatcagtgtttagacaacatgggccgcaaggaaaatgaaaaagtgggtatattcaactgtcatggtatgggaggaaatcaggtattttcttacactgctgacaaagaaatccgaaccgatgacttgtgcttggatgtttctagactcaatggacctgtaatcatgttaaaatgccaccatatgagaggaaatcagttatgggaatatgatgctgagagactcacgttgcgacatgttaacagtaaccaatgtctcgatgaaccttctgaagaagacaaaatggtgcctacaatgcaggactgtagtggaagcagatcccaacagtggctgctaaggaacatgaccttgggcacatgaagatcatgtcctccaagccatgaaagtgtctacgcttttgtttttccattatttcaattgggggaaaatattaactttgctgaattgaaagttttaaaaatccttttagtattctaaaacacaattgtttctaattcgtttctagaaatgtttgcttatttccctactaaaatttgtatctgatcaaagcacataagaatataaataatagcaaactactattaaacaacagaacaacttgtaaaacaaattgtgtttgctttaagaaaaatgtttattgcactcatgtcatagggttaattggaggttattttatttttggttgtcatggtgattgaaagagataatgtaaatgccttataaaatcttcattatgaaatattatcagttgctttataaactcactctttttatggatccttcatggaaacatgtttgatttctgtgtctacaacagggccacatattaaattacttctgaatggtgaattcatcttacaaaatgttccaagttttggacaaggaaaaacattacattggatattgaattcatggagcctttacagaagcatcacatttaaaccaatgtgaattcaaaaaagagaaggaaactttttaaattcaatttagagtacataaaaaaagaaatccgcgaagcattgaggggaacaagatgagtctaatccgcagcacttcgatcactgtgagagaactcaaagtgggttgcaatcattcctaacacaggctgaaactaaacaatcttgctcctagagtttatgttggatactcaattcttaaccaaaatcttggtctccacaaactctaccatcccttttctcttcactctatagacagtggcatgccattgatgctgtacagaattgcaggtgaaagggagaattttagacttaatttttaactctattgcacttaaagattttagttaggttaccactgtcattttcattttctatgttaaagaatacctttcagtgctgtgctccagtatctaaaaattttatcaccaggggaataaactcaatacacattcattaaacttttgttgtaattaaactgctatatattgtttgccatatattatggcccaaggaatatagttataatcaggctacattcacattttcttttctcatcttaaaaccctttatgttcaaaatacattagcagaggccatgaaagtgaaaaaaaatcagatttttgctagtaagtttttatatttgacatcattttaaatgctcaaagagttgccctatatatgcatgttatccattataaatgcactcagcagctaagagaaatttgagaggaaaagtggaagaagtgttttctggagcagaagattccacttctttggtcctcatctttacttaaaaagctcttatagaaaggattaatcattttgactgcatacaaactatgtctctgacatgcacatacactgctttataatgaaaatgaggacactttctgatggtcagtaaaatcttaaatgatttttgccactggtattccttcctcttttgactttttattggtacaactgtagggaagaatctacaacctggagcatttcaggtttgctctttaaatatagacacccctcaccatgagctctctgtgaatccgtgaatttcctaaaattgtaagcaaaatgttgaatatcagggcatttttttttctgaggtgggagtatgtcactcacagcaaacttggaaagaaggctatgactcccaagaggcagtgaaccattgccttaaattaatagcagcctctcaagtccattgaggcctcatgtaaaattcccatttttcatctttacactccttttctcccctcatttcctcttctccttactaaggtaaaaagaccctgcacagcattattacttaagttgaaaaagcttcaactctcaaggactcatgtataccatatgttccacttattgctttgttagtcaaaatgcatgttatgtagaaaatggtcaatggcaaatttttataaatacagctaccccatcaaagctgaacttgaaacgttttagcagaattttaaatatgtgaaagttcattgtggtcatggtgagaaaactaaaactacatgagtttcatgttagaaaagaatttttaaacaatcttcagatggcttgaacacgtgccattatagtatctaacaaaaagtggcataaaatattacaaaacatccaacactagaaagcaatgactaacatttaatttgtttacaaaaatgtttattgtcttcagtacaaaaagttaaaaccatgattggattcataatgcacttgtcttatcccttatttatggagctagactgacatatttcaaaccaatctcttctgtggtcttctccatctcagttaatgcaacttcaaccttccagatgctcaggtcaaaaactgaaagttgcttttgactcctctatttctgtttcaactctcgtctaatccaacagcaaatccccttgatgctacctttgaaatataactagaaaagaatgacttgccaccatatccactaggtgtcactacctctaacctttttaatcgcaatatgcttattatttagttccctaatttcccagtccttgtcttgaacaatcttttctcagtacaacagccatagtgattctgttaaccatgaatttgattgtgtcacttccctgctcacaatcttccaatgacttctccctccggtggccttcaaggtcctttatgagtgttacccctctacacgtccacaccactcaccacacatacatacacatgcacacacacacacatgcaattctacctttttctaacaccatctcttatctctcattattctgcctcttacttaccctattatggctcccaagaaagttcctgctttagtgttttgttccctctgccccagagagctccccttagtgatctcagttcaaatattatcttatcagtaagacaaacccttctcccatctgccttccctatcccctgtacctgacaatctatgagtttgcttctttatttctgtctatacttccccctccccagccccaaacatgcccatcacatgccctagaaggtaagtcccatgaaggcaggggctttgtcagttttgttcatttggtatttctggcatatatattctctaaatatttcttgaattaatgaactgaaaaatgtgtgttaaagttgctaagtgtaactgtatcatactttttttgtattttaaattttaaaataaaggctaatatatttagacaggatttccaaaaa

SEQ ID NO: 33785 - DNA, 2591 bp, Homo sapiens
  source 1..2591: mol_type = unassigned DNA
atgaggagatttgtctactgcaaggtggttctagccacttcgctgatgtgggttcttgttgatgtcttcttactgctgtacttcagtgaatgtaacaaatgtgatgacaagaaggagagatctctgctgcctgcattgagggctgttatttcaagaaaccaagaagggccaggagaaatgggaaaagctgtgttgattcctaaagatgaccaggagaaaatgaaagagctgtttaaaatcaatcagtttaaccttatggccagtgatttgattgcccttaatagaagtctgccagatgtaagattagaaggatgtaagacaaaagtctaccctgatgaacttccaaacacaagtgtagtcattgtgtttcataatgaagcttggagcactctccttagaactgtttacagtgtgataaatcgttccccacactatctactctcagaggtcatcttggtagatgatgccagtgaaagagattttctcaagttgacattagagaattacgtgaaaaatttagaagtgccagtaaaaattattaggatggaagaacgctctgggttaatacgtgcccgtcttcgaggagcagctgcttcaaaagggcaggtcataacttttcttgatgcacactgtgaatgcacgttaggatggctggagcctttgctggcaagaataaaggaagacaggaaaacggttgtctgccctatcattgatgtgattagtgatgatacttttgaatatatggctgggtcagacatgacttatgggggttttaactggaaactgaatttccgctggtatcctgttccccaaagagaaatggacaggaggaaaggagacagaacattacctgtcaggacccctactatggctggtggcctattttctattgacagaaactactttgaagagataggaacttacgatgcaggaatggatatctggggtggagagaatcttgaaatgtcttttaggatttggcaatgtggaggctccttggagattgttacttgctcccatgttggtcatgtttttcggaaggcaactccatacacttttcctggtggcactggtcatgtcatcaacaagaacaacaggagactggcagaagtttggatggatgaatttaaagatttcttctacatcatatccccaggtgttgtcaaagtggattatggagatgtgtcagtcagaaaaacactaagagaaaatctgaagtgtaagcccttttcttggtacctagaaaacatctatccggactcccagatcccaagacgttattactcacttggtgagataagaaatgttgaaaccaatcagtgtttagacaacatgggccgcaaggaaaatgaaaaagtgggtatattcaactgtcatggtatgggaggaaatcaggtattttcttacactgctgacaaagaaatccgaaccgatgacttgtgcttggatgtttctagactcaatggacctgtaatcatgttaaaatgccaccatatgagaggaaatcagttatgggaatatgatgctgagtcttgtctctcagtgaacaaagtagctgatggctcccagcatcctactgtggaaacctgtaatgatagcactttgcaaaaatggctactaagaaactatacaagaatggaaatttttagaaatatttttgggaattctactgattacattctctaatgatttttggagagactcacgttgcgacatgttaacagtaaccaatgtctcgatgaaccttctgaagaagacaaaatggtgcctacaatgcaggactgtagtggaagcagatcccaacagtggctgctaaggaacatgaccttgggcacatgaagatcatgtcctccaagccatgaaagtgtctacgcttttgtttttccattatttcaattgggggaaaatattaactttgctgaattgaaagttttaaaaatccttttagtattctaaaacacaattgtttctaattcgtttctagaaatgtttgcttatttccctactaaaatttgtatctgatcaaagcacataagaatataaataatagcaaactactattaaacaacagaacaacttgtaaaacaaattgtgtttgctttaagaaaaatgtttattgcactcatgtcatagggttaattggaggttattttatttttggttgtcatggtgattgaaagagataatgtaaatgccttataaaatcttcattatgaaatattatcagttgctttataaactcactctttttatggatccttcatggaaacatgtttgatttctgtgtctacaacagggccacatattaaattacttctgaatggtgaattcatcttacaaaatgttccaagttttggacaaggaaaaacattacattggatattgaattcatggagcctttacagaagcatcacatttaaaccaatgtgaattcaaaaaagagaaggaaactttttaaattcaatttagagtacataaaaaaagaaatccgcgaagcattgaggggaacaagatgagtctaatccgcagcacttcgatcactgtgagagaactcaaagtgggttgcaatcattcctaacacaggctgaaac

SEQ ID NO: 33786 - DNA, 510 bp, Homo sapiens
  source 1..510: mol_type = unassigned DNA
aacgtgctagcagccctcgctcgctctgggcgcctcctcggcctcagcgtccgctctggccgcgctcgaggagcccttcagcccgccgctgcgctatgaaggcccctctctggggctggccgaggctggagccggctccctctgctcgcgggcaagtgtgaagagagaggcgcgggcgggagccggggctgcgcgcggcgctcgcgggccggcgcgggttccagatgcatttttgtagaagcattttgaggatgaatgtttgcaaatcattttgaaattgccaagtgccacatacaatttaattggatttgagggaaatacaggctgcaatggtgggaatagttaaaatggaatgtatcctgctttcatcttggagttcacctgtgtggcttggatttatcacagtagcatttgtcttcaatctgtgtgttaactagaaatcaaggaaagacatgaggagatttgtctactgcaaggtggttctagccacttcgctgatgtgggttcttg

SEQ ID NO: 33787 - DNA, 2733 bp, Homo sapiens
  source 1..2733: mol_type = unassigned DNA
ggcatcccgagtgcaccgctcccgccccgccccgccttgccccaacccacgatggtctgggagctgcgcccagggcttggcgctggcggccccgcaacagcaccgagcgtttcggtcggcgggcggcggtagcgccccctctcagagccccgctcactcccacctgggctcgctccgagtcggcctgtctgtcgggcccgccctccccgctcactccctccgccctcgtgctcctcccggggtgcttggcacagcctcggattcctccctctcgctgctcgagtcagtttccctatcggcggcagcgggcaaggcggcggcggcggcggcggcagccgcggtggcggcgtggggaacatctcggcagccaccgcgcttctcccgctggagcgggcgtccagcttggctgccctcggtccttccctgccacgtttcgggtcgccctgcaccccccacccaggctcgcttctcttcgaagcgggaagggcgccttgcaggatcctgccgcccctccaaccggatcctgggtctagagctccccagagcgaggcgctcgccaggactcctgccccgccaaccctgaccgccggggggtgcccccgggacgtagcgccgcggagaggaagcggcaaaggggaccatgcggcgcctgactcgtcggctggttctgccagtcttcggggtgctctggatcacggtgctgctgttcttctgggtaaccaagaggaagttggaggtgccgacgggacctgaagtgcagacccctaagccttcggacgctgactgggacgacctgtgggaccagtttgatgagcggcggtatctgaatgccaaaaagtggcgcgttggtgacgacccctataagctgtatgctttcaaccagcgggagagtgagcggatctccagcaatcgggccatcccggacactcgccatctgagatgcacactgctggtgtattgcacggaccttccacccactagcatcatcatcaccttccacaacgaggcccgctccacgctgctcaggaccatccgcagtgtattaaaccgcacccctacgcatctgatccgggaaatcatattagtggatgacttcagcaatgaccctgatgactgtaaacagctcatcaagttgcccaaggtgaaatgcttgcgcaataatgaacggcaaggtctggtccggtcccggattcggggcgctgacatcgcccagggcaccactctgactttcctcgacagccactgtgaggtgaacagggactggctccagcctctgttgcacagggtcaaagaggactacacgcgggtggtgtgccctgtgatcgatatcattaacctggacaccttcacctacatcgagtctgcctcggagctcagaggggggtttgactggagcctccacttccagtgggagcagctctccccagagcagaaggctcggcgcctggaccccacggagcccatcaggactcctatcatagctggagggctcttcgtgatcgacaaagcttggtttgattacctggggaaatatgatatggacatggacatctggggtggggagaactttgaaatctccttccgagtgtggatgtgcgggggcagcctagagatcgtcccctgcagccgagtggggcacgtcttccggaagaagcacccctacgttttccctgatggaaatgccaacacgtatataaagaacaccaagcggacagctgaagtgtggatggatgaatacaagcaatactattacgctgcccggccattcgccctggagaggcccttcgggaatgttgagagcagattggacctgaggaagaatctgcgctgccagagcttcaagtggtacctggagaatatctaccctgaactcagcatccccaaggagtcctccatccagaagggcaatatccgacagagacagaagtgcctggaatctcaaaggcagaacaaccaagaaaccccaaacctaaagttgagcccctgtgccaaggtcaaaggcgaagatgcaaagtcccaggtatgggccttcacatacacccagcagatcctccaggaggagctgtgcctgtcagtcatcaccttgttccctggcgccccagtggttcttgtcctttgcaagaatggagatgaccgacagcaatggaccaaaactggttcccacatcgagcacatagcatcccacctctgcctcgatacagatatgttcggtgatggcaccgagaacggcaaggaaatcgtcgtcaacccatgtgagtcctcactcatgagccagcactgggacatggtgagctcttgaggacccctgccagaagcagcaagggccatggggtggtgcttccctggaccagaacagactggaaactgggcagcaagcagcctgcaaccacctcagacatcctggactgggaggtggaggcagagccccccaggacaggagcaactgtctcagggaggacagaggaaaacatcacaagccaatggggctcaaagacaaatcccacatgttctcaaggccgttaagttccagtcctggccagtcattccctgattggtatctggagacagaaacctaatgggaagtgtttattgttccttttcctacaaaggaagcagtctctggaggccagaaagaaaagccttctttttcactaggccaggactacattgagagatgaagaatggaggttgtttccaaaagaaataaagagaaacttagaagttgtctctgga

SEQ ID NO: 33788 - DNA, 1996 bp, Homo sapiens
  source 1..1996: mol_type = unassigned DNA
aaaggggaccatgcggcgcctgactcgtcggctggttctgccagtcttcggggtgctctggatcacggtgctgctgttcttctgggtaaccaagaggaagttggaggtgccgacgggacctgaagtgcagacccctaagccttcggacgctgactgggacgacctgtgggaccagtttgatgagcggcggtatctgaatgccaaaaagtggcgcgttggtgacgacccctataagctgtatgctttcaaccagcgggagagtgagcggatctccagcaatcgggccatcccggacactcgccatctgagtgtattaaaccgcacccctacgcatctgatccgggaaatcatattagtggatgacttcagcaatgaccctgatgactgtaaacagctcatcaagttgcccaaggtgaaatgcttgcgcaataatgaacggcaaggtctggtccggtcccggattcggggcgctgacatcgcccagggcaccactctgactttcctcgacagccactgtgaggtgaacagggactggctccagcctctgttgcacagggtcaaagaggactacacgcgggtggtgtgccctgtgatcgatatcattaacctggacaccttcacctacatcgagtctgcctcggagctcagaggggggtttgactggagcctccacttccagtgggagcagctctccccagagcagaaggctcggcgcctggaccccacggagcccatcaggactcctatcatagctggagggctcttcgtgatcgacaaagcttggtttgattacctggggaaatatgatatggacatggacatctggggtggggagaactttgaaatctccttccgagtgtggatgtgcgggggcagcctagagatcgtcccctgcagccgagtggggcacgtcttccggaagaagcacccctacgttttccctgatggaaatgccaacacgtatataaagaacaccaagcggacagctgaagtgtggatggatgaatacaagcaatactattacgctgcccggccattcgccctggagaggcccttcgggaatgttgagagcagattggacctgaggaagaatctgcgctgccagagcttcaagtggtacctggagaatatctaccctgaactcagcatccccaaggagtcctccatccagaagggcaatatccgacagagacagaagtgcctggaatctcaaaggcagaacaaccaagaaaccccaaacctaaagttgagcccctgtgccaaggtcaaaggcgaagatgcaaagtcccaggtatgggccttcacatacacccagcagatcctccaggaggagctgtgcctgtcagtcatcaccttgttccctggcgccccagtggttcttgtcctttgcaagaatggagatgaccgacagcaatggaccaaaactggttcccacatcgagcacatagcatcccacctctgcctcgatacagatatgttcggtgatggcaccgagaacggcaaggaaatcgtcgtcaacccatgtgagtcctcactcatgagccagcactgggacatggtgagctcttgaggacccctgccagaagcagcaagggccatggggtggtgcttccctggaccagaacagactggaaactgggcagcaagcagcctgcaaccacctcagacatcctggactgggaggtggaggcagagccccccaggacaggagcaactgtctcagggaggacagaggaaaacatcacaagccaatggggctcaaagacaaatcccacatgttctcaaggccgttaagttccagtcctggccagtcattccctgattggtatctggagacagaaacctaatgggaagtgtttattgttccttttcctacaaaggaagcagtctctggaggccagaaagaaaagccttctttttcactaggccaggactacattgagagatgaagaatggaggttgtttccaaaagaaataaagagaaacttagaagttg

SEQ ID NO: 33789 - DNA, 2496 bp, Homo sapiens
  source 1..2496: mol_type = unassigned DNA
actgaaaaattagctggtgcctgtatttcaggcttattgtttcctaggatctcagggagatcaggccacgtggtctgtggattaattaaggcacccagataattggctattaatagatggccaattgatggctgccagctgggtgctgaattgactaatgtccttatggtgggcaggtggtctttatcagaagaggagctagctgaaagactttactaattaaagggtgaatcaggaaaagaagataagaggtagcttttttccccaccacttggtgtgatgttttacagtttacaaagcatttatatccacagttgcctcatttgatccttactgcgactttgtgaggtttggtccttgtttttcaaggtggctgggatgagcccttgggcgcctcaggtgcctgtatcacccactcctccctaccaaagagggcatcttcctacaggaggacaccttgctgtatgtcatttcccatgtctcttgcaagaagctcagttccatttgcagactcaggtctttcttcaagtcagccttcggacgctgactgggacgacctgtgggaccagtttgatgagcggcggtatctgaatgccaaaaagtggcgcgttggtgacgacccctataagctgtatgctttcaaccagcgggagagtgagcggatctccagcaatcgggccatcccggacactcgccatctgagatgcacactgctggtgtattgcacggaccttccacccactagcatcatcatcaccttccacaacgaggcccgctccacgctgctcaggaccatccgcagtgtattaaaccgcacccctacgcatctgatccgggaaatcatattagtggatgacttcagcaatgaccctgatgactgtaaacagctcatcaagttgcccaaggtgaaatgcttgcgcaataatgaacggcaaggtctggtccggtcccggattcggggcgctgacatcgcccagggcaccactctgactttcctcgacagccactgtgaggtgaacagggactggctccagcctctgttgcacagggtcaaagaggactacacgcgggtggtgtgccctgtgatcgatatcattaacctggacaccttcacctacatcgagtctgcctcggagctcagaggggggtttgactggagcctccacttccagtgggagcagctctccccagagcagaaggctcggcgcctggaccccacggagcccatcaggactcctatcatagctggagggctcttcgtgatcgacaaagcttggtttgattacctggggaaatatgatatggacatggacatctggggtggggagaactttgaaatctccttccgagtgtggatgtgcgggggcagcctagagatcgtcccctgcagccgagtggggcacgtcttccggaagaagcacccctacgttttccctgatggaaatgccaacacgtatataaagaacaccaagcggacagctgaagtgtggatggatgaatacaagcaatactattacgctgcccggccattcgccctggagaggcccttcgggaatgttgagagcagattggacctgaggaagaatctgcgctgccagagcttcaagtggtacctggagaatatctaccctgaactcagcatccccaaggagtcctccatccagaagggcaatatccgacagagacagaagtgcctggaatctcaaaggcagaacaaccaagaaaccccaaacctaaagttgagcccctgtgccaaggtcaaaggcgaagatgcaaagtcccaggtatgggccttcacatacacccagcagatcctccaggaggagctgtgcctgtcagtcatcaccttgttccctggcgccccagtggttcttgtcctttgcaagaatggagatgaccgacagcaatggaccaaaactggttcccacatcgagcacatagcatcccacctctgcctcgatacagatatgttcggtgatggcaccgagaacggcaaggaaatcgtcgtcaacccatgtgagtcctcactcatgagccagcactgggacatggtgagctcttgaggacccctgccagaagcagcaagggccatggggtggtgcttccctggaccagaacagactggaaactgggcagcaagcagcctgcaaccacctcagacatcctggactgggaggtggaggcagagccccccaggacaggagcaactgtctcagggaggacagaggaaaacatcacaagccaatggggctcaaagacaaatcccacatgttctcaaggccgttaagttccagtcctggccagtcattccctgattggtatctggagacagaaacctaatgggaagtgtttattgttccttttcctacaaaggaagcagtctctggaggccagaaagaaaagccttctttttcactaggccaggactacattgagagatgaagaatggaggttgtttccaaaagaaataaagagaaacttagaagttgtctctgg

SEQ ID NO: 33790 - DNA, 1831 bp, Homo sapiens
  source 1..1831: mol_type = unassigned DNA
gttcttctgggtaaccaagaggaagttggaggtgccgacgggacctgaagtgcagacccctaagaattgaaaacagtttgcagctgacacctgagcctacccatttcgttctgaatgcaatttcagcagcccactgtagctcccctgctctccctcccaggcatggaacagccatggcccaagatgagtcgtgtccaccttcggacgctgactgggacgacctgtgggaccagtttgatgagcggcggtatctgaatgccaaaaagtggcgcgttggtgacgacccctataagctgtatgctttcaaccagcgggagagtgagcggatctccagcaatcgggccatcccggacactcgccatctgagatgcacactgctggtgtattgcacggaccttccacccactagcatcatcatcaccttccacaacgaggcccgctccacgctgctcaggaccatccgcagtgtattaaaccgcacccctacgcatctgatccgggaaatcatattagtggatgacttcagcaatgaccctgatgactgtaaacagctcatcaagttgcccaaggtgaaatgcttgcgcaataatgaacggcaaggtctggtccggtcccggattcggggcgctgacatcgcccagggcaccactctgactttcctcgacagccactgtgaggtgaacagggactggctccagcctctgttgcacagggtcaaagaggactacacgcgggtggtgtgccctgtgatcgatatcattaacctggacaccttcacctacatcgagtctgcctcggagctcagaggggggtttgactggagcctccacttccagtgggagcagctctccccagagcagaaggctcggcgcctggaccccacggagcccatcaggactcctatcatagctggagggctcttcgtgatcgacaaagcttggtttgattacctggggaaatatgatatggacatggacatctggggtggggagaactttgaaatctccttccgagtgtggatgtgcgggggcagcctagagatcgtcccctgcagccgagtggggcacgtcttccggaagaagcacccctacgttttccctgatggaaatgccaacacgtatataaagaacaccaagcggacagctgaagtgtggatggatgaatacaagcaatactattacgctgcccggccattcgccctggagaggcccttcgggaatgttgagagcagattggacctgaggaagaatctgcgctgccagagcttcaagtggtacctggagaatatctaccctgaactcagcatccccaaggagtcctccatccagaagggcaatatccgacagagacagaagtgcctggaatctcaaaggcagaacaaccaagaaaccccaaacctaaagttgagcccctgtgccaaggtcaaaggcgaagatgcaaagtcccaggtatgggccttcacatacacccagcagatcctccaggaggagctgtgcctgtcagtcatcaccttgttccctggcgccccagtggttcttgtcctttgcaagaatggagatgaccgacagcaatggaccaaaactggttcccacatcgagcacatagcatcccacctctgcctcgatacagatatgttcggtgatggcaccgagaacggcaaggaaatcgtcgtcaacccatgtgagtcctcactcatgagccagcactgggacatggtgagctcttgaggacccctgccagaagcagcaagggccatggggtggtgcttccctggaccagaacagactggaaactgggcagcaagcagcctgcaaccacctcagacatcctg

SEQ ID NO: 33791 - DNA, 2169 bp, Homo sapiens
  source 1..2169: mol_type = unassigned DNA
ctgaccgccggggggtgcccccgggacgtagcgccgcggagaggaagcggcaaaggggaccatgcggcgcctgactcgtcggctggttctgccagtcttcggggtgctctggatcacggtgctgctgttcttctgggtaaccaagaggaagttggaggtgccgacgggacctgaagtgcagacccctaaggtttggtccttgtttttcaaggtggctgggatgagcccttgggcgcctcaggtgcctgtatcacccactcctccctaccaaagagggcatcttcctacaggaggacaccttgctgtatgtcatttcccatgtctcttgcaagaagctcagttccatttgcagactcaggtctttcttcaagtcagatgcacactgctggtgtattgcacggaccttccacccactagcatcatcatcaccttccacaacgaggcccgctccacgctgctcaggaccatccgcagtgtattaaaccgcacccctacgcatctgatccgggaaatcatattagtggatgacttcagcaatgaccctgatgactgtaaacagctcatcaagttgcccaaggtgaaatgcttgcgcaataatgaacggcaaggtctggtccggtcccggattcggggcgctgacatcgcccagggcaccactctgactttcctcgacagccactgtgaggtgaacagggactggctccagcctctgttgcacagggtcaaagaggactacacgcgggtggtgtgccctgtgatcgatatcattaacctggacaccttcacctacatcgagtctgcctcggagctcagaggggggtttgactggagcctccacttccagtgggagcagctctccccagagcagaaggctcggcgcctggaccccacggagcccatcaggactcctatcatagctggagggctcttcgtgatcgacaaagcttggtttgattacctggggaaatatgatatggacatggacatctggggtggggagaactttgaaatctccttccgagtgtggatgtgcgggggcagcctagagatcgtcccctgcagccgagtggggcacgtcttccggaagaagcacccctacgttttccctgatggaaatgccaacacgtatataaagaacaccaagcggacagctgaagtgtggatggatgaatacaagcaatactattacgctgcccggccattcgccctggagaggcccttcgggaatgttgagagcagattggacctgaggaagaatctgcgctgccagagcttcaagtggtacctggagaatatctaccctgaactcagcatccccaaggagtcctccatccagaagggcaatatccgacagagacagaagtgcctggaatctcaaaggcagaacaaccaagaaaccccaaacctaaagttgagcccctgtgccaaggtcaaaggcgaagatgcaaagtcccaggtatgggccttcacatacacccagcagatcctccaggaggagctgtgcctgtcagtcatcaccttgttccctggcgccccagtggttcttgtcctttgcaagaatggagatgaccgacagcaatggaccaaaactggttcccacatcgagcacatagcatcccacctctgcctcgatacagatatgttcggtgatggcaccgagaacggcaaggaaatcgtcgtcaacccatgtgagtcctcactcatgagccagcactgggacatggtgagctcttgaggacccctgccagaagcagcaagggccatggggtggtgcttccctggaccagaacagactggaaactgggcagcaagcagcctgcaaccacctcagacatcctggactgggaggtggaggcagagccccccaggacaggagcaactgtctcagggaggacagaggaaaacatcacaagccaatggggctcaaagacaaatcccacatgttctcaaggccgttaagttccagtcctggccagtcattccctgattggtatctggagacagaaacctaatgggaagtgtttattgttccttttcctacaaaggaagcagtctctggaggccagaaagaaaagccttctttttcactaggccaggactacattgagagatgaagaatggaggttgtttccaaaagaaataaagagaaacttagaagttgtctctgga

SEQ ID NO: 33792 - DNA, 4454 bp, Homo sapiens
  source 1..4454: mol_type = unassigned DNA
ccaccgcgcccgcggccggcccaggcagcactcgcgagcagcggcggccccgccggcggccgagttgggagaatgcggcggcgctcgcggatgctgctctgcttcgccttcctgtgggtgctgggcatcgcctactacatgtactcggggggcggctctgcgctggccgggggcgcgggcggcggcgccggcaggaaggaggactggaatgaaattgaccccattaaaaagaaagaccttcatcacagcaatggagaagagaaagcacaaagcatggagaccctccctccagggaaagtacggtggccagactttaaccaggaagcttatgttggagggacgatggtccgctccgggcaggacccttacgcccgcaacaagttcaaccaggtggagagtgataagcttcgaatggacagagccatccctgacacccggcatgaccagtgtcagcggaagcagtggcgggtggatctgccggccaccagcgtggtgatcacgtttcacaatgaagccaggtcggccctactcaggaccgtggtcagcgtgcttaagaaaagcccgccccatctcataaaagaaatcatcttggtggatgactacagcaatgatcctgaggacggggctctcttggggaaaattgagaaagtgcgagttcttagaaatgatcgacgagaaggcctcatgcgctcacgggttcggggggccgatgctgcccaagccaaggtcctgaccttcctggacagtcactgcgagtgtaatgagcactggctggagcccctcctggaaagggtggcggaggacaggactcgggttgtgtcacccatcatcgatgtcattaatatggacaactttcagtatgtgggggcatctgctgacttgaagggcggttttgattggaacttggtattcaagtgggattacatgacgcctgagcagagaaggtcccggcaggggaacccagtcgcccctataaaaacccccatgattgctggtgggctgtttgtgatggataagttctattttgaagaactggggaagtacgacatgatgatggatgtgtggggaggagagaacctagagatctcgttccgcgtgtggcagtgtggtggcagcctggagatcatcccgtgcagccgtgtgggacacgtgttccggaagcagcacccctacacgttcccgggtggcagtggcactgtctttgcccgaaacacccgccgggcagcagaggtctggatggatgaatacaaaaatttctattatgcagcagtgccttctgctagaaacgttccttatggaaatattcagagcagattggagcttaggaagaaactcagctgcaagcctttcaaatggtaccttgaaaatgtctatccagagttaagggttccagaccatcaggatatagcttttggggccttgcagcagggaactaactgcctcgacactttgggacactttgctgatggtgtggttggagtttatgaatgtcacaatgctgggggaaaccaggaatgggccttgacgaaggagaagtcggtgaagcacatggatttgtgccttactgtggtggaccgggcaccgggctctcttataaagctgcagggctgccgagaaaatgacagcagacagaaatgggaacagatcgagggcaactccaagctgaggcacgtgggcagcaacctgtgcctggacagtcgcacggccaagagcgggggcctaagcgtggaggtgtgtggcccggccctttcgcagcagtggaagttcacgctcaacctgcagcagtaggagggtccgggaggccctgccgtcctgtctcctgcaccattgggtggagtctggtgatcacattattgattatgtttcttaaactttccgcgaaactaatatacctcagtattccatcatggtctgaaagtcaaacttcggcaaggcacggacgactgtgcagacacagcagcggcaagaagcgagaactgccctccccctcctctcggtgcagcccagccgggcccccttccccaggccggagcgcccctcttccttccagctttcacttctgccggctccgcaactgagtgacacccagcgacaaccgactggggagtggtagaagcaactgaacggatgcgtgcgagctgaggacagggcgggaggagggggcacacatgccccaggggagcgaggagaactcttgaaatctccattttcaatcccttcgaaatcacgtatggtttccacaaagccgagtcgtgtcacgtggcaggtttacgtcaatagtccctctctctgctcctccattcgcaagtgtcttcctgggccagactcccctccacctcatgtacttgctatattgaggatgaagttttctatggtgggacactaaatataaagctatatagagaaagaatgtacggtcagttccctatggtttctgtagatcatcgtcatcttgtatattccccacaaagccgttcgcagcttccgggagaaggggccagagcccggtggggccagtttctcacagagggaggaggtggcctttgtcccctggagcccgatcagccagttggtgctactgctgtggccagctggggggcttcctccagaccaccggcctcggccccggcatccctgttgggcgtcagcctgagagtccctactgtgcgtcagaatccaccttgcgtgctgtgcgtatctgtgaacctggagcggttacttattttgacagatatcactttgggtctttttacattaaatttcttttctctaaggaatataagacataccccatagctctgtgtgagccagcaataccgctgccccctggcgacagggcagaccaatgatgccaggcagctgtcacacgctagtattggcttcattgtgatctgagccctgcacgctgggccttcagaattaatggccagcagtgtcagggatgagcccgtcagccagggcacaggcctggctcacagtcctgcacacctgctggcctggggagctccagccaggcagcgagtcctgccccgcccgcagctccctcccacaccccgcctggccaagatgactgcttcagggggctttggggaaagaattaggaagggtcagaaccaaacaatacctgctcatttacactgaggattcagggcgggagacaggagccttggggtcctgttaaaccacagacagttatgaactgaaagtcataacggggagaggtgcctggcttctacctgggtgctcaggaatgttcctcgtcacccctgccactctgtggtcggtgccctgcttcctcctccactcctggccgccttctccagcgccgcacacacagatgctcagtctcagagaggctggcacggcctggcagtctgagaaaagcgtcagttaggcacacctgcaggcccctcggtgggacagcggcggccttggagttaggagccaccctgggaggttgtgccggtgccatgctcctccctgtgtcttgtatgaaaggggccactgtgtgtcttcctccccggcgggagccccacatgtgtgcactgtaggacagcggccccgaggtggaagcctggctggagggctgccctataggtcttctcttcccgcctcccctgccatgcaaccagatgtgttgtgagtgggcagcgtgcccccacgctggagtaactccgcacgcttctgtctttcacggtgggcgctcggggggagcctgaggaaaacccccttaggtacctgtgcgaggctgtggagtgcaggccagagcagggtgtgcgtagcccccagcacccaggttcttctgtcagaccctgtgacctgcgagctgctactactgtaaggagggaaatggatgaatctggctcgttttaaaatcacgttttctgacgaatcctttgccccttcacctttaccccgcccgcacccctaggccctctcagccttcctatcatcccacgtgtctacccagacccttgtgcggcccatgccctgggggcggcgtcctgtccctgagctgggaggcggctttggatggtccgggcgtcaagagcaggggtgggccggggaggggtcctttgcggtgagctatgtttacatgacacagtgtgccaaagtgacttactgcggttgcgttagtttttaatcatcaggactatctcaccctcccactcctgtttttaaaactcagaattctttcctaagagcccttcgagcaaagcgtgccgaagttagttgtcttctctgtgctggtcctttcttatgtcctcataaaagctcagatgatggtatctgtgagtatgttttgcaaattcaaaatatagtttggtaatttttttttccagttgatttttaaaaagaactgctgtacagagcttgtactttgtccattttatagatggaaaccatccttgaaaattgtttaacttaaataaagagaagatactttctagata

SEQ ID NO: 33793 - DNA, 1341 bp, Homo sapiens
  source 1..1341: mol_type = unassigned DNA
agttgggagaatgcggcggcgctcgcggatgctgctctgcttcgccttcctgtgggtgctgggcatcgcctactacatgtactcggggggcggctctgcgctggccgggggcgcgggcggcggcgccggcaggaagggaaagtacggtggccagactttaaccaggaagcttatgttggagggacgatggtccgctccgggcaggacccttacgcccgcaacaagttcaaccaggtggagagtgataagcttcgaatggacagagccatccctgacacccggcatgaccagtgtcagcggaagcagtggcgggtggatctgccggccaccagcgtggtgatcacgtttcacaatgaagccaggtcggccctactcaggaccgtggtcagcgtgcttaagaaaagcccgccccatctcataaaagaaatcatcttggtggatgactacagcaatgatcctgaggacggggctctcttggggaaaattgagaaagtgcgagttcttagaaatgatcgacgagaaggcctcatgcgctcacgggttcggggggccgatgctgcccaagccaaggtcctgaccttcctggacagtcactgcgagtgtaatgagcactggctggagcccctcctggaaagggtggcggaggacaggactcgggttgtgtcacccatcatcgatgtcattaatatggacaactttcagtatgtgggggcatctgctgacttgaagggcggttttgattggaacttggtattcaagtgggattacatgacgcctgagcagagaaggtcccggcaggggaacccagtcgcccctataaaagatctcgttccgcgtgtggcagtgtggtggcagcctggagatcatcccgtgcagccgtgtgggacacgtgttccggaagcagcacccctacacgttcccgggtggcagtggcactgtctttgcccgaaacacccgccgggcagcagaggtctggatggatgaatacaaaaatttctattatgcagcagtgccttctgctagaaacgttccttatggaaatattcagagcagattggagcttaggaagaaactcagctgcaagcctttcaaatggtaccttgaaaatgtctatccagagttaagggttccagaccatcaggatatagcttttggggccttgcagcagggaactaactgcctcgacactttgggacactttgctgatggtgtggttggagtttatgaatgtcacaatgctgggggaaaccaggaatgggccttgacgaaggagaagtcggtgaagcacatggatttgtgccttactgtggtggaccgggcaccgggctctcttataaagct

SEQ ID NO: 33794 - DNA, 1167 bp, Homo sapiens
  source 1..1167: mol_type = unassigned DNA
actcgcgagcagcggcggccccgccggcggccgagttgggagaatgcggcggcgctcgcggatgctgctctgcttcgccttcctgtgggtgctgggcatcgcctactacatgtactcggggggcggctctgcgctggccgggggcgcgggcggcggcgccggcaggaaggaggactggaatgaaattgaccccattaaaaagaaagaccttcatcacagcaatggagctgaggacggggctctcttggggaaaattgagaaagtgcgagttcttagaaatgatcgacgagaaggcctcatgcgctcacgggttcggggggccgatgctgcccaagccaaggtcctgaccttcctggacagtcactgcgagtgtaatgagcactggctggagcccctcctggaaagggtggcggaggacaggactcgggttgtgtcacccatcatcgatgtcattaatatggacaactttcagtatgtgggggcatctgctgacttgaagggcggttttgattggaacttggtattcaagtgggattacatgacgcctgagcagagaaggtcccggcaggggaacccagtcgcccctataaaaacccccatgattgctggtgggctgtttgtgatggataagttctattttgaagaactggggaagtacgacatgatgatggatgtgtggggaggagagaacctagagatctcgttccgcgtgtggcagtgtggtggcagcctggagatcatcccgtgcagccgtgtgggacacgtgttccggaagcagcacccctacacgttcccgggtggcagtggcactgtctttgcccgaaacacccgccgggcagcagaggtctggatggatgaatacaaaaatttctattatgcagcagtgccttctgctagaaacgttccttatggaaatattcagagcagattggagcttaggaagaaactcagctgcaagcctttcaaatggtaccttgaaaatgtctatccagagttaagggttccagaccatcaggatatagcttttggggccttgcagcagggaactaactgcctcgacactttgggacactttgctgatggtgtggttggagtttatgaatgtcacgtggcaggtttacgtcaatagtccctctctctgctcctccattcgcaagtgtcttcctg

SEQ ID NO: 33795 - DNA, 2239 bp, Homo sapiens
  source 1..2239: mol_type = unassigned DNA
aggcacacaaggaactggctaccggaggagctgcggggcgtcttgagaagaagcttaccctaaaggaaggtagcaaccacaggcaggaggggtaggaaatgggaaggggcattgctggggttaggtaagtgtcgtccggggctaggaggattccgctggctcctttccccaggacgaagggaggaaagggctctgatacaagagtgtacacgaacgaaaagcactggctggagatcatctatgtggaatgtggacagggcaaggtgcccgtagcccctatggctgacagagaggactggaatgaaattgaccccattaaaaagaaagaccttcatcacagcaatggagaagagaaagcacaaagcatggagaccctccctccagggaaagtacggtggccagactttaaccaggaagcttatgttggagggacgatggtccgctccgggcaggacccttacgcccgcaacaagttcaaccaggtggagagtgataagcttcgaatggacagagccatccctgacacccggcatgaccagtgtcagcggaagcagtggcgggtggatctgccggccaccagcgtggtgatcacgtttcacaatgaagccaggtcggccctactcaggaccgtggtcagcgtgcttaagaaaagcccgccccatctcataaaagaaatcatcttggtggatgactacagcaatgatcctgaggacggggctctcttggggaaaattgagaaagtgcgagttcttagaaatgatcgacgagaaggcctcatgcgctcacgggttcggggggccgatgctgcccaagccaaggtcctgaccttcctggacagtcactgcgagtgtaatgagcactggctggagcccctcctggaaagggtggcggaggacaggactcgggttgtgtcacccatcatcgatgtcattaatatggacaactttcagtatgtgggggcatctgctgacttgaagggcggttttgattggaacttggtattcaagtgggattacatgacgcctgagcagagaaggtcccggcaggggaacccagtcgcccctataaaaacccccatgattgctggtgggctgtttgtgatggataagttctattttgaagaactggggaagtacgacatgatgatggatgtgtggggaggagagaacctagagatctcgttccgcgtgtggcagtgtggtggcagcctggagatcatcccgtgcagccgtgtgggacacgtgttccggaagcagcacccctacacgttcccgggtggcagtggcactgtctttgcccgaaacacccgccgggcagcagaggtctggatggatgaatacaaaaatttctattatgcagcagtgccttctgctagaaacgttccttatggaaatattcagagcagattggagcttaggaagaaactcagctgcaagcctttcaaatggtaccttgaaaatgtctatccagagttaagggttccagaccatcaggatatagcttttggggccttgcagcagggaactaactgcctcgacactttgggacactttgctgatggtgtggttggagtttatgaatgtcacaatgctgggggaaaccaggaatgggccttgacgaaggagaagtcggtgaagcacatggatttgtgccttactgtggtggaccgggcaccgggctctcttataaagctgcagggctgccgagaaaatgacagcagacagaaatgggaacagatcgagggcaactccaagctgaggcacgtgggcagcaacctgtgcctggacagtcgcacggccaagagcgggggcctaagcgtggaggtgtgtggcccggccctttcgcagcagtggaagttcacgctcaacctgcagcagtaggagggtccgggaggccctgccgtcctgtctcctgcaccattgggtggagtctggtgatcacattattgattatgtttcttaaactttccgcgaaactaatatacctcagtattccatcatggtctgaaagtcaaacttcggcaaggcacggacgactgtgcagacacagcagcggcaagaagcgagaactgccctccccctcctctcggtgcagcccagccgggcccccttccccaggccggagcgcccctcttccttccagctttcacttctgccggctccgcaactgagtgacacccagcgacaaccgactggggagtggtagaagcaactgaacggatgcgtgcgagctgaggaca

SEQ ID NO: 33796 - DNA, 3868 bp, Homo sapiens
  source 1..3868: mol_type = unassigned DNA
gctgaaccctgcccgaagaaaccacatgagccagcagttgctgccctcccgaagtggtcctcggaggcagcgcaccccttcattttggcgaaccgaggaggaagggaggaaccgtgtgggggaaatctagaacttctggttccccaaggacccagcagactgtgttctggctacaaggtgatcactgccaccaggtcagtgcaggattcctccaatgtagatgggccgggagccacaacttgcgcggagcagcagcctcgccgaccactcagagagaagccgcgcgacagccaggcttggcccggacggcgcccccaccctgcgcgcgcgatccaaggttctcacctggagcgctcaggtagggctggggcggggcgggaggctggcgcgcaggcgcggaagtggggcctcgcccctgccgacgtcgcaggctggagctcacctgggagactccaagtggaagccgagcctcggttctgcctctccaggcaacgcgggaggcccagcgggaaggcaggaggcggcggcggaggaggagctctactgagccgcaactgtggcgacagcaaccggagtcgcagccgccgccacctgcacctggcgcctagcccacgtccagcgcctgcccggccgccgcttcccgccaccctgccctgcccacccgccaggtactaccattaaagataccttcttctcagcaaatctatgataaaaaatataagtaacagaagaagaaataactgttatttgtcaagtgacaagcttttaatgtcagaatggctcacctaaagcgactagtaaaattacacattaaaagacattaccataaaaagttctggaagcttggtgcagtaatttttttctttataatagttttggttttaatgcaaagagaagtaagtgttcaatattccaaagaggaatcaaggatggaaaggaacatgaaaaacaaaaacaagatgttggatttaatgctagaagctgtaaacaatattaaggatgccatgccaaaaatgcaaataggagcacctgtcaggcaaaacattgatgctggtgagagaccttgtttgcaaggatattatacagcagcagaattgaagcctgtccttgaccgtccacctcaggattcaaatgcacctggtgcttctggtaaagcattcaagacaaccaatttaagtgttgaagagcaaaaggaaaaggaacgtggggaagctaaacactgctttaatgctttcgcaagtgacaggatttctttgcaccgagatcttggaccagacactcgacctcctgaatgtattgaacaaaaatttaagcgctgccctcccctgcccaccaccagtgtcataatagtttttcataatgaagcgtggtccacgttgcttagaactgtccacagtgtgctctattcttcacctgcaatactgctgaaggaaatcattttggtggatgatgctagtgtagatgagtacttacatgataaactagatgaatatgtaaaacaattttctatagtaaaaatagtcagacaaagagaaagaaaaggtctgatcactgctcggttgctaggagcaacagtcgcaacagctgaaacgctcacatttttagatgctcactgtgagtgtttctatggttggctagaacctctgttggccagaatagctgagaactacacggctgtcgtaagtccagatattgcatccatagatctgaacacgtttgaattcaacaaaccttctccttatggaagtaaccataaccgtggaaattttgactggagtctttcatttggctgggagtcgcttcctgatcatgagaagcaaagaaggaaagatgaaacctacccaattaaaacacccacttttgcaggaggacttttttccatatcaaaagaatattttgagtatattggaagctatgatgaagaaatggaaatctggggaggtgaaaatatagaaatgtctttcagagtatggcaatgtggtgggcagttggagattatgccttgctctgttgttggacatgtttttcgcagcaaaagccctcatagctttccaaaaggcactcaggtgattgctagaaaccaagttcgccttgcagaagtctggatggatgaatacaaggaaatattttataggagaaatacagatgcagcaaaaattgttaaacaaaaagcatttggtgatctttcaaaaagatttgaaataaaacaccgccttcagtgtaaaaattttacatggtatctgaacaacatttatccagaggtgtatgtgccagaccttaatcctgttatatctggatacattaaaagcgttggtcagcctctatgtctggatgttggagaaaacaatcaaggaggcaaaccattaattatgtatacatgtcatggacttgggggaaaccagtactttgaatactctgctcaacatgaaattcggcacaacatccagaaggaattatgtcttcatgctgctcaaggtctcgttcagctgaaggcatgtacctacaaaggtcacaagacagttgtcactggagagcagatatgggagatccagaaggatcaacttctatacaatccattcttaaaaatgtgcctttcagcaaatggagagcatccaagtttagtgtcatgcaacccatcagatccactccaaaaatggatacttagccaaaatgattaagtgttccttaaaattaagttgaaaaaggaaatattctttctcataaaactgtgactaggcatacactgtagtttttgaaaattatgcaaaagcagctaaatgtaacttattccaagtgcatttttcttatttatatctttatgtagcactactacagaaattctgcaagtttctgtttcaaagcacaataactagtaataccaaagactatttcaaaatgtccagatgtaggggaagagatgtttacagtatgatgaaaataattttccaagtaaagtgatgtttgtgtgttttgtacacttagggatatatatatatagctacattcacacactcacaatttaaaatatttcccctagttttttggggggataggaagaaagatttgttactgtatttttttaactacataaaaatagatcaataaatgtcagcattggcctctgtgtacaaaccaagagcttttacagatccagaatttattagtttaaaatgcaggtgaacttttttttgcgtttggtttacttgtctgtcaaatgtttccttaaacatgaaactgaataaggagaagagtatttttaacacttaaatttcttggcaaattttaaaacattttttagtctgtaatacactccacttgaagcacttaagtcttccttaaatgacttttcttaagtaatgatactgtgtgttttcccaaagcacttttaaaaaaatttttataaattactatctgttgaaaaggtgtccttttcctttcttctagtatttttttcttaccaaaattcactaatcttgaatgtttgtgatattaaatttcaaatgcagaatacttgactcatttaaagctaaattttgttactgattcaattataattgtaatggatttttgactttgtaatggattcttttcatcaaaaagccttatttttttatctatgtggaaaacacaataaaaaatcctcaacactattgtaatcatttggttaagtttttttcctcttttgggtaaaatctgtaattgataataggtgggggaaaatgaattttgtatgctgaatttctaagcgcctattgtttgtaaaaccatcagatatttcttatggcacaaaaaatgaggaatagcaaaattcctgtgttcaatatttagaaaattttgtattaatttctgataaagttccttaagcatc

SEQ ID NO: 33797 - DNA, 1954 bp, Homo sapiens
  source 1..1954: mol_type = unassigned DNA
acatgagccagcagttgctgccctcccgaagtggtcctcggaggcagcgcaccccttcattttggcgaaccgaggaggaagggaggaaccgtgtgggggaaatctagaacttctggttccccaaggacccagcagactgtgttctggctacaaggtgatcactgccaccaggtcagtgcaggattcctccaatgtagatgggccgggagccacaacttgcgcggagcagcagcctcgccgaccactcagagagaagccgcgcgacagccaggcttggcccggacggcgcccccaccctgcgcgcgcgatccaaggttctcacctggagcgctcaggggttccttcaggagtcacaagtactattgggttggaaaatctgggagaataatagtttacttactgatgaaactgctgtattatcattcattaagctggagcagatcacagtttgagggtactaccattaaagataccttcttctcagcaaatctatgataaaaaatataagtaacagaagaagaaataactgttatttgtcaagtgacaagcttttaatgtcagaatggctcacctaaagcgactagtaaaattacacattaaaagacattaccataaaaagttctggaagcttggtgcagtaatttttttctttataatagttttggttttaatgcaaagagaagtaagtgttcaatattccaaagaggaatcaaggatggaaaggaacatgaaaaacaaaaacaagatgttggatttaatgctagaagctgtaaacaatattaaggatgccatgccaaaaatgcaaataggagcacctgtcaggcaaaacattgatgctggtgagagaccttgtttgcaaggatattatacagcagcagaattgaagcctgtccttgaccgtccacctcaggattcaaatgcacctggtgcttctggtaaagcattcaagacaaccaatttaagtgttgaagagcaaaaggaaaaggaacgtggggaagctaaacactgctttaatgctttcgcaagtgacaggatttctttgcaccgagatcttggaccagacactcgacctcctgaatgtattgaacaaaaatttaagcgctgccctcccctgcccaccaccagtgtcataatagtttttcataatgaagcgtggtccacgttgcttagaactgtccacagtgtgctctattcttcacctgcaatactgctgaaggaaatcattttggtggatgatgctagtgtagatgagtacttacatgataaactagatgaatatgtaaaacaattttctatagtaaaaatagtcagacaaagagaaagaaaaggtctgatcactgctcggttgctaggagcaacagtcgcaacagctgaaacgctcacatttttagatgctcactgtgagtgtttctatggttggctagaacctctgttggccagaatagctgagaactacacggctgtcgtaagtccagatattgcatccatagatctgaacacgtttgaattcaacaaaccttctccttatggaagtaaccataaccgtggaaattttgactggagtctttcatttggctgggagtcgcttcctgatcatgagaagcaaagaaggaaagatgaaacctacccaattaaaacacccacttttgcaggaggacttttttccatatcaaaagaatattttgagtatattggaagctatgatgaagaaatggaaatctggggaggtgaaaatatagaaatgtctttcagagtatggcaatgtggtgggcagttggagattatgccttgctctgttgttggacatgtttttcgcagcaaaagccctcatagctttccaaaaggcactcaggtgattgctagaaaccaagttcgccttgcagaagtctggatggatgaatacaaggaaatattttataggagaaatacagatgcagcaaaaattgttaaacaa

SEQ ID NO: 33798 - DNA, 559 bp, Homo sapiens
  source 1..559: mol_type = unassigned DNA
agtgtgtcggttgcccctggagagatcccgaaaggggcgccctgggccaaggggcaggtggcgcctcgggggggagcccggtcacaccctctcgcccacggtgcccccgccagtccctatggggcggcccctgaggagctggacggagaccaaagacctggggttccttcaggagtcacaagtactattgggttggaaaatctgggagaataatagtttacttactgatgaaactgctgtattatcattcattaagctggagcagatcacagtttgagggtactaccattaaagataccttcttctcagcaaatctatgataaaaaatataagtaacagaagaagaaataactgttatttgtcaagtgacaagcttttaatgtcagaatggctcacctaaagcgactagtaaaattacacattaaaagacattaccataaaaagttctggaagcttggtgcagtaatttttttctttataatagttttggttttaatgcaaagagaagtaagtgttcaatattccaaagaggaatcaaggatggaaaggaacatgaaaa

SEQ ID NO: 33799 - DNA, 536 bp, Homo sapiens
  source 1..536: mol_type = unassigned DNA
agctcacctgggagactccaagtggaagccgagcctcggttctgcctctccaggcaacgcgggaggcccagcgggaaggcaggaggcggcggcggaggaggagctctactgagccgcaactgtggcgacagcaaccggagtcgcagccgccgccacctgcacctggcgcctagcccacgtccagcgcctgcccggccgccgcttcccgccaccctgccctgcccacccgccaggggttccttcaggagtcacaagtactattgggttggaaaatctgggagaataatagtttacttactgatgaaactgctgtattatcattcattaagctggagcagatcacagtttgagggtactaccattaaagataccttcttctcagcaaatctatgataaaaaatataagtaacagaagaagaaataactgttatttgtcaagtgacaagcttttaatgtcagaatggctcacctaaagcgactagtaaaattacacattaaaagacattaccataaaaagttctggaagcttggtgcag

SEQ ID NO: 33800 - DNA, 540 bp, Homo sapiens
  source 1..540: mol_type = unassigned DNA
agcagttgctgccctcccgaagtggtcctcggaggcagcgcaccccttcattttggcgaaccgaggaggaagggaggaaccgtgtgggggaaatctagaacttctggttccccaaggacccagcagactgtgttctggctacaaggtgatcactgccaccaggtactaccattaaagataccttcttctcagcaaatctatgataaaaaatataagtaacagaagaagaaataactgttatttgtcaagtgacaagcttttaatgtcagaatggctcacctaaagcgactagtaaaattacacattaaaagacattaccataaaaagttctggaagcttggtgcagtaatttttttctttataatagttttggttttaatgcaaagagaagtaagtgttcaatattccaaagaggaatcaaggatggaaaggaacatgaaaaacaaaaacaagatgttggatttaatgctagaagctgtaaacaatattaaggatgccatgccaaaaatgcaaataggagcacctgtcaggcaaaacatt

SEQ ID NO: 33801 - DNA, 570 bp, Homo sapiens
  source 1..570: mol_type = unassigned DNA
actggctatcgcggctcatagtatgtaatcgtttcctaaaaagtcctatttttcttttcctttgctcctgttgtcccatattagggtttaataaacttgctgtcctgttcttagggtcaattgcaagcaatattttatcaaaccaaattctgcttttttaactttatgacttctataggctccctacagacacttcaagtaaagctaatgaattctctttttactattagatcttgtatttctgtgagctattaaaactagctgttatataacaacaaattaaatgctgttgattttcttgtttttaggggttccttcaggagtcacaagtactattgggttggaaaatctgggagaataatagtttacttactgatgaaactgctgtattatcattcattaagctggagcagatcacagtttgagggtactaccattaaagataccttcttctcagcaaatctatgataaaaaatataagtaacagaagaagaaataactgttatttgtcaagtgacaagcttttaatgtcagaatggctcacctaaagcgactagtaaaattacacat

SEQ ID NO: 33802 - DNA, 5399 bp, Homo sapiens
  source 1..5399: mol_type = unassigned DNA
gttggctggagagtttgtgaaaagttgtgagccgagcaggaggaagtagggagagaggagttgggctgtgccggaggccgaggaccgagagggctcaggtgacccctggaaagcctgggtggctggaaaggagcctagcgcctgcatgaaaggaagaacctgctgggaagtacctgagctcgagctgtgggttccgccgcccttcccctgcgtggtggcttggtggccgcgtctgcgcctcagccctgagaatccggatggcggtgaggtggacttgggcaggcaagagctgcctgctgctggcgtttttaacagtggcctatatcttcgtggagctcttggtctctacttttcatgcctccgcaggagccggccgtgccagggagctggggtcaagaaggctctcagacctccagaaaaatacggaggatttgtctcgaccgctttataagaagccccctgcagattcccgtgcacttggggagtgggggaaagccagcaaactccagctcaacgaggatgaactgaagcagcaagaagaactcattgagagatacgccatcaatatttacctcagtgacaggatttccctgcatcgacacatagaggataaaagaatgtatgagtgtaagtcccagaagttcaactataggacacttcctaccacctctgttatcattgctttctataacgaagcctggtcgactttgctccgtaccattcacagtgttttagaaacttctcctgcagttcttttgaaagagatcatcttggtggatgacttgagtgacagagtttatttgaagacacaacttgaaacttacatcagcaatcttgatagagtacgcttgattaggaccaataagcgagaggggctggttagggcccgtctgattggggccactttcgccactggggacgtcctcactttcctggattgtcactgtgagtgtaattccggttggctggaaccgcttttggaaaggattgggagagatgaaacagcagttgtgtgtcctgttatagacacaattgattggaatacttttgaattctatatgcagataggggagcccatgattggtgggtttgactggcgtttaacatttcagtggcattctgtccccaaacaggaaagggacaggcggatatcaagaattgaccccatcagatcacctaccatggctggaggactgtttgctgtcagcaagaaatattttcagtaccttggaacgtatgacacaggaatggaagtgtggggaggtgaaaaccttgagctgtcttttagggtgtggcagtgtggtggcaaattggagatccacccgtgttcccacgtgggccatgtgttccccaagcgggcaccatatgctcgccccaatttcctacagaatactgctcgggcagcagaagtttggatggatgaatacaaagagcacttctacaatagaaaccctccagcaagaaaagaagcttatggtgatatttctgaaagaaaattactacgagagcggttgagatgcaagagctttgactggtatttgaaaaacgtttttcctaatttacatgttccagaggatagaccaggctggcatggggctattcgcagtagagggatctcgtctgaatgtttagattataattctcctgacaacaaccccacaggtgctaacctttcactgtttggatgccatggtcaaggaggcaatcaattctttgaatatacttcaaacaaagaaataaggtttaattctgtgacagagttatgtgcagaggtacctgagcaaaaaaattatgtgggaatgcaaaattgtcccaaagatgggttccctgtaccagcaaacattatttggcattttaaagaagatggaactatttttcacccacactcaggactgtgtcttagtgcttatcggacaccggagggccgacctgatgtacaaatgagaacttgtgatgctctagataaaaatcaaatttggagttttgagaaatagagcacaacagcactttcgtcatgagctgacagtagtgtcaagaaagtcaaagagccttaagagcctcagtgaagattgtattttattttatcaaaagccacctagcagtcatctgtggagcactggaaagctggggttcattttggtatatcacactgaaactgggtacccagagtgctgctgtttaatatttcacaatgccttacttattggttgttttatataagagttttgtcaatatggtctcttcttaaaagaagttgactatgaattgaaacacacaaaacatttaagtgccagacttaatattaaagaatgtaaaggtccaagtaaaatgaggtatgatttatgttgatgtgtaagttcaccgcacatcccactttttaacaaaactcatgaatgtgcagtttgagccattgctattttgattacatagaatttgtatttcttttttagccagcacattaaattttagattttattttttaatctaatttttttctaatcaaaaagaaaattgagcttaaggcaaaaggcctggttttagagatatgtgtaattggaagagggcatttgtttgagtgtgagtttggaggcctttttaacatgcagacatacccatatttaaatgaaatggggagatatttacattccgtactttgtaaacttgagctattggacttcactgatgtatatattaatacctcagattcctctgattttgtaagctgtcttctctgtgaacgtgtttgtgtgtgtagggcattttctgattgcacttccttaagttatgaatgtactagaaagggactcatccagaatactatgcctccctttgttaatgcttaatcatttaaagtaaacacaattgaagcctctctgaagttaaacccaactatgtttattaaaatgtgtgaaactgaaagtgggctaggttctaccaaggctgtggaactctcctacgagttctgctgatcaggaaatttaagaatttatcttaaaaatgcaaggaaaaaagactgccttggcaattgtgaatggtgctttcaatctcctagcaccgagcctggcacttaggcagctttcagtaagtgggtgaatgaatgactgaatgaatgaatgaatggctcagctgaggaatgtaactttggtcaagttattatgatgtgtttgggcttagttttctcattggtaaaatgtgggtgctggattggatcttaaagatcccttccagctctgaaatgctgattgtacagtatattcttcccagattgactcactgtgcaatctttacaatactttttatcttttcacttttgacataggtaatgttgttgagcagttgagcaatgttcagtccagttgtgaagctggagaagagaaatgggttttaaaaattaagtgaggggaggccgggtgcggtggctcacgcatgtaatcccagcactttgggaggccaaggcaggtggatcacgaggtcaggagatccagaccatcctggctaacatggtgaaacctcgtctctactaaaaatacaaaaaattagccagctgtggtggcgggcgcctgtagtcccagctactcaggaggctgaggcaggagaatggcgtgaacctgtgaggcagagcttacagtgagccgagatcgtgccactgcactccagcctgggcgacagagcaagactctgtctcaaaaaaaaaaaataataataaaataagtgagctgaactcacctgaagtggtttacttctgtgggttaagaagttctagtcagtgttcatagtcgtttcgttttgataattgttgaaccaattttgtttttaaaacctttagactctgaaagtaatattttgactaagaatgtaaatatttccaaactaaattactcgggaagtaaacgctttttttaaaagtatttttactggttttataccaatattatatgcagaaatcacaggatgaatttagaattaaatctcaattagttcactttggcctagatttatgaaaaatgcatgcctcgtaaagagtccactgtattcacgagtaaagttgcttttagtgttcacttgatgacttggagagtaggaattttgcaaaatctgaatttaaggaaattctttaggataaccatttcaaaaaataaaattgctatgcaatcttgaatattttctcttttgcctcgtaaaatgaaaatgcattcacagtttctgtaaattatttagcagccttaaagtttatcaaaaaattgtccagattccacgtgcagcatgcttggccctgcatttaatttaagaaggattaataataatgctctgaatttttcgaaagggattctcctaaacccacccacttctcttgcccaggctgctttttaaaaatatttttttattttttacttatttttaaattttctctttttatttatttttggttttcttgttagccacctgttatatgggagaacgaaaattgttatattttgaaagtacttattacattatttttattttagtatcttgatgctcctgtcaaaagggaaatgaggcttttaaaaataaagtaccttaattctttattgactttttgccctaaattgctaggtgtgacccagcaatcttttaggaagagattttacagtggtgctttatttatatcaataatccagtatagttaggctgttcattcctcataatagagtacataacagaaaagtgggactttcacattttcatatttaggcacgttccaatttaattccaaaaatactctgtaattctacatctaaaaaaaccgattccctaattcgaatttattggtaccaaagctctctttggctatagacaattaagagttgaccttttaagttaatgtatatgcttaaaaacagttttaggaaaatatttggtagacaaagagtttcaactttaaatgttcactatgtcatttagtgtccaactttacggataggttgactatctaaataggcatttttagtcattaaaaaaaatctagtcaccaggaggatccctatgactcaaaataacttgtttgtaaaagaaaatttgtttacttacccattagtaagttcctgcatattcattataagatggcaaatcaaacttttctaggatgaagacagcttatttttaagttgtatagtcttagttggtttagggtctcaattttaattaataaaatacttggtttttatttgcttgtccttttgaattcctgttttaataattttaaaatgagcacaaagaacgttgaagttcagattaatctcttctgaatgatgtttttttcctctgtgatgagttgtttctgacttttttccttttgtatttgtaatgttgattaagatgtaaaataaaaagtgtgcctgattatttttgcaaataga

SEQ ID NO: 33803 - DNA, 4520 bp, Homo sapiens
  source 1..4520: mol_type = unassigned DNA
ccaggctggtccctcctgccttcgctctctgctggtcgcggtggcctgtagctcctccctcggtaggacccccctccaccttggcgcttacgagatgaatgaggagcccagacctctggaacttggagggttgttcagattcccaggctgacaaaaaggagaaacagcttttacttgcatccagggccaatcatcgcagacccagacgtctgcagagggctgaggccccagcttgtggccaccacaacgtatcaagctatctccagggttgggctcaggactcagagctgacgcagctggggtgccccttggttctggaggatgaggctcctccgcagacgccacatgcccctgcgcctggccatggtgggctgcgcctttgtgctcttcctcttcctcctgcatagggatgtgagcagcagagaggaggccacagagaagccgtggctgaagtccctggtgagccggaaggatcacgtcctggacctcatgctggaggccatgaacaaccttagagattcaatgcccaagctccaaatcagggctccagaagcccagcagactctgttctccataaaccagtcctgcctccctgggttctataccccagctgaactgaagcccttctgggaacggccaccacaggaccccaatgcccctggggcagatggaaaagcatttcagaagagcaagtggacccccctggagacccaggaaaaggaagaaggctataagaagcactgtttcaatgcctttgccagcgaccggatctccctgcagaggtccctggggccagacacccgaccacctgagtgtgtggaccagaagttccggcgctgccccccactggccaccaccagcgtgatcattgtgttccacaacgaagcctggtccacactgctgcgaacagtgtacagcgtcctacacaccacccctgccatcttgctcaaggagatcatactggtggatgatgccagcacagaggagcacctaaaggagaagctggagcagtacgtgaagcagctgcaggtggtgagggtggtgcggcaggaggagcggaaggggctgatcaccgcccggctgctgggggccagcgtggcacaggcggaggtgctcacgttcctggatgcccactgtgagtgcttccacggctggctggagcccctcctggctcgaatcgctgaggacaagacagtggtggtgagcccagacatcgtcaccatcgaccttaatacttttgagttcgccaagcccgtccagaggggcagagtccatagccgaggcaactttgactggagcctgaccttcggctgggaaacacttcctccacatgagaagcagaggcgcaaggatgaaacctaccccatcaaatccccgacgtttgctggtggcctcttctccatctccaagtcctactttgagcacatcggtacctatgataatcagatggagatctggggaggggagaacgtggaaatgtccttccgggtgtggcagtgtgggggccagctggagatcatcccctgctctgtcgtaggccatgtgttccggaccaagagcccccacaccttccccaagggcactagtgtcattgctcgcaatcaagtgcgcctggcagaggtctggatggacagctacaagaagattttctataggagaaatctgcaggcagcaaagatggcccaagagaaatccttcggtgacatttcggaacgactgcagctgagggaacaactgcactgtcacaacttttcctggtacctgcacaatgtctacccagagatgtttgttcctgacctgacgcccaccttctatggtgccatcaagaacctcggcaccaaccaatgcctggatgtgggtgagaacaaccgcggggggaagcccctcatcatgtactcctgccacggccttggcggcaaccagtactttgagtacacaactcagagggaccttcgccacaacatcgcaaagcagctgtgtctacatgtcagcaagggtgctctgggccttgggagctgtcacttcactggcaagaatagccaggtccccaaggacgaggaatgggaattggcccaggatcagctcatcaggaactcaggatctggtacctgcctgacatcccaggacaaaaagccagccatggccccctgcaatcccagtgacccccatcagttgtggctctttgtctaggacccagatcatccccagagagagcccccacaagctcctcaggaaacaggattgctgatgtctgggaacctgatcaccagcttctctggaggccgtaaagatggatttctaaacccactgggtggcaaggcaggaccttcctaatccttgcaacaacattgggcccattttctttccttcacaccgatggaagagaccattaggacatatatttagcctagcgttttcctgttctagaaatagaggctcccaaagtagggaaggcagctgggggagggttcagggcagcaatgctgagttcaagaaaagtacttcaggctgggcacagtggctcatgcctgaaatcctagcactttgggaagacaatgtgggagaatggcttgagcccaggagttcaagaccggcctgagcaacatagtgaggatcccatctctacgcccaccctccccccggcaaaaaaaaaaagctgggtatggtggcttatgcctgtagtcgcagctactcagaaggctgaggtgggaggattgcttgttccccggaggttgaagctacagtgagccttgattgtgtcactgcactccagcctgggcaacaggtaagactctgtctcaaaaaaaaacaaaaaagaagaagaaaagtacttctacagccatgtcctattccttgatcatccaaagcacctgcagagtccagtgaaatgatatattctggctgggcacagtggctcacacctgtaatcctagcactttgggaggccaaggcaggtggatcacctgaggtcagaagtttgaaaccagcctggactacatggtgaaactccatctctactaaaagtacaaaaattagctgggcatgatggcacgcacctgcagtcccagctacttgggaggctgaggcaggagaatcactcgaacccaggaggcagaggttgcagtgagccaagacagcaccattgcaccccagcctgagcaacaagagcgaaactccatctcaggaaaaaaaaaaaaaaaaaaagtatattctaacagacagatcagaggtctaagagatcctcccttgctattattacctgaagtctgtagaactgtttacagatatctccttgacaggtgtcctttatcttactttatctgtacagtaatcctgtgagaaagacaggacagaaaccactgtgcctattttacagatacgaaaactgagacacaggtaaaggggcttgtctgtagtcccatagctagcagatggctggagccaagactgaggctcgttcttcaatgctgagccagggctccttccgctgcaccacaagaacgctagaccactcgccaccagccttctcattccctcttcctccattctaatcatttctagctggctggcctccacagagcataggaaaacagccagggccgggcacggtggctcatgcctgtaatctcaacactctgggaggccgagccgggtggataacctgaggtcaggaattcgagaccagcctggccaacatggtaaaaccccatctctactaaaaatataaaaattagccaggcatggtggcgcacacctgtaatcccagctactcaagaggctgaggcaggagaattgcttaaatctgggaggcggaagttgcagtgagccaagatcgcgccactgaactccagcctaggcaacaagagcaaaactccatctccaaaaaaaagaaaggaaaaacagggccaggtagccattgtggagagagcacacttaggaatcctgggatgttagtgttaaaagaaagctcctggagccagtgattctcaggtttgtcccagaacccttttttctaagccccatataaaaggtagattaaaaaaacaaagtagcatgagtgaaattgagagagggacaggtaatgccttccagcccctaacttctaacaatctggaagcacaacgtgaaaatcacgtagcccaaccctatcattttcatattatgaaactgagtccaggtaagtgaatctgtccaaggtcacccagcaaggtatcagtagccctgagggtaaggactctgataaggctcgggagggtcctggaaagcctgaggcggcaggaagagtgtgcagagttgagcgtgtctggaaggctgatccactgctgggcccacatcaaagcccccatggggagcagacccgactgcacatggctcttttgctggaagaagagcatggctgcgcagaggactaaaatttcatctgggaaggcttcttttgactgtcagtagcaggatgtcaccagatgagggtgctatgggaccacagctgtctttgttcccattgcaactcaaccctgcgg

SEQ ID NO: 33804 - DNA, 4556 bp, Homo sapiens
  source 1..4556: mol_type = unassigned DNA
aacaggccctgctgtgagggaccacgaggcagtgccaggatgaaagagttggagtaacctaggtgattctgagtgaatcagtcaggaggccttcctggagggggctgaggccccagcttgtggccaccacaacgtatcaagctatctccagggttgggctcaggactcagagctgacgcagctggggtgccccttggttctggaggatgaggctcctccgcagacgccacatgcccctgcgcctggccatggtgggctgcgcctttgtgctcttcctcttcctcctgcatagggatgtgagcagcagagaggaggccacagagaagccgtggctgaagtccctggtgagccggaaggatcacgtcctggacctcatgctggaggccatgaacaaccttagagattcaatgcccaagctccaaatcagggctccagaagcccagcagactctgttctccataaaccagtcctgcctccctgggttctataccccagctgaactgaagcccttctgggaacggccaccacaggaccccaatgcccctggggcagatggaaaagcatttcagaagagcaagtggacccccctggagacccaggaaaaggaagaaggctataagaagcactgtttcaatgcctttgccagcgaccggatctccctgcagaggtccctggggccagacacccgaccacctgagtgtgtggaccagaagttccggcgctgccccccactggccaccaccagcgtgatcattgtgttccacaacgaagcctggtccacactgctgcgaacagtgtacagcgtcctacacaccacccctgccatcttgctcaaggagatcatactggtggatgatgccagcacagaggagcacctaaaggagaagctggagcagtacgtgaagcagctgcaggtggtgagggtggtgcggcaggaggagcggaaggggctgatcaccgcccggctgctgggggccagcgtggcacaggcggaggtgctcacgttcctggatgcccactgtgagtgcttccacggctggctggagcccctcctggctcgaatcgctgaggacaagacagtggtggtgagcccagacatcgtcaccatcgaccttaatacttttgagttcgccaagcccgtccagaggggcagagtccatagccgaggcaactttgactggagcctgaccttcggctgggaaacacttcctccacatgagaagcagaggcgcaaggatgaaacctaccccatcaaatccccgacgtttgctggtggcctcttctccatctccaagtcctactttgagcacatcggtacctatgataatcagatggagatctggggaggggagaacgtggaaatgtccttccgggtgtggcagtgtgggggccagctggagatcatcccctgctctgtcgtaggccatgtgttccggaccaagagcccccacaccttccccaagggcactagtgtcattgctcgcaatcaagtgcgcctggcagaggtctggatggacagctacaagaagattttctataggagaaatctgcaggcagcaaagatggcccaagagaaatccttcggtgacatttcggaacgactgcagctgagggaacaactgcactgtcacaacttttcctggtacctgcacaatgtctacccagagatgtttgttcctgacctgacgcccaccttctatggtgccatcaagaacctcggcaccaaccaatgcctggatgtgggtgagaacaaccgcggggggaagcccctcatcatgtactcctgccacggccttggcggcaaccagtactttgagtacacaactcagagggaccttcgccacaacatcgcaaagcagctgtgtctacatgtcagcaagggtgctctgggccttgggagctgtcacttcactggcaagaatagccaggtccccaaggacgaggaatgggaattggcccaggatcagctcatcaggaactcaggatctggtacctgcctgacatcccaggacaaaaagccagccatggccccctgcaatcccagtgacccccatcagttgtggctctttgtctaggacccagatcatccccagagagagcccccacaagctcctcaggaaacaggattgctgatgtctgggaacctgatcaccagcttctctggaggccgtaaagatggatttctaaacccactgggtggcaaggcaggaccttcctaatccttgcaacaacattgggcccattttctttccttcacaccgatggaagagaccattaggacatatatttagcctagcgttttcctgttctagaaatagaggctcccaaagtagggaaggcagctgggggagggttcagggcagcaatgctgagttcaagaaaagtacttcaggctgggcacagtggctcatgcctgaaatcctagcactttgggaagacaatgtgggagaatggcttgagcccaggagttcaagaccggcctgagcaacatagtgaggatcccatctctacgcccaccctccccccggcaaaaaaaaaaagctgggtatggtggcttatgcctgtagtcgcagctactcagaaggctgaggtgggaggattgcttgttccccggaggttgaagctacagtgagccttgattgtgtcactgcactccagcctgggcaacaggtaagactctgtctcaaaaaaaaacaaaaaagaagaagaaaagtacttctacagccatgtcctattccttgatcatccaaagcacctgcagagtccagtgaaatgatatattctggctgggcacagtggctcacacctgtaatcctagcactttgggaggccaaggcaggtggatcacctgaggtcagaagtttgaaaccagcctggactacatggtgaaactccatctctactaaaagtacaaaaattagctgggcatgatggcacgcacctgcagtcccagctacttgggaggctgaggcaggagaatcactcgaacccaggaggcagaggttgcagtgagccaagacagcaccattgcaccccagcctgagcaacaagagcgaaactccatctcaggaaaaaaaaaaaaaaaaaaagtatattctaacagacagatcagaggtctaagagatcctcccttgctattattacctgaagtctgtagaactgtttacagatatctccttgacaggtgtcctttatcttactttatctgtacagtaatcctgtgagaaagacaggacagaaaccactgtgcctattttacagatacgaaaactgagacacaggtaaaggggcttgtctgtagtcccatagctagcagatggctggagccaagactgaggctcgttcttcaatgctgagccagggctccttccgctgcaccacaagaacgctagaccactcgccaccagccttctcattccctcttcctccattctaatcatttctagctggctggcctccacagagcataggaaaacagccagggccgggcacggtggctcatgcctgtaatctcaacactctgggaggccgagccgggtggataacctgaggtcaggaattcgagaccagcctggccaacatggtaaaaccccatctctactaaaaatataaaaattagccaggcatggtggcgcacacctgtaatcccagctactcaagaggctgaggcaggagaattgcttaaatctgggaggcggaagttgcagtgagccaagatcgcgccactgaactccagcctaggcaacaagagcaaaactccatctccaaaaaaaagaaaggaaaaacagggccaggtagccattgtggagagagcacacttaggaatcctgggatgttagtgttaaaagaaagctcctggagccagtgattctcaggtttgtcccagaacccttttttctaagccccatataaaaggtagattaaaaaaacaaagtagcatgagtgaaattgagagagggacaggtaatgccttccagcccctaacttctaacaatctggaagcacaacgtgaaaatcacgtagcccaaccctatcattttcatattatgaaactgagtccaggtaagtgaatctgtccaaggtcacccagcaaggtatcagtagccctgagggtaaggactctgataaggctcgggagggtcctggaaagcctgaggcggcaggaagagtgtgcagagttgagcgtgtctggaaggctgatccactgctgggcccacatcaaagcccccatggggagcagacccgactgcacatggctcttttgctggaagaagagcatggctgcgcagaggactaaaatttcatctgggaaggcttcttttgactgtcagtagcaggatgtcaccagatgagggtgctatgggaccacagctgtctttgttcccattgcaactcaaccctgcgggaggccgcctacatccctgagagccttctggagcctacagaggagacattggccagccaaaaggaaaggagtggccagggtacgacctggagtagggaagggaaaaagttcccggaaagaagagaattggatgagaggtctcagtggaaat

SEQ ID NO: 33805 - DNA, 2543 bp, Homo sapiens
  source 1..2543: mol_type = unassigned DNA
aaacccgggagccaccccgcggcgcggctgcggctttgcctcggcgcgacagggaaaataaaagaagcaaaaacaggccctgctgtgagggaccacgaggcagtgccaggatgaaagagttggagtaacctaggtgattctgagtgaatcagtcaggaggccttcctggagggggctgaggccccagcttgtggccaccacaacgtatcaagctatctccagggttgggctcaggactcagagctgacgcagctggggtgccccttggttctggaggatgaggctcctccgcagacgccacatgcccctgcgcctggccatggtgggctgcgcctttgtgctcttcctcttcctcctggtgagccggaaggatcacgtcctggacctcatgctggaggccatgaacaaccttagagattcaatgcccaagctccaaatcagggctccagaagcccagcagactctgttctccataaaccagtcctgcctccctgggttctataccccagctgaactgaagcccttctgggaacggccaccacaggaccccaatgcccctggggcagatggaaaagcatttcagaagagcaagtggacccccctggagacccaggaaaaggaagaaggctataagaagcactgtttcaatgcctttgccagcgaccggatctccctgcagaggtccctggggccagacacccgaccacctgagtgtgtggaccagaagttccggcgctgccccccactggccaccaccagcgtgatcattgtgttccacaacgaagcctggtccacactgctgcgaacagtgtacagcgtcctacacaccacccctgccatcttgctcaaggagatcatactggtggatgatgccagcacagaggagcacctaaaggagaagctggagcagtacgtgaagcagctgcaggtggtgagggtggtgcggcaggaggagcggaaggggctgatcaccgcccggctgctgggggccagcgtggcacaggcggaggtgctcacgttcctggatgcccactgtgagtgcttccacggctggctggagcccctcctggctcgaatcgctgaggacaagacagtggtggtgagcccagacatcgtcaccatcgaccttaatacttttgagttcgccaagcccgtccagaggggcagagtccatagccgaggcaactttgactggagcctgaccttcggctgggaaacacttcctccacatgagaagcagaggcgcaaggatgaaacctaccccatcaaatccccgacgtttgctggtggcctcttctccatctccaagtcctactttgagcacatcggtacctatgataatcagatggagatctggggaggggagaacgtggaaatgtccttccgggtgtggcagtgtgggggccagctggagatcatcccctgctctgtcgtaggccatgtgttccggaccaagagcccccacaccttccccaagggcactagtgtcattgctcgcaatcaagtgcgcctggcagaggtctggatggacagctacaagaagattttctataggagaaatctgcaggcagcaaagatggcccaagagaaatccttcggtgacatttcggaacgactgcagctgagggaacaactgcactgtcacaacttttcctggtacctgcacaatgtctacccagagatgtttgttcctgacctgacgcccaccttctatggtgccatcaagaacctcggcaccaaccaatgcctggatgtgggtgagaacaaccgcggggggaagcccctcatcatgtactcctgccacggccttggcggcaaccagtactttgagtacacaactcagagggaccttcgccacaacatcgcaaagcagctgtgtctacatgtcagcaagggtgctctgggccttgggagctgtcacttcactggcaagaatagccaggtccccaaggacgaggaatgggaattggcccaggatcagctcatcaggaactcaggatctggtacctgcctgacatcccaggacaaaaagccagccatggccccctgcaatcccagtgacccccatcagttgtggctctttgtctaggacccagatcatccccagagagagcccccacaagctcctcaggaaacaggattgctgatgtctgggaacctgatcaccagcttctctggaggccgtaaagatggatttctaaacccactgggtggcaaggcaggaccttcctaatccttgcaacaacattgggcccattttctttccttcacaccgatggaagagaccattaggacatatatttagcctagcgttttcctgttctagaaatagaggctcccaaagtagggaaggcagctgggggagggttcagggcagcaatgctgagttcaagaaaagtacttcaggctgggcacagtggctcatgcctgaaatcctagcactttgggaagacaatgtgggagaatggcttgagcccaggagttcaagaccggcctgagcaacatagtgaggatcccatctctacgcccaccctccccccggc

SEQ ID NO: 33806 - DNA, 4307 bp, Homo sapiens
  source 1..4307: mol_type = unassigned DNA
agagccggaggagggggaaggagggaggggagagcggtggcggcggctgcgccgggctgtgagtctctcgccgccggaggaagatgaggctgaagattgggttcatcttacgcagtttgctggtggtgggaagcttcctggggctagtggtcctctggtcttccctgaccccgcggccggacgacccaagcccgctgagcaggatgagggaagacagagatgtcaatgaccccatgcccaaccgaggcggcaatggactagctcctggggaggacagattcaaacctgtggtaccatggcctcatgttgaaggagtagaagtggacttagagtctattagaagaataaacaaggccaaaaatgaacaagagcaccatgctggaggagattcccagaaagatatcatgcagaggcagtatctcacatttaagcctcagacattcacctaccatgatcctgtgcttcgcccagggatcctcggtaactttgaacccaaagaacctgagcctcctggagtggttggtggccctggagagaaagccaagccattggttttgggaccagaattcaaacaagcaattcaagccagcattaaagagtttggatttaacatggtggcaagtgacatgatctcactggaccgcagcgtcaatgacttacgccaagaagaatgcaagtattggcattatgatgaaaacttgctcacttcgagcgttgtcattgtcttccataatgaaggatggtcaaccctcatgagaacagtccacagtgtaattaaaaggactccaaggaaatatttagcagaaattgtgttaattgacgatttcagtaataaagaacacttaaaagaaaaactggatgaatatattaagctgtggaatggcctagtgaaggtatttcgaaatgaaagaagggaaggtttaattcaagcacgaagtattggtgctcagaaggctaaacttggacaggttttgatataccttgatgcccactgtgaggtggcagttaactggtatgcaccacttgtagctcccatatctaaggacagaaccatttgcactgtgccgcttatagatgtcataaatggcaacacatatgaaattataccccaagggggtggtgatgaagatgggtatgcccgaggagcatgggattggagtatgctctggaaacgggtgcctctgacccctcaagagaagagactgagaaagacaaaaactgaaccgtatcggtccccagccatggctgggggattatttgccattgaacgagagttcttctttgaattgggtctctatgatccaggtctccagatttggggtggtgaaaactttgagatctcatacaagatatggcagtgtggtggcaaattattatttgttccttgttctcgtgttggacatatctaccgtcttgagggctggcaaggaaatcctccgcccatttatgttgggtcttctccaactctgaagaattatgttagagttgtggaggtttggtgggatgaatataaagactacttctatgctagtcgtcctgaatcgcaggcattaccatatggggatatatcggagctgaaaaaatttcgagaagatcacaactgcaaaagttttaagtggttcatggaagaaatagcttatgatatcacctcacactaccctttgccacccaaaaatgttgactggggagaaatcagaggcttcgaaactgcttactgcattgatagcatgggaaaaacaaatggaggctttgttgaactaggaccctgccacaggatgggagggaatcagcttttcagaatcaatgaagcaaatcaactcatgcagtatgaccagtgtttgacaaagggagctgatggatcaaaagttatgattacacactgtaatctaaatgaatttaaggaatggcagtacttcaagaacctgcacagatttactcatattccttcaggaaagtgtttagatcgctcagaggtcctgcatcaagtattcatctccaattgtgactccagtaaaacgactcaaaaatgggaaatgaataacatccatagtgtttagagagaaaaaaataaaccaataacctacctactgacaagtaaatttatacaggactgaaaaccgcctgaaacctgctgcaactattgttattaactctgtatagctccaaacctggaacctcctgatcagtttgaaggacattgataaactgtgattttacaataacattatcatctgcagttactgtttacaagactgcttttaccttaaactttgtagatgtttacatctttttgttgtgttttaagatgatgttggtaatttgtgcctttagctctgttttattagacagagttaaagcatgttgtcttctttgggattacactcaggggtctgaaaggcagtttgatttttatttttaacacacttgaaaaaaggttggagtagccagactttcatatataacttggtgattatcaacctgttgtgtctttatttaattttacatctttttgaagcactgccacaggttattagccaaggtggccttccttcacagtcatgctgcttttttgaaaggtgaatttcaacacatttagtgcctctttcatttctcagtatatatttcaagagcttgtgatgaaatctataggatggtaatgatggacttgtcacctgtatggggaatacttttactactcagaaatgaatttatgtgctgccatttgctataaagttgaactttgtatggcttgaaaaagaaatgacaatatggaacatcccaaggctgtcccatagggttggaagttgtgtagcattcactcccttacctactggcattcccagtgccctctgtccatacctacttctaggattgcaaaggagtcttccaactagagaaaaattgtccactgacatttgggatttacttttctccaatacctgccaatacagaaaactattatcagttgttattgttatcccttgaaagcgagggtgacaaaaacaacaaaacaccgttataaacacatcaaaggttcattctgactgaggtaagactttccaagcccttgttagattaggccttataaaacttgtgtgcattataacctaagctgtgcaacctgtgaagccaagagtgaactgatgtttcatttatattttcatccaaatgacattatctgcacgtttttaaaatttaaaaacaaaggactatttaaaaatacagtttattaacaaacgtgaactactttctgttacattaggtgttccctagtgtttcttaatttctttttagaaagtgtatttttattagtatttttccggtgaacagaagatttgtttggatttaaacatttactaagacagtacctattaggaaaaccaaatattgcaaatggtcaattcgattttaatttctcaaaagatactctgttatccagaagattaaaatgcctacattgagtgcttaaaaaaaaaaaaacaactgtgatgatgtgagcagaatggcaagtaagttaagcatttttgatcctgtaatcatggtatcattacaatgaaaggaattcacaaactactgccagaggaagtttgttttttaatttaagagggaaatataacctataaatttgtttcttccaagcttagctcttaaatttggagactcaaagttaaacatcctcaacagagttttatttataattttgaattgtcaatttgtattttgctactgatctgtgatcaaccattttaactttcatctctagggatgtttaacatttataattgcaaaataaaccaactataaaaaaagaaactaagagagaattggtactttaattacttgtgtgtttgcaaataggctccattttccatgttgagtagattataaccttattaactatgcataggcctaagaaaggtggcaatgaactgtgcatgtaaattttaaatgggtactttgtgcaattcgttaaaagaagatactctatgaatatgattctatatattgaaatcagaaaacctaccaaacaaaaacatcagaagctgctgccataatgactattttctactgtaggctgctttggaaataattcccatatccttgctttgtaagttggtaatatcactatgcatttctacacattttataaatttgatttatgcagattttgatacactgtatgtttctgtagaaattgtataaatattcaaaattttattaggataaatttgagaaacttacgtatatcttaattctgggttgcttgttttttaggtgacaaaaataaaatattgtattttaattca

SEQ ID NO: 33807 - DNA, 1657 bp, Homo sapiens
  source 1..1657: mol_type = unassigned DNA
aaaacttgctcacttcgagcgttgtcattgtcttccataatgaaggatggtcaaccctcatgagaacagtccacagtgtaattaaaaggactccaaggaaatatttagcagaaattgtgttaattgacgatttcagtaataaagaacacttaaaagaaaaactggatgaatatattaagctgtggaatggcctagtgaaggtatttcgaaatgaaagaagggaaggtttaattcaagcacgaagtattggtgctcagaaggctaaacttggacaggttttgatataccttgatgcccactgtgaggtggcagttaactggtatgcaccacttgtagctcccatatctaaggacagaactacatgtactgtgcctctaatagattacatagatgggaatgattattccattgaaccacagcaaggtggggatgaagatggttttgccagaggggcctgggactggagtttactatggaaacgtattcctctaagccacaaggaaaaggccaaaagaaaacataaaactgaaccttatcggtccccagccatggctgggggattatttgccattgaacgagagttcttctttgaattgggtctctatgatccaggtctccagatttggggtggtaaaactttgagatctcatacaagatatggcagtgtggtggcaaattattatttgttccttgttctcgtgttggacatatctaccgtcttgagggctggcaaggaaatcctccgcccatttatgttgggtcttctccaactctgaagaattatgttagagttgtggaggtttggtgggatgaatataaagactacttctatgctagtcgtcctgaatcgcaggcattaccatatggggatatatcggagctgaaaaaatttcgagaagatcacaactgcaaaagttttaagtggttcatggaagaaatagcttatgatatcacctcacactaccctttgccacccaaaaatgttgactggggagaaatcagaggcttcgaaactgcttactgcattgatagcatgggaaaaacaaatggaggctttgttgaactaggaccctgccacaggatgggagggaatcagcttttcagaatcaatgaagcaaatcaactcatgcagtatgaccagtgtttgacaaagggagctgatggatcaaaagttatgattacacactgtaatctaaatgaatttaaggaatggcagtacttcaagaacctgcacagatttactcatattccttcaggaaagtgtttagatcgctcagaggtcctgcatcaagtattcatctccaattgtgactccagtaaaacgactcaaaaatgggaaatgaataacatccatagtgtttagagagaaaaaaataaaccaataacctacctactgacaagtaaatttatacaggactgaaaaccgcctgaaacctgctgcaactattgttattaactctgtatagctccaaacctggaacctcctgatcagtttgaaggacattgataaactgtgattttacaataacattatcatctgcagttactgtttacaagactgcttttaccttaaactttgtagatgtttacatctttttgttgtgttttaagatgatgttggtaatttgtgcctttagctctgttttattagacagag

SEQ ID NO: 33808 - DNA, 2380 bp, Homo sapiens
  source 1..2380: mol_type = unassigned DNA
gggagtgggtttcaggaggagccaagatgtttgattatactcctctgcttcaagggagtgttatctccctgagcaacctgtggaaagccgctgagcaacctgtggaaagccgctgagcggttatcctctcggggcataaagacaaagaaggcaataaggagactttgctcctcagaggccacccgtggcttcccatgggtgtctcacacaggggagaccaactcaactggcacctagaactctctttcccacaaaagctaggctggttctgattcttaacctgctccagcagtgacacactcagtcccacagggagtggacgacccccaggaagaagatgatgttttggaggaaactccccaaagccctcttcattgggctgactctggccattgctgtcaatctccttctggtattttctagcaaggggactttacaaaacctgtttacgggtggtctccacagggagcttcctttacatctgaataaacgctacggggcagtgataaagagactctcccacttggaggtggaattgcaggatctgaaagaaagtatgaaattagctctgaggcaacaagaaaatgtgaacagcacactgaagagggcgaaagatgaagtacgccctcttctaaaggcaatggaaaccaaggtgaatgagacaaagaagcacaaaacccaaatgaaactcttcccacactcacagcttttcaggcaatggggcgaggatctttctgaggcccagcagaaggcggcccaggacctcttccggaagtttggttacaacgcgtacctcagcaaccagctgcctctcaatcgcaccatccccgacacgcgagactacagatgtcttcggaagacatatccttcccaactcccatccctcagtgtcattctcatattcgtgaatgaagctctgtccattatacaacgggccatcaccagtatcatcaaccggacgccctctcgattgttgaaggaaatcatcttggtggatgatttcagctcaaatggagaactaaaggtacacttggatgagaagattaagctttacaaccagaagtatccaggactactgaaaataatacggcatcctgaaaggaaaggtcttgctcaagcccgcaacactggctgggaagctgccacagcagacgtggtcgccatcttggatgctcacattgaagtcaatgttgggtgggcagagccaatcttggctcggattcaggaggaccgcactgtgattgtgtctcctgtgtttgacaacattcgttttgacaccttcaaactggataagtatgaactggcagttgatgggtttaactgggaactctggtgccgctacgatgcactgccacaagcctggattgatctgcatgatgtcactgccccagtgaagagtccttcaatcatgggcatcctggctgctaacaggcacttcctgggagagatcgggtctctggatggtggaatgctcatctatggaggagagaacgtggagcttagcctgagggtgtggcagtgtggagggaaggtcgagattttgccctgttcccggattgcccacctagagagacaccacaagccctacgccttggatctcaccgctgccttgaagcgcaatgctctgcgagtggccgaaatctggatggatgagcacaaacacatggtctacttggcctggaacatacctctccagaactctggaatagattttggagacgtttcttccagaatggcactccgggaaaaactgaaatgtaaaacttttgactggtacctgaaaaatgtttatccactcttgaagccactccacaccatcgtgggctatggaagaatgaaaaacctattggatgaaaatgtctgcttggatcagggacccgttccaggcaacacccccatcatgtattactgccatgaattcagctcacagaatgtctactatcacctaactggggagctctatgtgggacaactgattgcagaggccagtgctagtgatcgctgcctgacagaccctggcaaggcggagaagcccaccttagaaccatgctccaaggcagctaagaatagactgcatatatattgggattttaaaccgggaggagctgtcataaacagagataccaagcggtgtctggagatgaagaaggatcttttgggtagccacgtgcttgtgctccagacctgtagcacgcaagtgtgggaaatccagcacactgtcagagactggggtcagaccaacagccagtgatcctcagatggtgctggatctgggtcatcaattcttgcaagtggaatggcttctactcctaacactcccagcttctttctcaatgagaaagaaagcatgtgtatgtctgtttatggcgacttcaggtgg

SEQ ID NO: 33809 - DNA, 995 bp, Homo sapiens
  source 1..995: mol_type = unassigned DNA
gggacctagctcgggaccggcctggagatggagttcgactgcgagggcctgagacggctgcttggcaagtacaagttcagggacctaactgtggaagaactaaggaatgtaaatgtatttttcccacatttcaaatattccatggacacctatgtttttaaagatagttctcagaaagacctgctgaattttactggcacaattcctgtgatgtatcagggtaatacatataacataccaattcgtttctggattttggattctcaccctttcgctccccctatttgcttcttgaagccaactgcaaatatgggaatcttagtcggaaaacatgtggatgctcaaggcagaatatatttgccctatctccaaaactggagccatcctaaatctgtcattgttggattaattaaagaaatgattgccaagtttcaagaggaacttcccatgtattctctatcatcatctgatgaggcacggcaggtagacttgctagcctatattgcaaaaatcactgaaggtgtttcagatacaaattcaaagagctgggcaaatcatgagaataaaacagtcaataaaattactgtggttggaggtggagaactcggtattgcctgcacattagcaatttcagcaaaggtggagtctcgctctgttacccaggctggagtgtagtggtacaatcttggctcactacagcctccgcctcctgggttcaagcgattctcctgcctcagcctccagagtagctgggactacaggcatgcgccacgacgcccagctaatttttgtatttttagcagagacagggttttgccatgttggccaggctggtctcgaacttctgacctcaagtgatccacctgccctggcctcccaaagtgctgggattacaagtgtgagccaccgtacctggcctgctattacctcttaattagaatttgagttgtattcagtcttttgtcactaaataaatgcttctataaacatttcaa

SEQ ID NO: 33810 - DNA, 2030 bp, Homo sapiens
  source 1..2030: mol_type = unassigned DNA
ctgggacctagctcgggaccggcctggagatggagttcgactgcgagggcctgagacggctgcttggcaagtacaagttcagggacctaactgtggaagaactaaggaatgtaaatgtatttttcccacatttcaaatattccatggacacctatgtttttaaagatagttctcagaaagacctgctgaattttactggcacaattcctgtgatgtatcagggtaatacatataacataccaattcgtttctggattttggattctcaccctttcgctccccctatttgcttcttgaagccaactgcaaatatgggaatcttagtcggaaaacatgtggatgctcaaggcagaatatatttgccctatctccaaaactggagccatcctaaatctgtcattgttggattaattaaagaaatgattgccaagtttcaagaggaacttcccatgtattctctatcatcatctgatgaggcacggcaggtagacttgctagcctatattgcaaaaatcactgaaggtgtttcagatacaaattcaaagagctgggcaaatcatgagaataaaacagtcaataaaattactgtggttggaggtggagaactcggtattgcctgcacattagcaatttcagcaaagggtattgcagacaggcttgtcctcttagacctctcagaagggactaaaggagccacgatggaccttgaaatcttcaaccttcctaatgtggagatcagcaaagatttgtctgcctctgctcattccaaggtggtgatcttcacagtcaactctttgggtagttctcagtcgtaccttgatgtggtacagagcaatgtggatatgttcagagcccttgtcccagctctgggacattatagtcaacacagtgtcctgctcgttgcatctcaaccagtggaaatcatgacctatgtaacatggaaactgagtacatttcctgcaaatcgagtgatcggaattggatgtaatctggattcacagagattacagtatattattacaaatgttttgaaggcacagacttcaggcaaagaagtatgggttattggcgagcaaggagaagacaaagtgctcacatggagtggccaagaagaagtagtgagtcatacctctcaagtgcagctgtccaacagagccatggaactgctaagagtaaaaggtcaaagatcctggtctgttggactatcagtagctgacatggttgacagtattgtaaacaataagaagaaagtgcattctgtatcagctttagcaaagggatattatgatataaatagtgaagtgtttttaagtttgccttgcatccttggaaccaatggagtatctgaagttatcaaaaccacactgaaagaagatacagttactgagaaactccaaagcagtgcatcctcaatccacagtctccaacaacagttaaaactttgattctcaaatgcaatttgagaggctggacttctacctaaagggaaaagtcatttaattttacctatatataggtttgaggatttctgtatcctgctacttacttttacaaactgcttggttaaagtagagggtttcttgattagctttgtgatgtaaatccttaaggagttatacaaggaggggaaaaattaattttatttggggttcttgagatatctatgctgttctttaaatctacagcaggggtaaacattcatctgcagtgtgcatcaatttaaatcatatatcctaaactaaaagcacaattcatacttcgggaatattttataagtaatatatctttaaaagaaaattaccctttgacttttataatcaacataagttccaggcccagtatggatttacaaaatctgtgtcagttgtacattcacaggatccacagcttaagttactaatgtttcttgtgtaaaatcctgttggtagtaatagtaaagcattgtatttcccttcttcaaattaattacctaccaaaaaatggaaaagaattttacatgcactttaaaatagtaaaatggaaagtgaatt

SEQ ID NO: 33811 - DNA, 1492 bp, Homo sapiens
  source 1..1492: mol_type = unassigned DNA
agcggcttccgtcctgcagcaagtccggaagaaggtccgggggctggagtcctgggacctagctcgggaccggcctggagatggagttcgactgcgagggcctgagacggctgcttggcaagtttttaaagatagttctcagaaagacctgctgaattttactggcacaattcctgtgatgtatcagggtaatacatataacataccaattcgtttctggattttggattctcaccctttcgctccccctatttgcttcttgaagccaactgcaaatatgggaatcttagtcggaaaacatgtggatgctcaaggcagaatatatttgccctatctccaaaactggagccattttggagatgaagtctcattctgttgcccaagctggagtatagtggtgcaaccataactcactgcatctgaaactcctgggctcaagtaatactcctgcctcaacaaaggtgtttcagatacaaattcaaagagctgggcaaatcatgagaataaaacagtcaataaaattactgtggttggaggtggagaactcggtattgcctgcacattagcaatttcagcaaagggtattgcagacaggcttgtcctcttagacctctcagaagggactaaaggagccacgatggaccttgaaatcttcaaccttcctaatgtggagatcagcaaagatttgtctgcctctgctcattccaaggtggtgatcttcacagtcaactctttgggtagttctcagtcgtaccttgatgtggtacagagcaatgtggatatgttcagagcccttgtcccagctctgggacattatagtcaacacagtgtcctgctcgttgcatctcaaccagtggaaatcatgacctatgtaacatggaaactgagtacatttcctgcaaatcgagtgatcggaattggatgtaatctggattcacagagattacagtatattattacaaatgttttgaaggcacagacttcaggcaaagaagtatgggttattggcgagcaaggagaagacaaagtgctcacatggagtggccaagaagaagtagtgagtcatacctctcaagtgcagctgtccaacagagccatggaactgctaagagtaaaaggtcaaagatcctggtctgttggactatcagtagctgacatggttgacagtattgtaaacaataagaagaaagtgcattctgtatcagctttagcaaagggatattatgatataaatagtgaagtgtttttaagtttgccttgcatccttggaaccaatggagtatctgaagttatcaaaaccacactgaaagaagatacagttactgagaaactccaaagcagtgcatcctcaatccacagtctccaacaacagttaaaactttgattctcaaatgcaatttgagaggctggacttctacctaaagggaaaagtcatttaattttacctatatataggtttgaggatttctgtatcctgctacttacttttaca

SEQ ID NO: 33812 - DNA, 2503 bp, Homo sapiens
  source 1..2503: mol_type = unassigned DNA
agtttggtcctcagcggcttccgtcctgcagcaagtccggaagaaggtccgggggctggagtcctgggacctagctcgggaccggcctggagatggagttcgactgcgagggcctgagacggctgcttggcaagtacaagttcagggacctaactgtggaagaactaaggaatgtaaatgtatttttcccacatttcaaatattccatggacacctatgtttttaaagatagttctcagaaagacctgctgaattttactggcacaattcctgtgatgtatcagggtaatacatataacataccaattcgtttctggattttggattctcaccctttcgctccccctatttgcttcttgaagccaactgcaaatatgggaatcttagtcggaaaacatgtggatgctcaaggcagaatatatttgccctatctccaaaactggagccatcctaaatctgtcattgttggattaattaaagaaatgattgccaagtttcaagaggaacttcccatgtattctctatcatcatctgatgaggcacggcaggtagacttgctagcctatattgcaaaaatcactgaaggtgtttcagatacaaattcaaagagctgggcaaatcatgagaataaaacagtcaataaaattactgtggttggaggtggagaactcggtattgcctgcacattagcaatttcagcaaagggtattgcagacaggcttgtcctcttagacctctcagaagggactaaaggagccacgatggaccttgaaatcttcaaccttcctaatgtggagatcagcaaagatttgtctgcctctgctcattccaaggtggtgatcttcacagtcaactctttgggtagttctcagtcgtaccttgatgtggtacagagcaatgtggatatgttcagagcccttgtcccagctctgggacattatagtcaacacagtgtcctgctcgttgcatctcaaccagtggaaatcatgacctatgtaacatggaaactgagtacatttcctgcaaatcgagtgatcggaattggatgtaatctggattcacagagattacagtatattattacaaatgttttgaaggcacagacttcaggcaaagaagtatgggttattggcgagcaaggagaagacaaagtgctcacatggagtggccaagaagaagtagtgagtcatacctctcaagtgcagctgtccaacagggatattatgatataaatagtgaagtgtttttaagtttgccttgcatccttggaaccaatggagtatctgaagttatcaaaaccacactgaaagaagatacagttactgagaaactccaaagcagtgcatcctcaatccacagtctccaacaacagttaaaactttgattctcaaatgcaatttgagaggctggacttctacctaaagggaaaagtcatttaattttacctatatataggtttgaggatttctgtatcctgctacttacttttacaaactgcttggttaaagtagagggtttcttgattagctttgtgatgtaaatccttaaggagttatacaaggaggggaaaaattaattttatttggggttcttgagatatctatgctgttctttaaatctacagcaggggtaaacattcatctgcagtgtgcatcaatttaaatcatatatcctaaactaaaagcacaattcatacttcgggaatattttataagtaatatatctttaaaagaaaattaccctttgacttttataatcaacataagttccaggcccagtatggatttacaaaatctgtgtcagttgtacattcacaggatccacagcttaagttactaatgtttcttgtgtaaaatcctgttggtagtaatagtaaagcattgtatttcccttcttcaaattaattacctaccaaaaaatggaaaagaattttacatgcactttaaaatagtaaaatggaaagtgaatttttaaaatatatgcattaaaagtttactttaatttccagtgggacttcctttatgaaattttccataacctcttcctggagtattacaagatctccaacatctcataaactaattgtgatattagtggaaccataagcaaatatatatttttagtggaaatagattatgaatgaaagccaagcaccttactttaaagccaaaatatgagattttcattaaaaacattggtcataatagggagaggttttttatttgttctgagcaaatcctttaacctctcctgatgatacagttcagagtacacacactttggtgatggatcaagagcaatattttcttatgtgaaagatagcttattattactattgtgacatacaactaatagtaacagttaacatcaacacttcatatataccaggcagcatgataagcactttattattttactgaatcctcacaacagaccactgaggtagggactattgccatcatcattttataaaaggaaattgaggtttagtcctcaagaagtc

SEQ ID NO: 33813 - DNA, 1848 bp, Homo sapiens
  source 1..1848: mol_type = unassigned DNA
aagaaggtccgggggctggagtcctgggacctagctcgggaccggcctggagatggagttcgactgcgagggcctgagacggctgcttggcaagtacaagttcagggacctaactgtggaagaactaaggaatgtaaatgtatttttcccacatttcaaatattccatggacacctatggtaatacatataacataccaattcgtttctggattttggattctcaccctttcgctccccctatttgcttcttgaagccaactgcaaatatgggaatcttagtcggaaaacatgtggatgctcaaggcagaatatatttgccctatctccaaaactggagccatcctaaatctgtcattgttggattaattaaagaaatgattgccaagtttcaagaggaacttcccatgtattctctatcatcatctgatgaggcacggcaggtagacttgctagcctatattgcaaaaatcactgaaggtgtttcagatacaaattcaaagagctgggcaaatcatgagaataaaacagtcaataaaattactgtggttggaggtggagaactcggtattgcctgcacattagcaatttcagcaaagggtattgcagacaggcttgtcctcttagacctctcagaagggactaaaggagccacgatggaccttgaaatcttcaaccttcctaatgtggagatcagcaaagatttgtctgcctctgctcattccaaggtggtgatcttcacagtcaactctttgggtagttctcagtcgtaccttgatgtggtacagagcaatgtggatatgttcagagcccttgtcccagctctgggacattatagtcaacacagtgtcctgctcgttgcatctcaaccagtggaaatcatgacctatgtaacatggaaactgagtacatttcctgcaaatcgagtgatcggaattggatgtaatctggattcacagagattacagtatattattacaaatgttttgaaggcacagacttcaggcaaagaagtatgggttattggcgagcaaggagaagacaaagtgctcacatggagtggccaagaagaagtagtgagtcatacctctcaagtgcagctgtccaacagagccatggaactgctaagagtaaaaggtcaaagatcctggtctgttggactatcagtagctgacatggttgacagtattgtaaacaataagaagaaagtgcattctgtatcagctttagcaaagggatattatgatataaatagtgaagtgtttttaagtttgccttgcatccttggaaccaatggagtatctgaagttatcaaaaccacactgaaagaagatacagttactgagaaactccaaagcagtgcatcctcaatccacagtctccaacaacagttaaaactttgattctcaaatgcaatttgagaggctggacttctacctaaagggaaaagtcatttaattttacctatatataggtttgaggatttctgtatcctgctacttacttttacaaactgcttggttaaagtagagggtttcttgattagctttgtgatgtaaatccttaaggagttatacaaggaggggaaaaattaattttatttggggttcttgagatatctatgctgttctttaaatctacagcaggggtaaacattcatctgcagtgtgcatcaatttaaatcatatatcctaaactaaaagcacaattcatacttcgggaatattttataagtaatatatctttaaaagaaaattaccctttgacttttataatcaacataagttccaggcccagtatggatttacaaaatctgtgtcagttgtacattcacaggatccacagctta

SEQ ID NO: 33814 - DNA, 994 bp, Homo sapiens
  source 1..994: mol_type = unassigned DNA
agcattgtgggagctcctcggtcggtgccggtcggtggctgcctattgcggcctgcggtgatcaacgaggcccggggagcgcgtccccagtctgcgcgccggtcctgcggcagctggcccaagacccggagccgaaaggaagtgttggagcctgaggtcgctccgcgccgctaggaggacgctgtgcctggcctgggacctccgctcccgcccaccgccctggagccgctgagggacgtccacgtgggcctgtccccgccgagccgcggccctgtccgcctggcgctgctctcgggccactacctctactaccactacggctgcgacggcctggacgaccgcggctggggctgcggctaccgcactctgcagacgctgtgctcgtggccagagggccagcccgcgggcgtacctggactggccgccgtacaggcggccctggaggacatgggcgacaagccccccggcttccggggctcccgggactggatcggctgcgtggaggccagcctctgcctcgctcacttcggagggccccagggacgcctctgccacgtaccccggggagtggggctgcacggggagctggagaggctttactcgcacttcgcagggggtgggggcccagtcatggttgggggggacgcagatgccaggtccaaggccttgctgggagtctgcgtagggtcaggcacggaagcctatgtcctggtattggaccctcactactggggcactccaaaaagccccagtgaactacaggctgctgggtgggtgggctggcaagaggtgagtgcagcctttgaccccaactccttctacaacctgtgcttgaccagccttagctcccaacagcagcagcgcaccttggactgaggacgaagttacagaactgagattctcgggtcccagacacgcacctatgtacctcccactggtgtccctgcaaagcctggcgcttttgacatcaataataaaagtggcagggctgagc

SEQ ID NO: 33815 - DNA, 1630 bp, Homo sapiens
  source 1..1630: mol_type = unassigned DNA
agttgtagttggtccgcccgggccccgcccctgggccgtgcggtgacaccacttcagggccggcccccggaacttttgggcaggcgtcagcgcccgtgtcaccgccacgtcgcggacatggtgatttcagaaagtatggatatactcttcagaataagaggaggccttgatttggcttttcagctagctactcctaatgaaatttttctcaagaaggcactgaaacatgtgttgagtgacctgtcaactaagctgtcttcaaacgcccttgtgttcagaatttgccacagttcagtgtatatatggcctagcagtgacataaacaccattcctggagaactgactgatgcttctgcttgtaagaacatactgcgctttattcaatttgagccagaagaagatataaaaagaaaattcatgagaaagaaggacaaaaagttatcagacatgcatcaaatagtaaatatagatcttatgctggaaatgtcaacctccctggcagctgtaacgcccatcattgaaagggaaagcggaggacaccattatgttaatatgactttacctgtcgatgcagttatatctgttgctccagaagaaacatggggaaaagttcgtaaactcctggttgatgcaattcataatcaactaactgacatggaaaaatgtattttgaaatatatgaaaggaacatctattgtggtccctgaaccactgcactttttattaccagggaaaaaaaatcttgtaacaatttcatatccttcaggaataccagatggccagctgcaggcctataggaaggagttacatgatcttttcaatctgcctcacgacagaccctatttcaaaaggtctaatgcttatcactttccagatgagccatacaaagatggttacattagaaatccacatacttaccttaatccacctaacatggagactggtatgatttatgtggtccagggcatatatggctatcatcattatatgcaggatcgcatagatgacaatggctggggctgtgcttatcgatctctgcagactatctgctcttggttcaaacatcagggatacacagagaggtccattccaacacacagagaaattcagcaggctctagtcgatgccggggacaaaccagcaacatttgtcggatcgcggcaatggattggatctattgaggtgcagctggtactaaaccaattgatcggtataacgtcaaaaatcctgtttgtcagccaaggttcagaaattgcctctcaaggacgggaactggctaatcatttccaaagtgaaggaactccagttatgatcgggggaggagttttggcccacacaatactaggagttgcatggaatgagattacagggcagataaagtttctgattctagatccacattataccggtgctgaagacctgcaagttattttggaaaagggctggtgcggatggaagggcccagatttttggaacaaggatgcatactataacttatgtcttcctcagcgaccaaatatgatttaaaatatcttggagtcaaagactgcagtagagtggtattataaatttgtgaataaagaatcagtttaatttttcacattaaatcctggttctagtttgacgattt

SEQ ID NO: 33816 - DNA, 3140 bp, Homo sapiens
  source 1..3140: mol_type = unassigned DNA
gggaaccatcagcgcctcctgtccacggagctccaggtctacaatggcagcggccgccagccccgcgttccttctgtgcctcccgcttctgcacctgctgtctggctggtcccgggcaggatgggtcgacacacactgtctttgctatgacttcatcatcactcctaagtccagacctgaaccacagtggtgtgaagttcaaggcctggtggatgaaaggccttttcttcactatgactgtgttaaccacaaggccaaagcctttgcttctctggggaagaaagtcaatgtcacaaaaacctgggaagaacaaactgaaacactaagagacgtggtggatttccttaaagggcaactgcttgacattcaagtggagaatttaatacccattgagcccctcaccctgcaggccaggatgtcttgtgagcatgaagcccatggacacggcagaggatcttggcagttcctcttcaatggacagaagttcctcctctttgactcaaacaacagaaagtggacagcacttcatcctggagccaagaagatgacagagaagtgggagaagaacagggatgtgaccatgttcttccagaagatttcactgggggattgtaagatgtggcttgaagaatttttgatgtactgggaacaaatgctggatccaacaaaaccaccctctctggccccaggcacaacccaacccaaggccatggccaccaccctcagtccctggagccttctcatcatcttcctctgcttcattctagctggcagatgaggagagttgtttagagtgacaggtggaaagtgatatcaagaagcctctgttagcctggtctgggtcctgctctcccttcagggaggccgcctgtctactcaccactgtgcctttctggaaagcaggagttcaagccttagcaagcccagaggcccccagcagacgatgaggacattgtcggctcaacatctcaggccactcattaccttcgctcatgatcccagcagccatttttcttaacaccttctgccactttctgtcggtgctaatggatggaactcctgcacaagttttaactgaacaagaaatcccagcaaaaggcatttttttttctacttctttgattgtagaaaagcagacacttctctgaaacatgaccttattcttccaaacagtatcgctagtaaaatagcatgctggacttcagacctcagggatccttttgatgcactgaccaggaattgtgataatccttttcatttttatggctttttacagtttctcattctgtcaaccatattgaagtgaagtggcatagtcttcactcactgtaatctccagctcctgggctcaagtgatcctctagactcagcctctagaatagctgggactacaggcacatgccaccaggactggcaaactgttttatttttaggtagaggtagggtcttcctatgttgcccaggatggtcttcaaatcttggtctcgagcaatgctaccaccttggcctcccaatgctctgggattacagacatgaaccacagtgcctgttgtagaaatttttaattatttaatatgaaaatattacattcatgattattttatttagtaaataaaataatagagagcccagaaatcaacctgcacacctaccgccatctaatcttcaatagaaatgggcaatgtgggaaagactccctattcgaaaattagtgctggaatatctggccaaccatatgcagaagaatgaaactgaacccctacttctccccatatatgtaaaataattcaatatggatgaaagatttaaatataagtactaaaactgtaaaaatcctggaatataacctaagaaataccaatgtggacatagggcctggcaaagatttcatgaagaagacactaaaaacaattgcaacaaaaacagaaattgacaaatggggcctcattaaactaaagagcttctgcacagaaaaagaaactagcaacacagtaaacagacagcctgtagaatggggaaaactatttgcaaactctgcatctgatgaaggtccaatatccagaatctacaaggaacttaaacaattcaacaagcaagaagaaaaaacccaattaaaattgggcaaaggcatgaacagacacttttcaaaagaagacctacaattggccaacaaacatgaaaaaatgctcagtatcactaatcatcagataagtgcaaatcaaaactgcaatgagttaccatctcttaccagtcacaaagtcagagatggtggtgaggctgcagagcaaaagaaacagacactgttggtgggaaagcaaacttgttcagccactatggaaagcagtttggagatttctccaagaacttaaaatagaactaccattcaatcccgcaatcccactactcgggatatacccacaggaaaagaattcattttatcaaaaagacacctgcaccaatatgttcattacagtgctattctcaccagcaaggacagagaatcaatctaagtgcccaacaacagtaaattcaatgaaaaaaaatgtggtacatagatacgatggaaaactatgcagccatgaaacacaagaaaatcatgtccttttcagcaacatggatgcaactagaggctattatcctaagcaacctaatgcaagaacagaaaaccacatactgcatcttcccattggaaagtggcagctaaacattaaattcgcatgaaccacagatgctggagatcaccagaccggggagagaagaggggcacctgggctgaaaaacacacctgttgggtatcatgcttactgtctgggcgatgggatcattgggacaccaagcctcagcttctcaaattctacccatgtaacaaacctgtatatgtaccttgtattatataggttgaaattaaagatgaataaataaaataaaatgacacaaggccaaaaacaaatgggtttaactgaccagagcgagagaactctgcactatgaacccaaacccagctcaaaaagataaaatctagtcatttaagataatcataagttgtatgatgataattgtataaaaatttgtatgatgataattgtataataattatacatgaaagtgccaaaaccctacaattaaacactgtataatgg

SEQ ID NO: 33817 - DNA, 1621 bp, Homo sapiens
  source 1..1621: mol_type = unassigned DNA
gggaaccatcagcgcctcctgtccacggagctccaggtctacaatggcagcggccgccagccccgcgttccttctgtgcctcccgcttctgcacctgctgtctggctggtcccgggcaggatgggtcgacacacactgtctttgctatgacttcatcatcactcctaagtccagacctgaaccacagtggtgtgaagttcaaggcctggtggatgaaaggccttttcttcactatgactgtgttaaccacaaggccaaagcctttgcttctctggggaagaaagtcaatgtcacaaaaacctgggaagaacaaactgaaacactaagagacgtggtggatttccttaaagggcaactgcttgacattcaagtggagaatttaatacccattgagcccctcaccctgcaggccaggatgtcttgtgagcatgaagcccatggacacggcagaggatcttggcagttcctcttcaatggacagaagttcctcctctttgactcaaacaacagaaagtggacagcacttcatcctggagccaagaagatgacagagaagtgggagaagaacagggatgtgaccatgttcttccagaagatttcactgggggattgtaagatgtggcttgaagaatttttgatgtactgggaacaaatgctggatccaacaaaaccaccctctctggccccaggcacaacccaacccaaggccatggccaccaccctcagtccctggagccttctcatcatcttcctctgcttcattctagctggcagatgagtggaaagtgatatcaagaagcctctgttagcctggtctgggtcctgctctcccttcagggaggccgcctgtctactcaccactgtgcctttctggaaagcaggagttcaagccttagcaagcccagaggcccccagcagacgatgaggacattgtcggctcaacatctcaggccactcattaccttcgctcatgatcccagcagccatttttcttaacaccttctgccactttctgtcggtgctaatggatggaactcctgcacaagttttaactgaacaagaaatcccagcaaaaggcatttttttttctacttctttgattgtagaaaagcagacacttctctgaaacatgaccttattcttccaaacagtatcgctagtaaaatagcatgctggacttcagacctcagggatccttttgatgcactgaccaggaattgtgataatccttttcatttttatggctttttacagtttctcattctgtcaaccatattgaagtgaagtggcatagtcttcactcactgtaatctccagctcctgggctcaagtgatcctctagactcagcctctagaatagctgggactacaggcacatgccaccaggactggcaaactgttttatttttaggtagaggtagggtcttcctatgttgcccaggatggtcttcaaatcttggtctcgagcaatgctaccaccttggcctcccaatgctctgggattacagacatgaaccacagtgcctgttgtagaaatttttaattatttaatatgaaaatattacattcatgattattttatttagtaaataaaataatagagagcccagaaatcaacctg

SEQ ID NO: 33818 - DNA, 1349 bp, Homo sapiens
  source 1..1349: mol_type = unassigned DNA
aaaaccttgaggtgattcatcttccaggctctccttccatcaagtctctcatccctagcgctctgggtccttaatggcagcagccgccgctaccaagatccttctgtgcctcccgcttctgctcctgctgtccggctggtcccgggctgggcgagccgaccctcactctctttgctatgacatcaccgtcatccctaagttcagacctggaccacggtggtgtgcggttcaaggccaggtggatgaaaagacttttcttcactatgactgtggcaacaagacagtcacacctgtcagtcccctggggaagaaactaaatgtcacaacggcctggaaagcacagaacccagtactgagagaggtggtggacatacttacagagcaactgcgtgacattcagctggagaattacacacccaaggaacccctcaccctgcaggcaaggatgtcttgtgagcagaaagctgaaggacacagcagtggatcttggcagttcagtttcgatgggcagatcttcctcctctttgactcagagaagagaatgtggacaacggttcatcctggagccagaaagatgaaagaaaagtgggagaatgacaaggttgtggccatgtccttccattacttctcaatgggagactgtataggatggcttgaggacttcttgatgggcatggacagcaccctggagccaagtgcaggagcaccactcgccatgtcctcaggcacaacccaactcagggccacagccaccaccctcatcctttgctgcctcctcatcatcctcccctgcttcatcctccctggcatctgaggagagtcctttagagtgacaggttaaagctgataccaaaaggctcctgtgagcacggtcttgatcaaactcgcccttctgtctggccagctgcccacgacctacggtgtatgtccagtggcctccagcagatcatgatgacatcatggacccaatagctcattcactgccttgattccttttgccaacaattttaccagcagttatacctaacatattatgcaattttctcttggtgctacctgatggaattcctgcacttaaagttctggctgactaaacaagatatatcattttctttcttctctttttgtttggaaaatcaagtacttctttgaatgatgatctctttcttgcaaatgatattgtcagtaaaataatcacgttagacttcagacctctggggattctttccgtgtcctgaaagagaatttttaaattatttaataagaaaaaatttatattaatgattgtttcctttagtaatttattgttctgtactgatatttaaataaagagttctatttcccaaaaa

SEQ ID NO: 33819 - DNA, 949 bp, Homo sapiens
  source 1..949: mol_type = unassigned DNA
atacgctggtctccacatcgactgcgccttgtgtcccgggcgctcctggtctacaatggcagcggccgccagccccgcgatccttccgcgcctcgcgattcttccgtacctgctattcgactggtccgggacggggcgggccgacgctcactctctctggtataacttcaccatcattcatttgcccagacatgggcaacagtggtgtgaggtccagagccaggtggatcagaagaattttctctcctatgactgtggcagtgacaaggtcttatctatgggtcacctagaagagcagctgtatgccacagatgcctggggaaaacaactggaaatgctgagagaggtggggcagaggctcagactggaactggctgacactgagctggaggatttcacacccagtggacccctcacgctgcaggtcaggatgtcttgtgagtgtgaagccgatggatacatccgtggatcttggcagttcagcttcgatggacggaagttcctcctctttgactcaaacaacagaaagtggacagtggttcacgctggcttagggacttcctgatgcacaggaagaagaggctggaacccacagcaccacccaccatggccccaggcttagctcaacccaaagccatagccaccaccctcagtccctggagcttcctcatcatcctctgcttcatcctccctggcatctgagaagagtcatttagagtgacaggtggaaggtgatatcaagaagcctctgttagcctggtctggttcctgctctcccttcagggaggccgcctgtctactcaccactgtgcctttctggaaagcaggagttcaagccttagcaagcccagaggcccccagcagatgatgaggacattgtcggctcaacatctcaggccactcattaccttcgctcatgatcccagcagccatttttcttttttttttt

SEQ ID NO: 33820 - DNA, 966 bp, Homo sapiens
  source 1..966: mol_type = unassigned DNA
ccttgtgtcccgggcgctcctggtctacaatggcagcggccgccagccccgcgatccttccgcgcctcgcgattcttccgtacctgctattcgactggtccgggacggggcgggccgacgctcactctctctggtataacttcaccatcattcatttgcccagacatgggcaacagtggtgtgaggtccagagccaggtggatcagaagaattttctctcctatgactgtggcagtgacaaggtcttatctatgggtcacctagaagagcagctgtatgccacagatgcctggggaaaacaactggaaatgctgagagaggtggggcagaggctcagactggaactggctgacactgagctggaggatttcacacccagtggacccctcacgctgcaggtcaggatgtcttgtgagtgtgaagccgatggatacatccgtggatcttggcagttcagcttcgatggacggaagttcctcctctttgactcaaacaacagaaagtggacagtggttcacgctggagccaggcggatgaaagagaagtgggagaaggatagcggactgaccaccttcttcaagatggtctcaatgagagactgcaagagctggcttagggacttcctgatgcacaggaagaagaggctggaacccacagcaccacccaccatggccccaggcttagctcaacccaaagccatagccaccaccctcagtccctggagcttcctcatcatcctctgcttcatcctccctggcatctgagtggaaggtgatatcaagaagcctctgttagcctggtctggttcctgctctcccttcagggaggccgcctgtctactcaccactgtgcctttctggaaagcaggagttcaagccttagcaagcccagaggcccccagcagatgatgaggacattgtcggctcaacatctcaggccactcattaccttcgctcatgatcccag

SEQ ID NO: 33821 - DNA, 1598 bp, Homo sapiens
  source 1..1598: mol_type = unassigned DNA
atacgctggtctccacatcgactgcgccttgtgtcccgggcgctcctggtctacaatggcagcggccgccagccccgcgatccttccgcgcctcgcgattcttccgtacctgctattcgactggtccgggacggggcgggccgaagagcagctgtatgccacagatgcctggggaaaacaactggaaatgctgagagaggtggggcagaggctcagactggaactggctgacactgagctggaggatttcacacccagtggacccctcacgctgcaggtcaggatgtcttgtgagtgtgaagccgatggatacatccgtggatcttggcagttcagcttcgatggacggaagttcctcctctttgactcaaacaacagaaagtggacagtggttcacgctggagccaggcggatgaaagagaagtgggagaagagtcatttagagtgacaggtggaaggtgatatcaagaagcctctgttagcctggtctggttcctgctctcccttcagggaggccgcctgtctactcaccactgtgcctttctggaaagcaggagttcaagccttagcaagcccagaggcccccagcagatgatgaggacattgtcggctcaacatctcaggccactcattaccttcgctcatgatcccagcagccatttttctttttttttttttgtttttttttttttttgagacggagtctcgctctgtcgcccaggccggactgcggactgcagtggcgcaatctcggctcactgcaagctccgcttcccgggttcacgccattctcctgcctcagcctcccgagtagctgggactacaggcacccgccaccgcgcccggctaattttttgtatttttagtagagacagggtttcaccttgttagccaggatggtctcgatctcctgacctcatgatccacctgcctcggcctcccagagtgctgggattacaggcgtgagccaccgcgcccggccagccatttttcttaacaccttctgccactttctctcggtgctaatggatggaattcctgcacaagttttaactgaacaagaaatcccagcaaaaggcattttctttctacttctttgattgtggaaaagcagacatttctctgaagcatgaccttattcttcgaaacggtattgctagtaaaatagcatgcaggacttcagacctcagggatcctttccatgcactgaccaagaattgtattaatcctttttatcattatagtttttttacattttctcattctgtcaaccatattggagtgaagtggcatagtcatcactcactgtaatctccaactcctgggctcaagtgatcctctagactcagcctctagagtagctgggactacaggcgcatgccaccatgcctggcaaattgttttatatttaggtagagattgggtcttcctatgttgcgcaggtaataaaactgtgaaaatcctggaatataagctaagaaataccaatgtggacatagggcctggcaaagatttcatgaagaagacactaaaaacaattgtaacaaaaacaaaaattgacaaatgggacctcattaaactaaagagcttctgcacag

SEQ ID NO: 33822 - DNA, 735 bp, Homo sapiens
  source 1..735: mol_type = unassigned DNA
atggcagcggccgccagccccgcgatccttccgcgcctcgcgattcttccgtacctgctattcgactggtccgggacggggcgggccgacgctcactctctctggtataacttcaccatcattcatttgcccagacatgggcaacagtggtgtgaggtccagagccaggtggatcagaagaattttctctcctatgactgtggcagtgacaaggtcttatctatgggtcacctagaagagcagctgtatgccacagatgcctggggaaaacaactggaaatgctgagagaggtggggcagaggctcagactggaactggctgacactgagctggaggatttcacacccagtggacccctcacgctgcaggtcaggatgtcttgtgagtgtgaagccgatggatacatccgtggatcttggcagttcagcttcgatggacggaagttcctcctctttgactcaaacaacagaaagtggacagtggttcacgctggagccaggcggatgaaagagaagtgggagaaggatagcggactgaccaccttcttcaagatggtctcaatgagagactgcaagagctggcttagggacttcctgatgcacaggaagaagaggctggaacccacagcaccacccaccatggccccaggcttagctcaacccaaagccatagccaccaccctcagtccctggagcttcctcatcatcctctgcttcatcctccctggcatctga

SEQ ID NO: 33823 - DNA, 1582 bp, Homo sapiens
  source 1..1582: mol_type = unassigned DNA
gccatgaaggtgaagaagggcggcggtggggccgggacggcgacggagtccgctccggggccctcgggccagagcgtggcccccataccacagccgcctgcggaatccgaatctgggtccgagtcggagccggacgcaggcccagggcccaggccggggccgctgcagaggaagcagccgatcgggccggaggacgtgctggggctgcagcggatcaccggtgactacctctgctcccctgaggagaatatctacaagatcgactttgtcaggtttaagattcgggacatggactcaggcactgtcctctttgaaatcaagaagcccccagtctcagaacggttgcccatcaaccggcgggacctggaccccaatgctgggcgctttgtccgctaccagttcacgcctgccttcctccgcctgaggcaggtgggagccacggtggagttcacagtgggagacaagcctgtcaacaacttccgcatgatcgagaggcactacttccgcaaccagctactcaaaagcttcgacttccactttggcttctgcatccccagcagcaagaacacctgcgagcacatttacgacttcccccctctctccgaggagctgagtgcgcgggcagggtcttctgggagtggggaagtgggggcgtctagagactgagctgcgggagggagagggacttgtgggtctgatcccatttctccccaccctggggctcttctgtgtctgccaccattcccatatcatccgtagagaaagaggctggggatatttcaggctgtttggctgtccctgtaccccagtcctgaagcccctgcagtggcgggactcaagctcctgacctttgcccggcctggctgggcctctcttgcagtcagcgagatgatccgccacccgtatgagacccagtctgacagcttctacttcgtggatgaccggctggtgatgcacaataaagcagactattcctacagcgggacaccctgaccccacggctgccctgaccccaggaggctccagttctgggctgggagctgtgacctccccaacgctcacccctcaaccccaagtcctctgcttggggagttctccaggagctccggaccctgagtcaatgttgggaggaagggtacctggtgtccccagtcaagcccatgaagcccatgcggcctgctacatggggtggggtcgtagggaggctgtttgcctccacgtctaggaaggcctgtgagaggagcagtcaggacttccggacaacttagctgggccctacttgggcccaagtttcagaatagtgttcccctatcaaggctgtgactagatcaggcagggatccattccctgtcccctgcccactaccttcaggccatttagagttgtaaatttacaaagatccacggtgggctccagctgccaagccacccaagggagtctgggccctaggcctagccccatccctccccatgaggggccaagacactgcctaaggtgtgggagggactggctgagattgcagcccatggtaggagctggaccaactgtatatagttttcaataaactttttccttttctgtt

SEQ ID NO: 33824 - DNA, 1397 bp, Homo sapiens
  source 1..1397: mol_type = unassigned DNA
ggctgcggatgctcccacttcccccggctccagccggcgcaggcagcggcggcagcagcaggcgagcctcggccccgcaaggccatgaaggtgaagaagggcggcggtggggccgggacggcgacggagtccgctccggggccctcgggccagagcgtggcccccataccacagccgcctgcggaatccgaatctgggtccgagtcggagccggacgcaggcccagggcccaggccggggccgctgcagaggaagcagccgatcgggccggaggacgtgctggggctgcagcggatcaccggtgactacctctgctcccctgaggagaatatctacaagatcgactttgtcaggtttaagattcgggacatggactcaggcactgtcctctttgaaatcaagaagcccccagtctcagaacggttgcccatcaaccggcgggacctggaccccaatgctgggcgctttgtccgctaccagttcacgcctgccttcctccgcctgaggcaggtgggagccacggtggagttcacagtgggagacaagcctgtcaacaacttccgcatgatcgagaggcactacttccgcaaccagctactcaaaagcttcgacttccactttggcttctgcatccccagcagcaagaacacctgcgagcacatttacgacttcccccctctctccgaggagctgatcagcgagatgatccgccacccgtatgagacccagtctgacagcttctacttcgtggatgaccggctggtgatgcacaataaagcagactattcctacagcgggacaccctgaccccacggctgccctgaccccaggaggctccagttctgggctgggagctgtgacctccccaacgctcacccctcaaccccaagtcctctgcttggggagttctccaggagctccggaccctgagtcaatgttgggaggaagggtacctggtgtccccagtcaagcccatgaagcccatgcggcctgctacatggggtggggtcgtagggaggctgtttgcctccacgtctaggaaggcctgtgagaggagcagtcaggacttccggacaacttagctgggccctacttgggcccaagtttcagaatagtgttcccctatcaaggctgtgactagatcaggcagggatccattccctgtcccctgcccactaccttcaggccatttagagttgtaaatttacaaagatccacggtgggctccagctgccaagccacccaagggagtctgggccctaggcctagccccatccctccccatgaggggccaagacactgcctaaggtgtgggagggactggctgagattgcagcccatggtaggagctggaccaactgtatatagttttcaataaactttttccttttctgttc

SEQ ID NO: 33825 - DNA, 676 bp, Homo sapiens
  source 1..676: mol_type = unassigned DNA
gccggcgcaggcagcggcggcagcagcaggcgagcctcggccccgcaaggccatgaaggtgaagaagggcggcggtggggccgggacggcgacggagtccgctccggggccctcgggccagagcgtggcccccataccacagccgcctgcggaatccgaatctgggtccgagtcggagccggacgcaggcccagggcccaggccggggccgctgcagaggaagcagccgatcgggccggaggacgtgctggggctgcagcggatcaccggtggggcccgtccccttttcccagcgtggaggtttaagattcgggacatggactcaggcactgtcctctttgaaatcaagaagcccccagtctcagaacggttgcccatcaaccggcgggacctggaccccaatgctgggcgctttgtccgctaccagttcacgcctgccttcctccgcctgaggcaggtgggagccacggtggagttcacagtgggagacaagcctgtcaacaacttccgcatgatcgagaggcactacttccgcaaccagctactcaaaagcttcgacttccactttggcttctgcatccccagcagcaagaacacctgcgagcacatttacgacttcccccctctctccgaggagctgagtgcgcgggcagggtcttctgggagtggggaagtg

SEQ ID NO: 33826 - DNA, 9837 bp, Homo sapiens
  source 1..9837: mol_type = unassigned DNA
ctgtctctcctctgtgtctctctcaaaaaagccaagtttgatggtgcccaagagaaattcaacacgtacgtgaccctgaaagtgcagaatgtcaagagcacgaccatcgcggtgcggggcagccagcccagctgggagcaggatttcatgttcgagattaaccgtctggatttgggactgacggtggaggtgtggaataagggtctcatctgggacacaatggtgggcactgtgtggatcccactgaggaccatccgccagtccaatgaggagggccctggagagtggctgacgctggactcccaggtcatcatggcagacagtgagatctgtggcaccaaggaccccaccttccaccgcatcctcctggacacgcgctttgagctacccttagacattcctgaagaggaggctcgctactgggccaagaagctggagcagctcaatgctatgcgggaccaggatgaatattcgttccaagatgagcaagacaagcctctgcctgtccccagcaaccagtgctgcaactggaattattttggctggggtgagcagcacaacgatgaccccgacagtgcagtggatgatcgtgacagtgactaccgcagtgaaacgagcaacagcatcccgccgccctattatactacgtcacaacccaacgcctcagtccaccaatattctgttcgcccaccacccctgggctcccgggagtcctacagtgactccatgcacagttacgaggagttctctgagccacaagccctcagccccacgggtagcagccgctatgcctcttccggggagctgagccagggaagctctcagctgagcgaggacttcgaccctgacgagcacagcctgcagggctccgacatggaggatgagcgggaccgggactcctaccactcctgccacagctcggtcagctaccacaaagactcgcctcgctgggaccaggatgaggaagagctggaggaggacctggaggacttcctggaggaggaggagctgcctgaagatgaggaggagctggaggaggaggaggaggaggtgcctgacgatttgggcagctatgcccagcgtgaagacgtagctgtggctgagcccaaagacttcaaacgcatcagcctcccgccagctgccccagggaaggaggacaaggccccagtggcacccaccgaggcccccgacatggccaaggtggcccccaagccagccacgcccgacaaggtgcctgcagctgagcagatccctgaggctgagccacccaaggacgaggagagtttcaggccgagagaggatgaggaaggccaggaggggcaggactccatgtccagggccaaggccaactggctgcgtgccttcaacaaggtgcggatgcagctgcaggaggcccggggagaaggagagatgtctaaatccctatggttcaaaggcggcccagggggcggtctcatcatcatcgacagcatgccagacatccgcaagaggaaacctatcccactcgtgagcgacttggccatgtccctggtccagtccaggaaagcgggcatcacctcggccttggcctccagcacgttgaacaacgaggagctgaaaaaccacgtttacaagaagaccctgcaagccttaatctaccccatctcgtgcacgacgccacacaacttcgaagtgtggacggccaccacgcccacctactgctacgagtgcgaggggctgctgtggggcatcgcgaggcagggcatgcgctgcaccgagtgcggtgtcaagtgccacgagaagtgccaggacctgctcaacgccgactgcctgcagcgggctgcggagaagagctccaagcacggggcggaggaccggacacagaacatcatcatggtgctcaaggaccgcatgaagatccgggagcgcaacaagcccgagatcttcgagctcatccaggagatcttcgcggtgaccaagacggcgcacacgcagcagatgaaggcggtcaagcagagcgtgctggacggcacgtccaagtggtccgccaagatcagcatcaccgtggtctgcgcccagggcttgcaggcaaaggacaagacaggatccagtgacccctatgtcaccgtccaggtcgggaagaccaagaaacggacaaaaaccatctatgggaacctcaacccggtgtgggaggagaatttccactttgaatgtcacaattcctccgaccgcatcaaggtgcgcgtctgggacgaggatgacgacatcaaatcccgcgtgaaacagaggttcaagagggaatctgacgatttcctggggcagacgatcattgaggtgcggacgctcagcggcgagatggacgtgtggtacaacctggacaagcgaactgacaaatctgccgtgtcgggtgccatccggctccacatcagtgtggagatcaaaggcgaggagaaggtggccccgtaccatgtccagtacacctgtctgcatgagaacctgttccacttcgtgaccgacgtgcagaacaatggggtcgtgaagatcccagatgccaagggtgacgatgcctggaaggtttactacgatgagacagcccaggagattgtggacgagtttgccatgcgctacggcgtcgagtccatctaccaagccatgacccactttgcctgcctctcctccaagtatatgtgcccaggggtgcctgccgtcatgagcaccctgctcgccaacatcaatgcctactacgcacacaccaccgcctccaccaacgtgtctgcctccgaccgcttcgccgcctccaactttgggaaagagcgcttcgtgaaactcctggaccagctgcataactccctgcggattgacctctccatgtaccggaataacttcccagccagcagcccggagagactccaggacctcaaatccactgtggaccttctcaccagcatcaccttctttcggatgaaggtacaagaactccagagcccgccccgagccagccaggtggtaaaggactgtgtgaaagcctgccttaattctacctacgagtacatcttcaataactgccatgaactgtacagccgggagtaccagacagacccggccaagaagggggaagttctcccagaggaacaggggcccagcatcaagaacctcgacttctggtccaagctgattaccctcatagtgtccatcattgaggaagacaagaattcctacactccctgcctcaaccagtttccccaggagctgaatgtgggtaaaatcagcgctgaagtgatgtggaatctgtttgcccaagacatgaagtacgccatggaggagcacgacaagcatcgtctatgcaagagtgccgactacatgaacctccacttcaaggtgaaatggctctacaatgagtatgtgacggaacttcccgccttcaaggaccgcgtgcctgagtaccctgcatggtttgaacccttcgtcatccagtggctggatgagaatgaggaggtgtcccgggatttcctgcacggtgccctggagcgagacaagaaggatgggttccagcagacctcagagcatgccctattctcctgctccgtggtggatgttttctcccaactcaaccagagctttgaaatcatcaagaaactcgagtgtcccgaccctcagatcgtggggcactacatgaggcgctttgccaagaccatcagtaatgtgctcctccagtatgcagacatcatctccaaggactttgcctcctactgctccaaggagaaggagaaagtgccctgcattctcatgaataacactcaacagctacgagttcagctggagaagatgttcgaagccatgggaggaaaggagctggatgctgaagccagtgacatcctgaaggagcttcaggtgaaactcaataacgtcttggatgagctcagccgggtgtttgctaccagcttccagccgcacattgaagagtgtgtcaaacagatgggtgacatccttagccaggttaagggcacaggcaatgtgccagccagtgcctgcagcagcgtggcccaggacgcggacaatgtgttgcagcccatcatggacctgctggacagcaacctgaccctctttgccaaaatctgtgagaagactgtgctgaagcgagtgctgaaggagctgtggaagctggttatgaacaccatggagaaaaccatcgtcctgccgcccctcactgaccagacgctgcaggggaacctcttgagaaaacatggcaagggattagaaaagggcagggtgaaattgccaagccactcagacggaacccagatgatcttcaatgcagccaaggagctgggtcagctgtccaaactcaaggatcacatggtacgagaagaagccaagagcttgaccccaaagcagtgcgcggttgttgagttggccctggacaccatcaagcaatatttccacgcgggtggcgtgggcctcaagaagaccttcctggagaagagcccggacctgcaatccttgcgctatgccctgtcgctctacacgcaggccaccgacctgctaatcaagacctttgtacagacgcaatcggcccagggcttgggtgtagaagaccctgtgggtgaagtctctgtccatgttgagctgttcactcatccaggaactggggaacacaaggtcacagtgaaagtggtggctgccaatgacctcaagtggcagacttctggcatcttccggccgttcatcgaggtcaacatcattgggccccagctcagcgacaagaaacgcaagtttgcgaccaaatccaagaacaatagctgggctcccaagtacaatgagagcttccagttcacgctgagcgccgacgcgggtcccgagtgctatgagctgcaggtgtgcgtcaaggactactgcttcgcgcgcgaggaccgcacggtggggctggccgtgctgcagctgcgtgagctggcccagcgcgggagcgccgcctgctggctgccgctcggccgccgcatccacatggacgacacgggcctcacggtgctgcgaatcctctcgcagcgcagcaacgacgaggtggccaaggagttcgtgaagctcaagtcggacacgcgctccgccgaggagggcggtgccgcgcctgcgccttagcgcgggcggtcggccgagcggcactgcgcctgcgcggagggcgctgggcggggagggacggggcttgcgccttggtgggacctccccaggggcggggctcggggggctccacgccaagggtgggctgcgcctacgcccttgactcagctttcccttttggggaattaggaatggaggatgccccgccctctcgggaggccacgcccaagggcgcgacgaaggaaggagccacatccccaacttgaggccacgcccccagcacctagggggcattttgagctgggatgggggaaacctcgtccctatggaggaggccacatcccggggctctggtaccgggaggcaccacctcatgtcccctggaaaagccataagatgggacccagacccctgggaccccagaccaattgccaagtatggaaatctcagctccctcgagggggggccctgggcaaggggtagggctctctggagcgcccctctaggtggcctggggactggagggaccaggatgctggttggagggccccggaataccggagtccctttagatatttgtgcaaaaaataaatggggggaggggggaggatgggatttcaaaagcacatgcgcccttgggcgcccaaaccctgggggccgaggggacggctctggttccccacgctgcccctacttccctttgggagtttgcctctccctctcccccaacaaacccagtcctcatatcatagagttcaacacacccatttgacagatggcaaaactgaggcttaaagagctgcttgagacttggccaaggttccaggtgccataccctctgtgcccctcccttaggcctgtgtgccccatggaagggtgggctgagatcgggatgacctgacacagctccctattgctgctaattccccctcggcctcctccaaggggtgggaattccaggccaagacccctacttcgcctttccttctccggctgccaagcaggacctttgccctcagccctttctcctgggatctccatgggggatgccatgagggcctcccaccacaaaagagaatttgggatcccctggtcccaggtttctccatcccttcttccttttccagaattttccaaataggaaagaacagaaggagaccagaaactctaggggggagaaagagaatgagagaaagagaatgagagagagagaaacacaaacacagtgacacagtgagagcttagtctccaagagcctattcattgattcaaacacccaagccacaggatacctcagatggccctcttgccagctggaagctctttctccaatgagcaaagttacagtgacctggctggagttacctggtgcacataggaccttaggggaaagttcagcgtggactacacttgctctgggatctgcttttccacatgtgtgtatggcacgcctttttctgctggattgggaaggacaagattttgctgtgctagggagaaatgaaaacggggtgagctgagtagctgggtttctggaggatagaacatcagatggggaggctttccgaggtgaagaatgagagggaaccacttactagagagaaaagagctccaggcctggggaacagcacgtgcgaaggccaggagagaagaactgttgaaacaacgagaagggtggcacggctggagctgagccagcaagggggatcgtgaggagccttggggttggggagatctgcagaagcatcagaccaggcagggcctcgtacgcagtcctgaggagttttacttttattctaagacagttggggagctccaggagctgttttaagttggggagagactggattccagcctgcaaaagctgttttgtgaagactaaaaccagtgaggagaggtggaggtgctttggggacactgaaatggattcttggaaagattctgaaggctgtgttgaaaagacacctatagctgtggggacatgactataatcccagcatttggggagaccgaggctggcagatcacttaaggtcaggagtttgagaccagcctggccaacatggcgaaaccccatctctgctaaaaatacaaaaattagctgggtgcagtggtgcatgcctgtagtcccagctactcaggagactgaggcgggagaattgtttgaaccctggaggcagaggttgtagtgagtcgtgatcacacaactgcactccagcctgggcaacagaacaatactccattccctcccctctaccccaccaaaaaaaaaaaaaaatcctgcccttagatgagctctagggctgctgagtacagttgtcccagttgcacagtgcccaagggtttggcattgctaagaaggccacgtgcaaatcctagatattgagtgttgtatgtttgtgacgttggtttcccgacatgtgaatggcccaagtgtctggaagaagtggcgccactttctaatttgcttggagatgttgcatgtcccttaaattcagacaggtgcaggtaactggaggttctgaaccaaaggttaaaatgcaaattctcatacagggttgggaagttgtagccagggataagcttatgtgactgttatatggactgaggagcagatgtgaatttcgaaccatgacatggctgagggtaggggtcgggtggatggatgattcagggttgtaacccatagagcccaaaggggaagtgatctgtgacctggggtgagggtgatctggaagatttttggatggctggaaagaaatggggaagtcgagctgcctgagagagccaagttatttcccaaaagattccttaggagtctttctgttcaagacctccgtgtgtgtgtgtgtgtgtttagggttccccagcaatggcccaggcatgtgaaggaaacaagcttcttcagggaatatttgttgaatgagttttcctgactcccaggctagaactgtttttgcaatttccaccctcttttctttcccccagagaactcctattcgtccttcaaaacccatcacggaaacccctcttggagaaaaccctccttccttcccctcaggactttcccagccaccgtctctcctccagtccagcctgatgccatgggactgggggtttctctgtccagctctgtttctcccagactggggtctgaggactctcaggacccccaactttacctagcacaggctgggcacaagtgggtgacagggagtctacgcctagtggaattatgtattggggcagggtcagtgtgagaatacacatccgcatgcatgtctgtccatgtctgtccgtaccaaccttccccttccacacggacctgggcacataggaggtgtctgagcctgacacatgggacagagagtggacatggctgagacacggacagagaaaagacaaggagtccagggggctgaaagccttttgaaatcaggaagttcctgtattggcagaacaaagcccagagaggagcagggctttcctcaacgccacccagcaagtggacacagagcccggccttggatgacacctccagggttctgaaccctggacctcgctttatgcaaggagctggccccacatttccatgaatcggggaaacagcacaagaaggttggcctgtggcagggcaagggttaaaggggtgacattgagggatgcctcagagtcaaagtcccctgaccaagaggaatagagtagaaaacacagagacagagggtgagatcacgccccgatgaggacggagagagacagagatggagagagacatagaggtggaaatatacagagaaagataaatgcagagaccaaggcagggagtgtcgggggaagtaaagagggtgtcctgaagaaagaaggatctgttcactcttaccagtctgtcctcgaatgatttgcataaaatgaggaggtgcctgtccacacccccaattcctctctcaggccccagagcctgagacctcaccatgcccccatcagagatgcaaaaaactaaacacccaactagaaatccttgggacctctctcggctgggatctcagagcctttctgtcccctacccctaccccatgtgctgtcgattttgcagatggggacaacctggggcctcccggaactctgccaccctggggaagttgggggagggccttagtcccggatcacaaccccgtctgctccccagaatcctttcctaagaatcgttgaggaccaaagttgtctttgctgacacgtgttgcttttctctttgccttttattgtttcagagaaaaatcaagttgactgtgtcaagtaacaccccaccccttacccccgtccagccatagtggctctctggagacacaggtcacaggcggagggtcccctgatcatccccaaccacacagccagggggacttgacccctgtccacccctgtctcgtgctccctcagacccccacaaaccggccaagcagtccggggaggcttcccctccacacaactcttagcatgtgattgcagatgtgaaatcaaaacgttgtttgttttttgttttgttttgattctaccccgtcggtccagtgtctgcacagacgccttcatttctctgtaaatatgtgacttggaacaaatgtttaacacaaacgagaagtggtcatgaatgcatggtgttgagatgttttgcactattctgactttttggtctctgtaaaaatattttattaacagcagacattaaaaaaagaaaaaccacacacagccttgg

SEQ ID NO: 33827 - DNA, 10101 bp, Homo sapiens
  source 1..10101: mol_type = unassigned DNA
atgggtggcgggggcacgtgcaccatttcagtgcaggtgagggtctgcacaggaggaaacctgcttgggggccgccgtcgccccttgtccccctgcaacgaggaggtgtggggcgaggcgccccttcccggagccaggccctttaacgcccccccagcccgcagcgcccccgccccatcaggcgtccctgggctccgcctgcccgccccgcatcagcgccacagccggcccggccgcctccggcccacctgcgagctcggagacatgtctctgctttgcgttggagtcaaaaaagccaagtttgatggtgcccaagagaaattcaacacgtacgtgaccctgaaagtgcagaatgtcaagagcacgaccatcgcggtgcggggcagccagcccagctgggagcaggatttcatgttcgagattaaccgtctggatttgggactgacggtggaggtgtggaataagggtctcatctgggacacaatggtgggcactgtgtggatcccactgaggaccatccgccagtccaatgaggagggccctggagagtggctgacgctggactcccaggtcatcatggcagacagtgagatctgtggcaccaaggaccccaccttccaccgcatcctcctggacacgcgctttgagctacccttagacattcctgaagaggaggctcgctactgggccaagaagctggagcagctcaatgctatgcgggaccaggatgaatattcgttccaagatgagcaagacaagcctctgcctgtccccagcaaccagtgctgcaactggaattattttggctggggtgagcagcacaacgatgaccccgacagtgcagtggatgatcgtgacagtgactaccgcagtgaaacgagcaacagcatcccgccgccctattatactacgtcacaacccaacgcctcagtccaccaatattctgttcgcccaccacccctgggctcccgggagtcctacagtgactccatgcacagttacgaggagttctctgagccacaagccctcagccccacgggtagcagccgctatgcctcttccggggagctgagccagggaagctctcagctgagcgaggacttcgaccctgacgagcacagcctgcagggctccgacatggaggatgagcgggaccgggactcctaccactcctgccacagctcggtcagctaccacaaagactcgcctcgctgggaccaggatgaggaagagctggaggaggacctggaggacttcctggaggaggaggagctgcctgaagatgaggaggagctggaggaggaggaggaggaggtgcctgacgatttgggcagctatgcccagcgtgaagacgtagctgtggctgagcccaaagacttcaaacgcatcagcctcccgccagctgccccagggaaggaggacaaggccccagtggcacccaccgaggcccccgacatggccaaggtggcccccaagccagccacgcccgacaaggtgcctgcagctgagcagatccctgaggctgagccacccaaggacgaggagagtttcaggccgagagaggatgaggaaggccaggaggggcaggactccatgtccagggccaaggccaactggctgcgtgccttcaacaaggtgcggatgcagctgcaggaggcccggggagaaggagagatgtctaaatccctatggttcaaaggcggcccagggggcggtctcatcatcatcgacagcatgccagacatccgcaagaggaaacctatcccactcgtgagcgacttggccatgtccctggtccagtccaggaaagcgggcatcacctcggccttggcctccagcacgttgaacaacgaggagctgaaaaaccacgtttacaagaagaccctgcaagccttaatctaccccatctcgtgcacgacgccacacaacttcgaagtgtggacggccaccacgcccacctactgctacgagtgcgaggggctgctgtggggcatcgcgaggcagggcatgcgctgcaccgagtgcggtgtcaagtgccacgagaagtgccaggacctgctcaacgccgactgcctgcagcgggctgcggagaagagctccaagcacggggcggaggaccggacacagaacatcatcatggtgctcaaggaccgcatgaagatccgggagcgcaacaagcccgagatcttcgagctcatccaggagatcttcgcggtgaccaagacggcgcacacgcagcagatgaaggcggtcaagcagagcgtgctggacggcacgtccaagtggtccgccaagatcagcatcaccgtggtctgcgcccagggcttgcaggcaaaggacaagacaggatccagtgacccctatgtcaccgtccaggtcgggaagaccaagaaacggacaaaaaccatctatgggaacctcaacccggtgtgggaggagaatttccactttgaatgtcacaattcctccgaccgcatcaaggtgcgcgtctgggacgaggatgacgacatcaaatcccgcgtgaaacagaggttcaagagggaatctgacgatttcctggggcagacgatcattgaggtgcggacgctcagcggcgagatggacgtgtggtacaacctggacaagcgaactgacaaatctgccgtgtcgggtgccatccggctccacatcagtgtggagatcaaaggcgaggagaaggtggccccgtaccatgtccagtacacctgtctgcatgagaacctgttccacttcgtgaccgacgtgcagaacaatggggtcgtgaagatcccagatgccaagggtgacgatgcctggaaggtttactacgatgagacagcccaggagattgtggacgagtttgccatgcgctacggcgtcgagtccatctaccaagccatgacccactttgcctgcctctcctccaagtatatgtgcccaggggtgcctgccgtcatgagcaccctgctcgccaacatcaatgcctactacgcacacaccaccgcctccaccaacgtgtctgcctccgaccgcttcgccgcctccaactttgggaaagagcgcttcgtgaaactcctggaccagctgcataactccctgcggattgacctctccatgtaccggaataacttcccagccagcagcccggagagactccaggacctcaaatccactgtggaccttctcaccagcatcaccttctttcggatgaaggtacaagaactccagagcccgccccgagccagccaggtggtaaaggactgtgtgaaagcctgccttaattctacctacgagtacatcttcaataactgccatgaactgtacagccgggagtaccagacagacccggccaagaagggggaagttctcccagaggaacaggggcccagcatcaagaacctcgacttctggtccaagctgattaccctcatagtgtccatcattgaggaagacaagaattcctacactccctgcctcaaccagtttccccaggagctgaatgtgggtaaaatcagcgctgaagtgatgtggaatctgtttgcccaagacatgaagtacgccatggaggagcacgacaagcatcgtctatgcaagagtgccgactacatgaacctccacttcaaggtgaaatggctctacaatgagtatgtgacggaacttcccgccttcaaggaccgcgtgcctgagtaccctgcatggtttgaacccttcgtcatccagtggctggatgagaatgaggaggtgtcccgggatttcctgcacggtgccctggagcgagacaagaaggatgggttccagcagacctcagagcatgccctattctcctgctccgtggtggatgttttctcccaactcaaccagagctttgaaatcatcaagaaactcgagtgtcccgaccctcagatcgtggggcactacatgaggcgctttgccaagaccatcagtaatgtgctcctccagtatgcagacatcatctccaaggactttgcctcctactgctccaaggagaaggagaaagtgccctgcattctcatgaataacactcaacagctacgagttcagctggagaagatgttcgaagccatgggaggaaaggagctggatgctgaagccagtgacatcctgaaggagcttcaggtgaaactcaataacgtcttggatgagctcagccgggtgtttgctaccagcttccagccgcacattgaagagtgtgtcaaacagatgggtgacatccttagccaggttaagggcacaggcaatgtgccagccagtgcctgcagcagcgtggcccaggacgcggacaatgtgttgcagcccatcatggacctgctggacagcaacctgaccctctttgccaaaatctgtgagaagactgtgctgaagcgagtgctgaaggagctgtggaagctggttatgaacaccatggagaaaaccatcgtcctgccgcccctcactgaccagacgatgatcgggaacctcttgagaaaacatggcaagggattagaaaagggcagggtgaaattgccaagccactcagacggaacccagatgatcttcaatgcagccaaggagctgggtcagctgtccaaactcaaggatcacatggtacgagaagaagccaagagcttgaccccaaagcagtgcgcggttgttgagttggccctggacaccatcaagcaatatttccacgcgggtggcgtgggcctcaagaagaccttcctggagaagagcccggacctgcaatccttgcgctatgccctgtcgctctacacgcaggccaccgacctgctaatcaagacctttgtacagacgcaatcggcccagggcttgggtgtagaagaccctgtgggtgaagtctctgtccatgttgagctgttcactcatccaggaactggggaacacaaggtcacagtgaaagtggtggctgccaatgacctcaagtggcagacttctggcatcttccggccgttcatcgaggtcaacatcattgggccccagctcagcgacaagaaacgcaagtttgcgaccaaatccaagaacaatagctgggctcccaagtacaatgagagcttccagttcacgctgagcgccgacgcgggtcccgagtgctatgagctgcaggtgtgcgtcaaggactactgcttcgcgcgcgaggaccgcacggtggggctggccgtgctgcagctgcgtgagctggcccagcgcgggagcgccgcctgctggctgccgctcggccgccgcatccacatggacgacacgggcctcacggtgctgcgaatcctctcgcagcgcagcaacgacgaggtggccaaggagttcgtgaagctcaagtcggacacgcgctccgccgaggagggcggtgccgcgcctgcgccttagcgcgggcggtcggccgagcggcactgcgcctgcgcggagggcgctgggcggggagggacggggcttgcgccttggtgggacctccccaggggcggggctcggggggctccacgccaagggtgggctgcgcctacgcccttgactcagctttcccttttggggaattaggaatggaggatgccccgccctctcgggaggccacgcccaagggcgcgacgaaggaaggagccacatccccaacttgaggccacgcccccagcacctagggggcattttgagctgggatgggggaaacctcgtccctatggaggaggccacatcccggggctctggtaccgggaggcaccacctcatgtcccctggaaaagccataagatgggacccagacccctgggaccccagaccaattgccaagtatggaaatctcagctccctcgagggggggccctgggcaaggggtagggctctctggagcgcccctctaggtggcctggggactggagggaccaggatgctggttggagggccccggaataccggagtccctttagatatttgtgcaaaaaataaatggggggaggggggaggatgggatttcaaaagcacatgcgcccttgggcgcccaaaccctgggggccgaggggacggctctggttccccacgctgcccctacttccctttgggagtttgcctctccctctcccccaacaaacccagtcctcatatcatagagttcaacacacccatttgacagatggcaaaactgaggcttaaagagctgcttgagacttggccaaggttccaggtgccataccctctgtgcccctcccttaggcctgtgtgccccatggaagggtgggctgagatcgggatgacctgacacagctccctattgctgctaattccccctcggcctcctccaaggggtgggaattccaggccaagacccctacttcgcctttccttctccggctgccaagcaggacctttgccctcagccctttctcctgggatctccatgggggatgccatgagggcctcccaccacaaaagagaatttgggatcccctggtcccaggtttctccatcccttcttccttttccagaattttccaaataggaaagaacagaaggagaccagaaactctaggggggagaaagagaatgagagaaagagaatgagagagagagaaacacaaacacagtgacacagtgagagcttagtctccaagagcctattcattgattcaaacacccaagccacaggatacctcagatggccctcttgccagctggaagctctttctccaatgagcaaagttacagtgacctggctggagttacctggtgcacataggaccttaggggaaagttcagcgtggactacacttgctctgggatctgcttttccacatgtgtgtatggcacgcctttttctgctggattgggaaggacaagattttgctgtgctagggagaaatgaaaacggggtgagctgagtagctgggtttctggaggatagaacatcagatggggaggctttccgaggtgaagaatgagagggaaccacttactagagagaaaagagctccaggcctggggaacagcacgtgcgaaggccaggagagaagaactgttgaaacaacgagaagggtggcacggctggagctgagccagcaagggggatcgtgaggagccttggggttggggagatctgcagaagcatcagaccaggcagggcctcgtacgcagtcctgaggagttttacttttattctaagacagttggggagctccaggagctgttttaagttggggagagactggattccagcctgcaaaagctgttttgtgaagactaaaaccagtgaggagaggtggaggtgctttggggacactgaaatggattcttggaaagattctgaaggctgtgttgaaaagacacctatagctgtggggacatgactataatcccagcatttggggagaccgaggctggcagatcacttaaggtcaggagtttgagaccagcctggccaacatggcgaaaccccatctctgctaaaaatacaaaaattagctgggtgcagtggtgcatgcctgtagtcccagctactcaggagactgaggcgggagaattgtttgaaccctggaggcagaggttgtagtgagtcgtgatcacacaactgcactccagcctgggcaacagaacaatactccattccctcccctctaccccaccaaaaaaaaaaaaaaatcctgcccttagatgagctctagggctgctgagtacagttgtcccagttgcacagtgcccaagggtttggcattgctaagaaggccacgtgcaaatcctagatattgagtgttgtatgtttgtgacgttggtttcccgacatgtgaatggcccaagtgtctggaagaagtggcgccactttctaatttgcttggagatgttgcatgtcccttaaattcagacaggtgcaggtaactggaggttctgaaccaaaggttaaaatgcaaattctcatacagggttgggaagttgtagccagggataagcttatgtgactgttatatggactgaggagcagatgtgaatttcgaaccatgacatggctgagggtaggggtcgggtggatggatgattcagggttgtaacccatagagcccaaaggggaagtgatctgtgacctggggtgagggtgatctggaagatttttggatggctggaaagaaatggggaagtcgagctgcctgagagagccaagttatttcccaaaagattccttaggagtctttctgttcaagacctccgtgtgtgtgtgtgtgtgtttagggttccccagcaatggcccaggcatgtgaaggaaacaagcttcttcagggaatatttgttgaatgagttttcctgactcccaggctagaactgtttttgcaatttccaccctcttttctttcccccagagaactcctattcgtccttcaaaacccatcacggaaacccctcttggagaaaaccctccttccttcccctcaggactttcccagccaccgtctctcctccagtccagcctgatgccatgggactgggggtttctctgtccagctctgtttctcccagactggggtctgaggactctcaggacccccaactttacctagcacaggctgggcacaagtgggtgacagggagtctacgcctagtggaattatgtattggggcagggtcagtgtgagaatacacatccgcatgcatgtctgtccatgtctgtccgtaccaaccttccccttccacacggacctgggcacataggaggtgtctgagcctgacacatgggacagagagtggacatggctgagacacggacagagaaaagacaaggagtccagggggctgaaagccttttgaaatcaggaagttcctgtattggcagaacaaagcccagagaggagcagggctttcctcaacgccacccagcaagtggacacagagcccggccttggatgacacctccagggttctgaaccctggacctcgctttatgcaaggagctggccccacatttccatgaatcggggaaacagcacaagaaggttggcctgtggcagggcaagggttaaaggggtgacattgagggatgcctcagagtcaaagtcccctgaccaagaggaatagagtagaaaacacagagacagagggtgagatcacgccccgatgaggacggagagagacagagatggagagagacatagaggtggaaatatacagagaaagataaatgcagagaccaaggcagggagtgtcgggggaagtaaagagggtgtcctgaagaaagaaggatctgttcactcttaccagtctgtcctcgaatgatttgcataaaatgaggaggtgcctgtccacacccccaattcctctctcaggccccagagcctgagacctcaccatgcccccatcagagatgcaaaaaactaaacacccaactagaaatccttgggacctctctcggctgggatctcagagcctttctgtcccctacccctaccccatgtgctgtcgattttgcagatggggacaacctggggcctcccggaactctgccaccctggggaagttgggggagggccttagtcccggatcacaaccccgtctgctccccagaatcctttcctaagaatcgttgaggaccaaagttgtctttgctgacacgtgttgcttttctctttgccttttattgtttcagagaaaaatcaagttgactgtgtcaagtaacaccccaccccttacccccgtccagccatagtggctctctggagacacaggtcacaggcggagggtcccctgatcatccccaaccacacagccagggggacttgacccctgtccacccctgtctcgtgctccctcagacccccacaaaccggccaagcagtccggggaggcttcccctccacacaactcttagcatgtgattgcagatgtgaaatcaaaacgttgtttgttttttgttttgttttgattctaccccgtcggtccagtgtctgcacagacgccttcatttctctgtaaatatgtgacttggaacaaatgtttaacacaaacgagaagtggtcatgaatgcatggtgttgagatgttttgcactattctgactttttggtctctgtaaaaatattttattaacagcagacattaaaaaaagaaaaaccacacacagccttgg

SEQ ID NO: 33828 - DNA, 9838 bp, Homo sapiens
  source 1..9838: mol_type = unassigned DNA
atgtctctgctttgcgttggagtcaaaaaagccaagtttgatggtgcccaagagaaattcaacacgtacgtgaccctgaaagtgcagaatgtcaagagcacgaccatcgcggtgcggggcagccagcccagctgggagcaggatttcatgttcgagattaaccgtctggatttgggactgacggtggaggtgtggaataagggtctcatctgggacacaatggtgggcactgtgtggatcccactgaggaccatccgccagtccaatgaggagggccctggagagtggctgacgctggactcccaggtcatcatggcagacagtgagatctgtggcaccaaggaccccaccttccaccgcatcctcctggacacgcgctttgagctacccttagacattcctgaagaggaggctcgctactgggccaagaagctggagcagctcaatgctatgcgggaccaggatgaatattcgttccaagatgagcaagacaagcctctgcctgtccccagcaaccagtgctgcaactggaattattttggctggggtgagcagcacaacgatgaccccgacagtgcagtggatgatcgtgacagtgactaccgcagtgaaacgagcaacagcatcccgccgccctattatactacgtcacaacccaacgcctcagtccaccaatattctgttcgcccaccacccctgggctcccgggagtcctacagtgactccatgcacagttacgaggagttctctgagccacaagccctcagccccacgggtagcagccgctatgcctcttccggggagctgagccagggaagctctcagctgagcgaggacttcgaccctgacgagcacagcctgcagggctccgacatggaggatgagcgggaccgggactcctaccactcctgccacagctcggtcagctaccacaaagactcgcctcgctgggaccaggatgaggaagagctggaggaggacctggaggacttcctggaggaggaggagctgcctgaagatgaggaggagctggaggaggaggaggaggaggtgcctgacgatttgggcagctatgcccagcgtgaagacgtagctgtggctgagcccaaagacttcaaacgcatcagcctcccgccagctgccccagggaaggaggacaaggccccagtggcacccaccgaggcccccgacatggccaaggtggcccccaagccagccacgcccgacaaggtgcctgcagctgagcagatccctgaggctgagccacccaaggacgaggagagtttcaggccgagagaggatgaggaaggccaggaggggcaggactccatgtccagggccaaggccaactggctgcgtgccttcaacaaggtgcggatgcagctgcaggaggcccggggagaaggagagatgtctaaatccctatggttcaaaggcggcccagggggcggtctcatcatcatcgacagcatgccagacatccgcaagaggaaacctatcccactcgtgagcgacttggccatgtccctggtccagtccaggaaagcgggcatcacctcggccttggcctccagcacgttgaacaacgaggagctgaaaaaccacgtttacaagaagaccctgcaagccttaatctaccccatctcgtgcacgacgccacacaacttcgaagtgtggacggccaccacgcccacctactgctacgagtgcgaggggctgctgtggggcatcgcgaggcagggcatgcgctgcaccgagtgcggtgtcaagtgccacgagaagtgccaggacctgctcaacgccgactgcctgcagcgggctgcggagaagagctccaagcacggggcggaggaccggacacagaacatcatcatggtgctcaaggaccgcatgaagatccgggagcgcaacaagcccgagatcttcgagctcatccaggagatcttcgcggtgaccaagacggcgcacacgcagcagatgaaggcggtcaagcagagcgtgctggacggcacgtccaagtggtccgccaagatcagcatcaccgtggtctgcgcccagggcttgcaggcaaaggacaagacaggatccagtgacccctatgtcaccgtccaggtcgggaagaccaagaaacggacaaaaaccatctatgggaacctcaacccggtgtgggaggagaatttccactttgaatgtcacaattcctccgaccgcatcaaggtgcgcgtctgggacgaggatgacgacatcaaatcccgcgtgaaacagaggttcaagagggaatctgacgatttcctggggcagacgatcattgaggtgcggacgctcagcggcgagatggacgtgtggtacaacctggacaagcgaactgacaaatctgccgtgtcgggtgccatccggctccacatcagtgtggagatcaaaggcgaggagaaggtggccccgtaccatgtccagtacacctgtctgcatgagaacctgttccacttcgtgaccgacgtgcagaacaatggggtcgtgaagatcccagatgccaagggtgacgatgcctggaaggtttactacgatgagacagcccaggagattgtggacgagtttgccatgcgctacggcgtcgagtccatctaccaagccatgacccactttgcctgcctctcctccaagtatatgtgcccaggggtgcctgccgtcatgagcaccctgctcgccaacatcaatgcctactacgcacacaccaccgcctccaccaacgtgtctgcctccgaccgcttcgccgcctccaactttgggaaagagcgcttcgtgaaactcctggaccagctgcataactccctgcggattgacctctccatgtaccggaataacttcccagccagcagcccggagagactccaggacctcaaatccactgtggaccttctcaccagcatcaccttctttcggatgaaggtacaagaactccagagcccgccccgagccagccaggtggtaaaggactgtgtgaaagcctgccttaattctacctacgagtacatcttcaataactgccatgaactgtacagccgggagtaccagacagacccggccaagaagggggaagttctcccagaggaacaggggcccagcatcaagaacctcgacttctggtccaagctgattaccctcatagtgtccatcattgaggaagacaagaattcctacactccctgcctcaaccagtttccccaggagctgaatgtgggtaaaatcagcgctgaagtgatgtggaatctgtttgcccaagacatgaagtacgccatggaggagcacgacaagcatcgtctatgcaagagtgccgactacatgaacctccacttcaaggtgaaatggctctacaatgagtatgtgacggaacttcccgccttcaaggaccgcgtgcctgagtaccctgcatggtttgaacccttcgtcatccagtggctggatgagaatgaggaggtgtcccgggatttcctgcacggtgccctggagcgagacaagaaggatgggttccagcagacctcagagcatgccctattctcctgctccgtggtggatgttttctcccaactcaaccagagctttgaaatcatcaagaaactcgagtgtcccgaccctcagatcgtggggcactacatgaggcgctttgccaagaccatcagtaatgtgctcctccagtatgcagacatcatctccaaggactttgcctcctactgctccaaggagaaggagaaagtgccctgcattctcatgaataacactcaacagctacgagttcagctggagaagatgttcgaagccatgggaggaaaggagctggatgctgaagccagtgacatcctgaaggagcttcaggtgaaactcaataacgtcttggatgagctcagccgggtgtttgctaccagcttccagccgcacattgaagagtgtgtcaaacagatgggtgacatccttagccaggttaagggcacaggcaatgtgccagccagtgcctgcagcagcgtggcccaggacgcggacaatgtgttgcagcccatcatggacctgctggacagcaacctgaccctctttgccaaaatctgtgagaagactgtgctgaagcgagtgctgaaggagctgtggaagctggttatgaacaccatggagaaaaccatcgtcctgccgcccctcactgaccagacgatgatcgggaacctcttgagaaaacatggcaagggattagaaaagggcagggtgaaattgccaagccactcagacggaacccagatgatcttcaatgcagccaaggagctgggtcagctgtccaaactcaaggatcacatggtacgagaagaagccaagagcttgaccccaaagcagtgcgcggttgttgagttggccctggacaccatcaagcaatatttccacgcgggtggcgtgggcctcaagaagaccttcctggagaagagcccggacctgcaatccttgcgctatgccctgtcgctctacacgcaggccaccgacctgctaatcaagacctttgtacagacgcaatcggcccagggcttgggtgtagaagaccctgtgggtgaagtctctgtccatgttgagctgttcactcatccaggaactggggaacacaaggtcacagtgaaagtggtggctgccaatgacctcaagtggcagacttctggcatcttccggccgttcatcgaggtcaacatcattgggccccagctcagcgacaagaaacgcaagtttgcgaccaaatccaagaacaatagctgggctcccaagtacaatgagagcttccagttcacgctgagcgccgacgcgggtcccgagtgctatgagctgcaggtgtgcgtcaaggactactgcttcgcgcgcgaggaccgcacggtggggctggccgtgctgcagctgcgtgagctggcccagcgcgggagcgccgcctgctggctgccgctcggccgccgcatccacatggacgacacgggcctcacggtgctgcgaatcctctcgcagcgcagcaacgacgaggtggccaaggagttcgtgaagctcaagtcggacacgcgctccgccgaggagggcggtgccgcgcctgcgccttagcgcgggcggtcggccgagcggcactgcgcctgcgcggagggcgctgggcggggagggacggggcttgcgccttggtgggacctccccaggggcggggctcggggggctccacgccaagggtgggctgcgcctacgcccttgactcagctttcccttttggggaattaggaatggaggatgccccgccctctcgggaggccacgcccaagggcgcgacgaaggaaggagccacatccccaacttgaggccacgcccccagcacctagggggcattttgagctgggatgggggaaacctcgtccctatggaggaggccacatcccggggctctggtaccgggaggcaccacctcatgtcccctggaaaagccataagatgggacccagacccctgggaccccagaccaattgccaagtatggaaatctcagctccctcgagggggggccctgggcaaggggtagggctctctggagcgcccctctaggtggcctggggactggagggaccaggatgctggttggagggccccggaataccggagtccctttagatatttgtgcaaaaaataaatggggggaggggggaggatgggatttcaaaagcacatgcgcccttgggcgcccaaaccctgggggccgaggggacggctctggttccccacgctgcccctacttccctttgggagtttgcctctccctctcccccaacaaacccagtcctcatatcatagagttcaacacacccatttgacagatggcaaaactgaggcttaaagagctgcttgagacttggccaaggttccaggtgccataccctctgtgcccctcccttaggcctgtgtgccccatggaagggtgggctgagatcgggatgacctgacacagctccctattgctgctaattccccctcggcctcctccaaggggtgggaattccaggccaagacccctacttcgcctttccttctccggctgccaagcaggacctttgccctcagccctttctcctgggatctccatgggggatgccatgagggcctcccaccacaaaagagaatttgggatcccctggtcccaggtttctccatcccttcttccttttccagaattttccaaataggaaagaacagaaggagaccagaaactctaggggggagaaagagaatgagagaaagagaatgagagagagagaaacacaaacacagtgacacagtgagagcttagtctccaagagcctattcattgattcaaacacccaagccacaggatacctcagatggccctcttgccagctggaagctctttctccaatgagcaaagttacagtgacctggctggagttacctggtgcacataggaccttaggggaaagttcagcgtggactacacttgctctgggatctgcttttccacatgtgtgtatggcacgcctttttctgctggattgggaaggacaagattttgctgtgctagggagaaatgaaaacggggtgagctgagtagctgggtttctggaggatagaacatcagatggggaggctttccgaggtgaagaatgagagggaaccacttactagagagaaaagagctccaggcctggggaacagcacgtgcgaaggccaggagagaagaactgttgaaacaacgagaagggtggcacggctggagctgagccagcaagggggatcgtgaggagccttggggttggggagatctgcagaagcatcagaccaggcagggcctcgtacgcagtcctgaggagttttacttttattctaagacagttggggagctccaggagctgttttaagttggggagagactggattccagcctgcaaaagctgttttgtgaagactaaaaccagtgaggagaggtggaggtgctttggggacactgaaatggattcttggaaagattctgaaggctgtgttgaaaagacacctatagctgtggggacatgactataatcccagcatttggggagaccgaggctggcagatcacttaaggtcaggagtttgagaccagcctggccaacatggcgaaaccccatctctgctaaaaatacaaaaattagctgggtgcagtggtgcatgcctgtagtcccagctactcaggagactgaggcgggagaattgtttgaaccctggaggcagaggttgtagtgagtcgtgatcacacaactgcactccagcctgggcaacagaacaatactccattccctcccctctaccccaccaaaaaaaaaaaaaaatcctgcccttagatgagctctagggctgctgagtacagttgtcccagttgcacagtgcccaagggtttggcattgctaagaaggccacgtgcaaatcctagatattgagtgttgtatgtttgtgacgttggtttcccgacatgtgaatggcccaagtgtctggaagaagtggcgccactttctaatttgcttggagatgttgcatgtcccttaaattcagacaggtgcaggtaactggaggttctgaaccaaaggttaaaatgcaaattctcatacagggttgggaagttgtagccagggataagcttatgtgactgttatatggactgaggagcagatgtgaatttcgaaccatgacatggctgagggtaggggtcgggtggatggatgattcagggttgtaacccatagagcccaaaggggaagtgatctgtgacctggggtgagggtgatctggaagatttttggatggctggaaagaaatggggaagtcgagctgcctgagagagccaagttatttcccaaaagattccttaggagtctttctgttcaagacctccgtgtgtgtgtgtgtgtgtttagggttccccagcaatggcccaggcatgtgaaggaaacaagcttcttcagggaatatttgttgaatgagttttcctgactcccaggctagaactgtttttgcaatttccaccctcttttctttcccccagagaactcctattcgtccttcaaaacccatcacggaaacccctcttggagaaaaccctccttccttcccctcaggactttcccagccaccgtctctcctccagtccagcctgatgccatgggactgggggtttctctgtccagctctgtttctcccagactggggtctgaggactctcaggacccccaactttacctagcacaggctgggcacaagtgggtgacagggagtctacgcctagtggaattatgtattggggcagggtcagtgtgagaatacacatccgcatgcatgtctgtccatgtctgtccgtaccaaccttccccttccacacggacctgggcacataggaggtgtctgagcctgacacatgggacagagagtggacatggctgagacacggacagagaaaagacaaggagtccagggggctgaaagccttttgaaatcaggaagttcctgtattggcagaacaaagcccagagaggagcagggctttcctcaacgccacccagcaagtggacacagagcccggccttggatgacacctccagggttctgaaccctggacctcgctttatgcaaggagctggccccacatttccatgaatcggggaaacagcacaagaaggttggcctgtggcagggcaagggttaaaggggtgacattgagggatgcctcagagtcaaagtcccctgaccaagaggaatagagtagaaaacacagagacagagggtgagatcacgccccgatgaggacggagagagacagagatggagagagacatagaggtggaaatatacagagaaagataaatgcagagaccaaggcagggagtgtcgggggaagtaaagagggtgtcctgaagaaagaaggatctgttcactcttaccagtctgtcctcgaatgatttgcataaaatgaggaggtgcctgtccacacccccaattcctctctcaggccccagagcctgagacctcaccatgcccccatcagagatgcaaaaaactaaacacccaactagaaatccttgggacctctctcggctgggatctcagagcctttctgtcccctacccctaccccatgtgctgtcgattttgcagatggggacaacctggggcctcccggaactctgccaccctggggaagttgggggagggccttagtcccggatcacaaccccgtctgctccccagaatcctttcctaagaatcgttgaggaccaaagttgtctttgctgacacgtgttgcttttctctttgccttttattgtttcagagaaaaatcaagttgactgtgtcaagtaacaccccaccccttacccccgtccagccatagtggctctctggagacacaggtcacaggcggagggtcccctgatcatccccaaccacacagccagggggacttgacccctgtccacccctgtctcgtgctccctcagacccccacaaaccggccaagcagtccggggaggcttcccctccacacaactcttagcatgtgattgcagatgtgaaatcaaaacgttgtttgttttttgttttgttttgattctaccccgtcggtccagtgtctgcacagacgccttcatttctctgtaaatatgtgacttggaacaaatgtttaacacaaacgagaagtggtcatgaatgcatggtgttgagatgttttgcactattctgactttttggtctctgtaaaaatattttattaacagcagacattaaaaaaagaaaaaccacacacagccttgga

SEQ ID NO: 33829 - DNA, 4389 bp, Homo sapiens
  source 1..4389: mol_type = unassigned DNA
gttcagcccagcctgggcacagcacatggatggggcaggatgctgcccgcctgttctgggcccccccgccccctgctgagagcgttgtccccttcccagggcctctgtaggagggtggggcggggccaggcctgcccacggggtccaccttctgctccagccagaggagggtcctgtagggatcccagctggggaaggtgcagggggcctgggagactgcctctccgaagcggtgaaaccctcacccttccgtccctcccagccaccctccctaaaacttcccctgacagagggtggcagccccaggctctttgcataatcctgtggcttcgctgtcttcacccagcaccagcggacagggaagggcagagaaggccaccatggcgacactcctctcccatccgcagcagcgccctcccttcttgcgccaggccatcaagataaggcgccgcagagtcagagatctacaggatcccccgccccaaatggccccggagatccagcctccatcccaccacttctcccccgagcagcgggccctgctctacgaggacgcactctacactgtcttgcaccgcctgggtcatcctgagcccaaccatgtgacggaggcctctgagctgctgcgatacctgcaggaggccttccacgtggagcccgaggagcaccagcagacactgcagcgggtcagggagcttgagaagccaatattttgtctgaaggcaacagtgaaacaggccaagggcattctgggcaaagatgtcagtgggttcagcgacccctactgcctgctgggcattgagcagggggtaggtgtgccagggggcagccccgggtcccggcatcggcagaaggctgtggtgaggcacaccatccccgaggaggagacccaccgcacgcaggtcatcacccagacactcaaccccgtctgggacgagaccttcatcctggagtttgaggacatcaccaatgcgagctttcatctggacatgtgggacctggacactgtggagtctgtccgacagaagcttggggagctcacggatctgcatgggcttcgcaggatctttaaagaggcccggaaggacaaaggccaggacgactttctggggaacgtggttctgaggctgcaggacctgcgctgccgagaggaccagtggtaccccctggaaccccgcactgagacctacccagaccgaggccagtgccacctccagttccaactcatccataagcggagagccacttcggccagccgctcgcagccgagctacaccgtgcacctccacctcctgcagcagcttgtgtcccacgaggtcacccagcacgaggcgggaagcacctcctgggacgggtcgctgagtccccaggctgccaccgtcctctttctgcacgccacacagaaggacctatccgacttccaccagtccatggcgcagtggctggcctacagccgcctctaccagagcctggagttccccagcagctgcctcctgcaccccatcaccagcatcgagtaccagtggatccagggtcggctcaaggcagaacagcaggaggagctggccgcctcattcagctccctgctgacctacggcctctccctcatccggaggttccgctctgtcttccccctctctgtctcggactccccagcccggctgcagtctcttctcagggtcctggtacagatgtgcaagatgaaggcctttggagaactgtgccccaacaccgccccattgccccagctggtgactgaggccctgcagactggcaccactgaatggttccacctgaagcagcagcaccatcaacccatggtgcagggcatcccggaggcaggcaaggccttgctgggcctggtacaggatgtcattggcgacctgcaccagtgccagcgcacatgggacaagatcttccacaataccctcaagatccacctcttctccatggctttccgggagctgcagtggctggtggccaagcgggtgcaggaccacacgacggttgtgggtgatgtagtgtccccagagatgggcgagagtctgttccagctctacatcagcctcaaggagctctgccagctgcgcatgagctcctcagagagggatggagtcctggccctggataatttccaccgctggttccagccggccatcccctcctggctgcagaagacgtacaacgaggccctggcgcgggtgcagcgcgctgtgcagatggatgagctggtgcccctgggtgaactgaccaagcacagcacatcagcggtggatctatccacctgctttgcccagatcagccacactgcccggcagctggactggccagacccagaggaggccttcatgattaccgtcaagtttgtggaggacacctgtcgcctggccctggtgtactgcagccttataaaggcccgggcccgcgagctctcttcaggccagaaggaccaaggccaggcagccaacatgctgtgtgtggtggtgaatgacatggagcagctgcggctggtgatcggcaagttgcccgcccagctggcatgggaggccctggagcagcgggtaggggccgtgctggagcaggggcagctgcagaacacgctgcatgcccagctgcagagcgcgctggccgggctgggccatgagatccgcactggcgtccgcaccctggccgagcagttggaggtgggcatcgccaagcacatccagaaactggtgggcgtcagggagtctgtcctgcctgaggatgccattctgcccctgatgaagttcctggaggtggagctttgctacatgaacaccaacttggtgcaggagaacttcagcagcctcctgaccctgctctggacccacacactcacagtgctggtggaggcggccgcctcccagcgcagctcatccctggcttccaacaggctgaagattgccctgcagaacctggagatctgcttccacgctgagggctgtggcctgccacccaaggccctgcacactgccaccttccaggctctgcagagggacctggagctgcaggcggcctccagccgggaactcatccggaagtacttctgcagccgaatccagcagcaggcagaaaccacctctgaggagctgggggctgtgacagtcaaggcctcctaccgcgcctctgagcagaagctgcgtgtggagctgctcagcgcctccagcctgctgcccctggactccaatggctccagcgacccctttgtccagctgaccttggagcccaggcatgagttccctgagctggccgcccgggagacccagaagcacaagaaggaccttcacccattgtttgatgagacctttgaattcctggtgcctgctgagccgtgccgcaaggctggggcatgcctcctgctcaccgtgctggactacgacacgctgggggccgacgacctggaaggcgaggccttcctgccgctgcgtgaggtgcccgggctgagtggctctgaggagcctggtgaggtgcctcagacccgcctgcccctcacgtaccccgcacccaacggggacccaatcctgcagctgctggagggccggaagggtgaccgagaagcccaggtctttgtgaggctgcggcggcaccgggccaagcaggcctcccagcatgccttgcggccggcaccgtagccgtagaggtttgcggtggggctgggtccccggtggggacttgcaagggctttcctgtagggtctggggcttccccgccacatcgcggccctccagcctggcctaacacttggggagccccagcatgcggagtgcccagagtgcagacctcccctgcctcccatggtgatgggggctcagcagcgacatctctactcccgcctccctgcctccagccctggctgcaatgtctctaccacatcccagcaccagggggagcaaaccctgcccctgcccgcctctcagaaaagctgctgtggtgggcaggggattgggccatctgtctcctggccctggcccatctgcctcctggccttcctgttccagccactggggtgggggccaggttcactgggaccagggctacaggcacagagtctcctggaaaagggagaggggaccctgccaaagatgaggctccagctgccctggggggagggtggtggccattactagagggggcctgggtcctctccccaggggctgccagcatccaggccaggaagcctggagccaagaaccttctggctctgagggagcaagagctggcaggcggcagggctggcacagacagacggaagcagaaaggacagtttggctgctgtgtctgctgcgcacgccccctccccggacagcacctgccacctagaaactttcttagcaaaaaaattaataaaaacaaatccattgtcctctt

SEQ ID NO: 33830 - DNA, 3809 bp, Homo sapiens
  source 1..3809: mol_type = unassigned DNA
gttcagcccagcctgggcacagcacatggatggggcaggatgctgcccgcctgttctgggcccccccgccccctgctgagagcgttgtccccttcccagggcctctgtaggagggtggggcggggccaggcctgcccacggggtccaccttctgctccagccagaggagggtcctgtagggatcccagctggggaaggtgcagggggcctgggagactgcctctccgaagcggtgaaaccctcacccttccgtccctcccagccaccctccctaaaacttcccctgacagagggtggcagccccaggctctttgcataatcctgtggcttcgctgtcttcacccagcaccagcggacagggaagggcagagaaggccaccatggcgacactcctctcccatccgcagcagcgccctcccttcttgcgccaggccatcaagataaggcgccgcagagtcagagatctacaggatcccccgccccaaatggccccggagatccagcctccatcccaccacttctcccccgagcagcgggccctgctctacgaggacgcactctacactgtcttgcaccgcctgggtcatcctgagcccaaccatgtgacggaggcctctgagctgctgcgatacctgcaggaggccttccacgtggagcccgaggagcaccagcagacactgcagcgggtcagggagcttgagaagccaatattttgtctgaaggcaacagtgaaacaggccaagggcattctgggcaaagatgtcagtgggttcagcgacccctactgcctgctgggcattgagcagggggtaggtgtgccagggggcagccccgggtcccggcatcggcagaaggctgtggtgaggcacaccatccccgaggaggagacccaccgcacgcaggtcatcacccagacactcaaccccgtctgggacgagaccttcatcctggagtttgaggacatcaccaatgcgagctttcatctggacatgtgggacctggacactgtggagtctgtccgacagaagcttggggagctcacggatctgcatgggcttcgcaggatctttaaagaggcccggaaggacaaaggccaggacgactttctggggaacgtggttctgaggctgcaggacctgcgctgccgagaggaccagtggtaccccctggaaccccgcactgagacctacccagaccgaggccagtgccacctccagttccaactcatccataagcggagagccacttcggccagccgctcgcagccgagctacaccgtgcacctccacctcctgcagcagcttgtgtcccacgaggtcacccagcacgaggcgggaagcacctcctgggacgggtcgctgagtccccaggctgccaccgtcctctttctgcacgccacacagaaggacctatccgacttccaccagtccatggcgcagtggctggcctacagccgcctctaccagagcctggagttccccagcagctgcctcctgcaccccatcaccagcatcgagtaccagtggatccagggtcggctcaaggcagaacagcaggaggagctggccgcctcattcagctccctgctgacctacggcctctccctcatccggaggttccgctctgtcttccccctctctgtctcggactccccagcccggctgcagtctcttctcagggtcctggtacagatgtgcaagatgaaggcctttggagaactgtgccccaacaccgccccattgccccagctggtgactgaggccctgcagactggcaccactgaatggttccacctgaagcagcagcaccatcaacccatggtgcagggcatcccggaggcaggcaaggccttgctgggcctggtacaggatgtcattggcgacctgcaccagtgccagcgcacatgggacaagatcttccacaataccctcaagatccacctcttctccatggctttccgggagctgcagtggctggtggccaagcgggtgcaggaccacacgacggttgtgggtgatgtagtgtccccagagatgggcgagagtctgttccagctctacatcagcctcaaggagctctgccagctgcgcatgagctcctcagagagggatggagtcctggccctggataatttccaccgctggttccagccggccatcccctcctggctgcagaagacgtacaacgaggccctggcgcgggtgcagcgcgctgtgcagatggatgagctggtgcccctgggtgaactgaccaagcacagcacatcagcggtggatctatccacctgctttgcccagatcagccacactgcccggcagctggactggccagacccagaggaggccttcatgattaccgtcaagtttgtggaggacacctgtcgcctggccctggtgtactgcagccttataaaggcccgggcccgcgagctctcttcaggccagaaggaccaaggccaggcagccaacatgctgtgtgtggtggtgaatgacatggagcagctgcggctggtgatcggcaagttgcccgcccagctggcatgggaggccctggagcagcgggtaggggccgtgctggagcaggggcagctgcagaacacgctgcatgcccagctgcagagcgcgctggccgggctgggccatgagatccgcactggcgtccgcaccctggccgagcagttggaggtgggcatcgccaagcacatccagaaactggtgggcgtcagggagtctgtcctgcctgaggatgccattctgcccctgatgaagttcctggaggtggagctttgctacatgaacaccaacttggtgcaggagaacttcagcagcctcctgaccctgctctggacccacacactcacagtgctggtggaggcggccgcctcccagcgcagctcatccctggcttccaacaggctgaagattgccctgcagaacctggagatctgcttccacgctgagggctgtggcctgccacccaaggccctgcacactgccaccttccaggctctgcagagggacctggagctgcaggcggcctccagccgggaactcatccggaagtacttctgcagccgaatccagcagcaggcagaaaccacctctgaggagctgggggctgtgacagtcaaggcctcctaccgcgcctctgagcagaagctgcgtgtggagctgctcagcgcctccagcctgctgcccctggactccaatggctccagcgacccctttgtccagctgaccttggagcccaggcatgagttccctgagctggccgcccgggagacccagaagcacaagaaggaccttcacccattgtttgatgagacctttgaattcctggtgcctgctgagccgtgccgcaaggctggggcatgcctcctgctcaccgtgctggactacgacacgctgggggccgacgacctggaaggcgaggccttcctgccgctgcgtgaggtgcccgggctgagtggctctgaggagcctggtgaggtgcctcagacccgcctgcccctcacgtaccccgcacccaacggggacccaatcctgcagctgctggagggccggaagggtgaccgagaagcccaggtctttgtgaggctgcggcggcaccgggccaagcaggggattgggccatctgtctcctggccctggcccatctgcctcctggccttcctgttccagccactggggtgggggccaggttcactgggaccagggctacaggcacagagtctcctggaaaagggagaggggaccctgccaaagatgaggctccagctgccctggggggagggtggtggccattactag

SEQ ID NO: 33831 - DNA, 3215 bp, Homo sapiens
  source 1..3215: mol_type = unassigned DNA
gttcagcccagcctgggcacagcacatggatggggcaggatgctgcccgcctgttctgggcccccccgccccctgctgagagcgttgtccccttcccagggcctctgtaggagggtggggcggggccaggcctgcccacggggtccaccttctgctccagccagaggagggtcctgtagggatcccagctggggaaggtgcagggggcctgggagactgcctctccgaagcggtgaaaccctcacccttccgtccctcccagccaccctccctaaaacttcccctgacagagggtggcagccccaggctctttgcataatcctgtggcttcgctgtcttcacccagcaccagcggacagggaagggcagagaaggccaccatggcgacactcctctcccatccgcagcagcgccctcccttcttgcgccaggccatcaagataaggcgccgcagagtcagagatctacaggatcccccgccccaaatggccccggagatccagcctccatcccaccacttctcccccgagcagcgggccctgctctacgaggacgcactctacactgtcttgcaccgcctgggtcatcctgagcccaaccatgtgacggaggcctctgagctgctgcgatacctgcaggaggccttccacgtggagcccgaggagcaccagcagacactgcagcgggtcagggagcttgagaagccaatattttgtctgaaggcaacagtgaaacaggccaagggcattctgggcaaagatgtcagtgggttcagcgacccctactgcctgctgggcattgagcagggggtaggtgtgccagggggcagccccgggtcccggcatcggcagaaggctgtggtgaggcacaccatccccgaggaggagacccaccgcacgcaggtcatcacccagacactcaaccccgtctgggacgagaccttcatcctggagtttgaggacatcaccaatgcgagctttcatctggacatgtgggacctggacactgtggagtctgtccgacagaagcttggggagctcacggatctgcatgggcttcgcaggatctttaaagaggcccggaaggacaaaggccaggacgactttctggggaacgtggttctgaggctgcaggacctgcgctgccgagaggaccagtggtaccccctggaaccccgcactgagacctacccagaccgaggccagtgccacctccagttccaactcatccataagcggagagccacttcggccagccgctcgcagccgagctacaccgtgcacctccacctcctgcagcagcttgtgtcccacgaggtcacccagcacgaggcgggaagcacctcctgggacgggtcgctgagtccccaggctgccaccgtcctctttctgcacgccacacagaaggacctatccgacttccaccagtccatggcgcagtggctggcctacagccgcctctaccagagcctggagttccccagcagctgcctcctgcaccccatcaccagcatcgagtaccagtggatccagggtcggctcaaggcagaacagcaggaggagctggccgcctcattcagctccctgctgacctacggcctctccctcatccggaggttccgctctgtcttccccctctctgtctcggactccccagcccggctgcagtctcttctcagggtcctggtacagatgtgcaagatgaaggcctttggagaactgtgccccaacaccgccccattgccccagctggtgactgaggccctgcagactggcaccactgaatggttccacctgaagcagcagcaccatcaacccatggtgcagggcatcccggaggcaggcaaggccttgctgggcctggtacaggatgtcattggcgacctgcaccagtgccagcgcacatgggacaagatcttccacaataccctcaagatccacctcttctccatggctttccgggagctgcagtggctggtggccaagcgggtgcaggaccacacgacggttgtgggtgatgtagtgtccccagagatgggcgagagtctgttccagctctacatcagcctcaaggagctctgccagctgcgcatgagctcctcagagagggatggagtcctggccctggataatttccaccgctggttccagccggccatcccctcctggctgcagaagacgtacaacgaggccctggcgcgggtgcagcgcgctgtgcagatggatgagctggtgcccctgggtgaactgaccaagcacagcacatcagcggtggatctatccacctgctttgcccagatcagccacactgcccggcagctggactggccagacccagaggaggccttcatgattaccgtcaagtttgtggaggacacctgtcgcctggccctggtgtactgcagccttataaaggcccgggcccgcgagctctcttcaggccagaaggaccaaggccaggcagccaacatgctgtgtgtggtggtgaatgacatggagcagctgcggctggtgatcggcaagttgcccgcccagctggcatgggaggccctggagcagcgggtaggggccgtgctggagcaggggcagctgcagaacacgctgcatgcccagctgcagagcgcgctggccgggctgggccatgagatccgcactggcgtccgcaccctggccgagcagttggaggtgggcatcgccaagcacatccagaaactggtgggcgtcagggagtctgtcctgcctgaggatgccattctgcccctgatgaagttcctggaggtggagctttgctacatgaacaccaacttggtgcaggagaacttcagcagcctcctgaccctgctctggacccacacactcacagtgctggtggaggcggccgcctcccagcgcagctcatccctggcttccaacaggctgaagattgccctgcagaacctggagatctgcttccacgctgagggctgtggcctgccacccaagaccctgcccctgcccgcctctcagaaaagctgctgtggtgggcaggggattgggccatctgtctcctggccctggcccatctgcctcctggccttcctgttccagccactggggtgggggccaggttcactgggaccagggctacaggcacagagtctcctggaaaagggagaggggaccctgccaaagatgaggctccagctgccctggggggagggtggtggccattactag

SEQ ID NO: 33832 - DNA, 4002 bp, Homo sapiens
  source 1..4002: mol_type = unassigned DNA
acttaacaaccgaagtaacccgcaatgcggaagggcgaggggattgcgagtcaccgagtttcccgcgcggcttgagtcacggcctagaaagagagatgttggggttcccaggaccaggacagaggtggtagtgaactctcatgggcatccagagaaggtcaggccccttgctgacaggcctatctgtggggctactgctgctcttcagctgggtgacccttgtccagccaacctctctctcagctctggtccaccaccctcacttgtgccagaccacccgggatgtccatggccgtcactaccctggtttcttttgccctcgtctgtctgattctccagaggaagcctactgctgccacctgcaggctgcagggggctcctgctgcacccgggctgaatttgaggccctgtaccaagtcaatctgtccgctcttccgcccccgcccatcctcaggggcccaggcccgctcctagtgctgggcctctacaacctactggttgtgaccctgatgaccgtagacctcgtgcacttctgctgcggtcggggccggagtctgggctggagccaccgcaggcctccctctgggtcctccgccgcgagctccctgcaggtctctgcggggacagcttaggtgcgcccggagcttgcctgcacctgcgatccagagccaagcgccccgcccctgcccgggcgcgctccctccttagccctgcccctctctgaccccacctccgacgcaagagtggggcggggcagctgccggtggcgtcccgaacccagactcgccccgccccagagactgcgcctgcgcgggcacgagacaacctctccgcgatgactgccagctcagtggagcagctgcggaaggagggcaatgagctgttcaaatgtggagactacgggggcgccctggcggcctacactcaggccctgggtctggacgcgacgccccaggaccaggccgttctgcaccggaaccgggccgcctgccacctcaagctggaagattacgacaaagcagaaacagaggcatccaaagccattgaaaaggatggtggggatgtcaaagcactctaccggcggagccaagccctagagaagctgggccgcctggaccaggctgtccttgacctgcagagatgtgtgagcttggagcccaagaacaaagttttccaggaggccttgcggaacatcgggggccagattcaggagaaggtgcgatacatgtcctcgacggatgccaaagtggaacagatgtttcagatactgttggacccagaagagaagggcactgagaaaaagcaaaaggcttctcagaacctggtggtgctggccagggaggatgctggagcggagaagatcttccggagtaatggggttcagctcttgcaacgtttactggacatgggagagactgacctcatgctggcggctctgcgtacgctggttggcatttgctctgagcatcagtcacggacagtggcaaccctgagcatactgggaactcggcgagtagtctccatcctgggcgtggaaagccaggctgtgtccctggctgcctgccacctgctgcaggttatgtttgatgccctcaaggaaggtgtcaaaaaaggcttccgaggcaaagaaggtgccatcattgtggatcctgcccgggagctgaaggtcctcatcagtaacctcttagatctgctgacagaggtgggggtctctggccaaggccgagacaatgccctgaccctcctgattaaagcggtgccccggaagtctctcaaggaccccaacaacagcctcaccctctgggtcatcgaccaaggtctgaaaaagattttggaagtggggggctctctacaggaccctcctggggagctcgcagtgaccgcaaacagccgcatgagcgcctctattctcctcagcaagctctttgatgacctcaagtgtgatgcggagagggagaatttccacagactttgtgaaaactacatcaagagctggtttgagggccaagggctggccgggaagctacgggccatccagacggtgtcctgcctcctgcagggcccatgtgacgctggcaaccgggccttggagctgagcggtgtcatggagagtgtgattgctctgtgtgcctctgagcaggaggaggagcagctggtggccgtggaggctctgatccatgcagccggcaaggctaagcgggcctcattcatcactgccaatggtgtctcgctgctgaaggacctatataagtgcagcgagaaggacagcatccgcatccgggcgctagtgggactctgtaagctcggttcggctggagggactgacttcagcatgaagcagtttgctgaaggctccactctcaaactggctaagcagtgtcgaaagtggctgtgcaatgaccagatcgacgcaggcactcggcgctgggcagtggagggcctggcttacctgacctttgatgccgacgtgaaggaagagtttgtggaggatgcggctgctctgaaagctctgttccagctcagcaggttggaggagaggtcagtgctctttgcggtggcctcagcgctggtgaactgcaccaacagctatgactacgaggagcccgaccccaagatggtggagctggccaagtatgccaagcagcatgtgcccgagcagcaccccaaggacaagccaagcttcgtgcgggctcgggtgaagaagctgctggcagcgggtgtggtgtcggccatggtgtgcatggtgaagacggagagccctgtgctgaccagttcctgcagagagctgctctccagggtcttcttggctttagtggaagaggtagaggaccgaggcactgtggttgcccagggaggcggcagggcgctgatcccgctggccctggaaggcacggacgtggggcagacaaaggcagcccaggcccttgccaagctcaccatcacctccaacccggagatgaccttccctggcgagcggatctatgaggtggtccggcccctcgtctccctgttgcacctcaactgctcaggcctgcagaacttcgaggcgctcatggccctaacaaacctggctgggatcagcgagaggctccggcagaagatcctgaaggagaaggctgtgcccatgatagaaggctacatgtttgaggagcatgagatgatccgccgggcagccacggagtgcatgtgtaacttggccatgagcaaggaggtgcaggacctcttcgaagcccagggcaatgaccgactgaagctgctggtgctgtacagtggagaggatgatgagctgctacagcgggcagctgccgggggcttggccatgcttacctccatgcggcccacgctctgcagccgcattccccaagtgaccacacactggctggagatcctgcaggccctgcttctgagctccaaccaggagctgcagcaccggggtgctgtggtggtgctgaacatggtggaggcctcgagggagattgccagcaccctgatggagagtgagatgatggagatcttgtcagtgctagctaagggtgaccacagccctgtcacaagggctgctgcagcctgcctggacaaagcagtggaatatgggcttatccaacccaaccaagatggagagtgagggggttgtccctgggcccaaggctcatgcacacgctacctattgtggcacggagagtaaggacggaagcagctttggctggtggtggctggcatgcccaatactcttgcccatcctcgcttgctgccctaggatgtcctctgttctgagtcagcggccacgttcagtcacacagccctgcttggccagcactgcctgcagcctcactcagaggggccctttttctgtactactgtagtcagctgggaatggggaaggtgcatcccaacacagcctgtggatcctggggcatctggaagggcgcacacatcagcagcctcaccagctgtgagcctgctatcaggcctgcccctccaataaaagtgtgtagaactcca

SEQ ID NO: 33833 - DNA, 3252 bp, Homo sapiens
  source 1..3252: mol_type = unassigned DNA
agagactgcgcctgcgcgggcacgagacaacctctccgcgatgactgtgagtggtccagggacccccgagccccggccggccacccccggggccagctcagtggagcagctgcggaaggagggcaatgagctgttcaaatgtggagactacgggggcgccctggcggcctacactcaggccctgggtctggacgcgacgccccaggaccaggccgttctgcaccggaaccgggccgcctgccacctcaagctggaagattacgacaaagcagaaacagaggcatccaaagccattgaaaaggatggtggggatgtcaaagcactctaccggcggagccaagccctagagaagctgggccgcctggaccaggctgtccttgacctgcagagatgtgtgagcttggagcccaagaacaaagttttccaggaggccttgcggaacatcgggggccagattcaggagaaggtgcgatacatgtcctcgacggatgccaaagtggaacagatgtttcagatactgttggacccagaagagaagggcactgagaaaaagcaaaaggcttctcagaacctggtggtgctggccagggaggatgctggagcggagaagatcttccggagtaatggggttcagctcttgcaacgtttactggacatgggagagactgacctcatgctggcggctctgcgtacgctggttggcatttgctctgagcatcagtcacggacagtggcaaccctgagcatactgggaactcggcgagtagtctccatcctgggcgtggaaagccaggctgtgtccctggctgcctgccacctgctgcaggttatgtttgatgccctcaaggaaggtgtcaaaaaaggcttccgaggcaaagaaggtgccatcattgtggatcctgcccgggagctgaaggtcctcatcagtaacctcttagatctgctgacagaggtgggggtctctggccaaggccgagacaatgccctgaccctcctgattaaagcggtgccccggaagtctctcaaggaccccaacaacagcctcaccctctgggtcatcgaccaaggtctgaaaaagattttggaagtggggggctctctacaggaccctcctggggagctcgcagtgaccgcaaacagccgcatgagcgcctctattctcctcagcaagctctttgatgacctcaagtgtgatgcggagagggagaatttccacagactttgtgaaaactacatcaagagctggtttgagggccaagggctggccgggaagctacgggccatccagacggtgtcctgcctcctgcagggcccatgtgacgctggcaaccgggccttggagctgagcggtgtcatggagagtgtgattgctctgtgtgcctctgagcaggaggaggagcagctggtggccgtggaggctctgatccatgcagccggcaaggctaagcgggcctcattcatcactgccaatggtgtctcgctgctgaaggacctatataagtgcagcgagaaggacagcatccgcatccgggcgctagtgggactctgtaagctcggttcggctggagggactgacttcagcatgaagcagtttgctgaaggctccactctcaaactggctaagcagtgtcgaaagtggctgtgcaatgaccagatcgacgcaggcactcggcgctgggcagtggagggcctggcttacctgacctttgatgccgacgtgaaggaagagtttgtggaggatgcggctgctctgaaagctctgttccagctcagcaggttggaggagaggtcagtgctctttgcggtggcctcagcgctggtgaactgcaccaacagctatgactacgaggagcccgaccccaagatggtggagctggccaagtatgccaagcagcatgtgcccgagcagcaccccaaggacaagccaagcttcgtgcgggctcgggtgaagaagctgctggcagcgggtgtggtgtcggccatggtgtgcatggtgaagacggagagccctgtgctgaccagttcctgcagagagctgctctccagggtcttcttggctttagtggaagaggtagaggaccgaggcactgtggttgcccagggaggcggcagggcgctgatcccgctggccctggaaggcacggacgtggggcagacaaaggcagcccaggcccttgccaagctcaccatcacctccaacccggagatgaccttccctggcgagcggatctatgaggtggtccggcccctcgtctccctgttgcacctcaactgctcaggcctgcagaacttcgaggcgctcatggccctaacaaacctggctgggatcagcgagaggctccggcagaagatcctgaaggagaaggctgtgcccatgatagaaggctacatgtttgaggagcatgagatgatccgccgggcagccacggagtgcatgtgtaacttggccatgagcaaggaggtgcaggacctcttcgaagcccagggcaatgaccgactgaagctgctggtgctgtacagtggagaggatgatgagctgctacagcgggcagctgccgggggcttggccatgcttacctccatgcggcccacgctctgcagccgcattccccaagtgaccacacactggctggagatcctgcaggccctgcttctgagctccaaccaggagctgcagcaccggggtgctgtggtggtgctgaacatggtggaggcctcgagggagattgccagcaccctgatggagagtgagatgatggagatcttgtcagtgctagctaagggtgaccacagccctgtcacaagggctgctgcagcctgcctggacaaagcagtggaatatgggcttatccaacccaaccaagatggagagtgagggggttgtccctgggcccaaggctcatgcacacgctacctattgtggcacggagagtaaggacggaagcagctttggctggtggtggctggcatgcccaatactcttgcccatcctcgcttgctgccctaggatgtcctctgttctgagtcagcggccacgttcagtcacacagccctgcttggccagcactgcctgcagcctcactcagaggggccctttttctgtactactgtagtcagctgggaatggggaaggtgcatcccaacacagcctgtggatcctggggcatctggaagggcgcacacatcagcagcctcaccagctgtgagcctgctatcaggcctgcccctccaataaaagtgtgtagaactcca

SEQ ID NO: 33834 - DNA, 3419 bp, Homo sapiens
  source 1..3419: mol_type = unassigned DNA
atggccggaacatctgaacgttcattgatctcatcgatttctcaacccaaagccatcgagtgctttgaggtgaagaaaaaggctttccttacccacggcagataccacggcagtggcgccacgccgccaaagaccaaagaccccaaaccagaaacgttctgtggtcagacagggctgcccaccatggaggtccgcattaatgtctcaaggcagcaggtcgagaaggtgttcgggctggaggaatactggtgccagtgcgtggcatggagctcctcgggcaccaccaagagtcagaaggcctacatccgcatagcctatttgcgcaagaacttcgagcaggagccgctggccaaggaggtgtccctggagcagggcatcgtgctgccctgccgtccaccggagggcatccctccagccgaggtggagtggctccggaacgaggacctggtggacccgtccctggaccccaatgtatacatcacgcgggagcacagcctggtggtgcgacaggcccgccttgctgacacggccaactacacctgcgtggccaagaacatcgtggcacgtcgccgcagcgcctccgctgctgtcatcgtctacgtggacggcagctggagcccgtggagcaagtggtcggcctgtgggctggactgcacccactggcggagccgtgagtgctctgacccagcaccccgcaacggaggggaggagtgccagggcactgacctggacacccgcaactgtaccagtgacctctgtgtacacactgcttctggccctgaggacgtggccctctatgtgggcctcatcgccgtggccgtctgcctggtcctgctgctgcttgtcctcatcctcgtttattgccggaagaaggaggggctggactcagatgtggctgactcgtccattctcacctcaggcttccagcccgtcagcatcaagcccagcaaagcagacaacccccatctgctcaccatccagccggacctcagcaccaccaccaccacctaccagggcagtctctgtccccggcaggatgggcccagccccaagttccagctcaccaatgggcacctgctcagccccctgggtggcggccgccacacactgcaccacagctctcccacctctgaggccgaggagttcgtctcccgcctctccacccagaactacttccgctccctgccccgaggcaccagcaacatgacctatgggaccttcaacttcctcgggggccggctgatgatccctaatacaggaatcagcctcctcatccccccagatgccataccccgagggaagatctatgagatctacctcacgctgcacaagccggaagacgtgaggttgcccctagctggctgtcagaccctgctgagtcccatcgttagctgtggaccccctggcgtcctgctcacccggccagtcatcctggctatggaccactgtggggagcccagccctgacagctggagcctgcgcctcaaaaagcagtcgtgcgagggcagctgggaggatgtgctgcacctgggcgaggaggcgccctcccacctctactactgccagctggaggccagtgcctgctacgtcttcaccgagcagctgggccgctttgccctggtgggagaggccctcagcgtggctgccgccaagcgcctcaagctgcttctgtttgcgccggtggcctgcacctccctcgagtacaacatccgggtctactgcctgcatgacacccacgatgcactcaaggaggtggtgcagctggagaagcagctggggggacagctgatccaggagccacgggtcctgcacttcaaggacagttaccacaacctgcgcctatccatccacgatgtgcccagctccctgtggaagagtaagctccttgtcagctaccaggagatccccttttatcacatctggaatggcacgcagcggtacttgcactgcaccttcaccctggagcgtgtcagccccagcactagtgacctggcctgcaagctgtgggtgtggcaggtggagggcgacgggcagagcttcagcatcaacttcaacatcaccaaggacacaaggtttgctgagctgctggctctggagagtgaagcgggggtcccagccctggtgggccccagtgccttcaagatccccttcctcattcggcagaagataatttccagcctggacccaccctgtaggcggggtgccgactggcggactctggcccagaaactccacctggacagccatctcagcttctttgcctccaagcccagccccacagccatgatcctcaacctgtgggaggcgcggcacttccccaacggcaacctcagccagctggctgcagcagtggctggactgggccagccagacgctggcctcttcacagtgtcggaggctgagtgctgaggccggccaggcccgacacctacactctcaccagctttggcacccaccaaggacaggcagaagccggacaggggcccttccccacaccggggagagctgctcggacaggccccctcccggccgaagctgtcccttaatgctggtccttcagaccctgcccgaactcccacctctccatggcctgcctagccaggctggcactgccactcacactcggccccagggcccaggagggacagtgcctggagcctgggccaggcccagcccatctgtgtgtgtgtatgtgcgtgtgatgctacctctcctcccgtccctctccaggggccccgcatacacacggccatgcacgcacacactgggcctgggccagggccccagagctcctgcctgagctggaccttatgcaaacatttctgtgcctgctgggtaggggcacgtctgaggggccctgctccaagcctgcaggaccgagggccacagccggacagggggtagcccctggattcaggcacacgaccaccacacgagcacgtgccacgcatgcctcgtgtgctcatctcacacacacccccctcccgggtcacgcagacaccccccaaccacacacatctcatgctgtacacctgaggctgctcacgtctcacgcccagtgttggtgcacatttgcctctcacatgctgccctctccacccacccagggacaccccacggctcctccctgcccctgcccctcccccagccttgaggtgccctgcccggcggggcctgtgaatatgcaatgggagtcccaggctgtacagtggtgagtgtgtgtgtggcgtggcgtgcccgtccccagggctggctggtgccccacgcggggcctgtcatgtgaagctcgtgtcctgactttgtcttaagtgcattcacgcacttactcttggccttatgtacacagccttgcccggccgccggggcacataggggttttatcgggcgtgaatgtaaataaattatatatatatattgct

SEQ ID NO: 33835 - DNA, 3812 bp, Homo sapiens
  source 1..3812: mol_type = unassigned DNA
accggcccgctctccggctgcgggctccgcggcgcggctggctcggtgcgcggcgcggctggcgctgcgctccgccccggctgcattgctgcgctcccgtgcccaagggagccacgcgccgcgtgcgcccggcagccggccgcccggaggcagcgcagtccgctggcatgggccccgggggcgccccgagctggggctccgggctgaggcgctaaagccgccctcccgcccgcggggccccgcgcccggcccgcccgcctgcccgcccgcggccatggccgtccggcccggcctgtggccagcgctcctgggcatagtcctcgccgcttggctccgcggctcgggtgcccagcagagtgccaccgtggccaacccagtgcctggtgccaacccggacctgcttccccacttcctggtggagcccgaggatgtgtacatcgtcaagaacaagccagtgctgcttgtgtgcaaggccgtgcccgccacgcagatcttcttcaagtgcaacggggagtgggtgcgccaggtggaccacgtgatcgagcgcagcacagacgggagcagtgggctgcccaccatggaggtccgcattaatgtctcaaggcagcaggtcgagaaggtgttcgggctggaggaatactggtgccagtgcgtggcatggagctcctcgggcaccaccaagagtcagaaggcctacatccgcatagcctatttgcgcaagaacttcgagcaggagccgctggccaaggaggtgtccctggagcagggcatcgtgctgccctgccgtccaccggagggcatccctccagccgaggtggagtggctccggaacgaggacctggtggacccgtccctggaccccaatgtatacatcacgcgggagcacagcctggtggtgcgacaggcccgccttgctgacacggccaactacacctgcgtggccaagaacatcgtggcacgtcgccgcagcgcctccgctgctgtcatcgtctacgtggacggcagctggagcccgtggagcaagtggtcggcctgtgggctggactgcacccactggcggagccgtgagtgctctgacccagcaccccgcaacggaggggaggagtgccagggcactgacctggacacccgcaactgtaccagtgacctctgtgtacacactgcttctggccctgaggacgtggccctctatgtgggcctcatcgccgtggccgtctgcctggtcctgctgctgcttgtcctcatcctcgtttattgccggaagaaggaggggctggactcagatgtggctgactcgtccattctcacctcaggcttccagcccgtcagcatcaagcccagcaaagcagacaacccccatctgctcaccatccagccggacctcagcaccaccaccaccacctaccagggcagtctctgtccccggcaggatgggcccagccccaagttccagctcaccaatgggcacctgctcagccccctgggtggcggccgccacacactgcaccacagctctcccacctctgaggccgaggagttcgtctcccgcctctccacccagaactacttccgctccctgccccgaggcaccagcaacatgacctatgggaccttcaacttcctcgggggccggctgatgatccctaatacaggaatcagcctcctcatccccccagatgccataccccgagggaagatctatgagatctacctcacgctgcacaagccggaagacgtgaggttgcccctagctggctgtcagaccctgctgagtcccatcgttagctgtggaccccctggcgtcctgctcacccggccagtcatcctggctatggaccactgtggggagcccagccctgacagctggagcctgcgcctcaaaaagcagtcgtgcgagggcagctgggaggatgtgctgcacctgggcgaggaggcgccctcccacctctactactgccagctggaggccagtgcctgctacgtcttcaccgagcagctgggccgctttgccctggtgggagaggccctcagcgtggctgccgccaagcgcctcaagctgcttctgtttgcgccggtggcctgcacctccctcgagtacaacatccgggtctactgcctgcatgacacccacgatgcactcaaggaggtggtgcagctggagaagcagctggggggacagctgatccaggagccacgggtcctgcacttcaaggacagttaccacaacctgcgcctatccatccacgatgtgcccagctccctgtggaagagtaagctccttgtcagctaccaggagatccccttttatcacatctggaatggcacgcagcggtacttgcactgcaccttcaccctggagcgtgtcagccccagcactagtgacctggcctgcaagctgtgggtgtggcaggtggagggcgacgggcagagcttcagcatcaacttcaacatcaccaaggacacaaggtttgctgagctgctggctctggagagtgaagcgggggtcccagccctggtgggccccagtgccttcaagatccccttcctcattcggcagaagataatttccagcctggacccaccctgtaggcggggtgccgactggcggactctggcccagaaactccacctggacagccatctcagcttctttgcctccaagcccagccccacagccatgatcctcaacctgtgggaggcgcggcacttccccaacggcaacctcagccagctggctgcagcagtggctggactgggccagccagacgctggcctcttcacagtgtcggaggctgagtgctgaggccggccaggcccgacacctacactctcaccagctttggcacccaccaaggacaggcagaagccggacaggggcccttccccacaccggggagagctgctcggacaggccccctcccggccgaagctgtcccttaatgctggtccttcagaccctgcccgaactcccacctctccatggcctgcctagccaggctggcactgccactcacactcggccccagggcccaggagggacagtgcctggagcctgggccaggcccagcccatctgtgtgtgtgtatgtgcgtgtgatgctacctctcctcccgtccctctccaggggccccgcatacacacggccatgcacgcacacactgggcctgggccagggccccagagctcctgcctgagctggaccttatgcaaacatttctgtgcctgctgggtaggggcacgtctgaggggccctgctccaagcctgcaggaccgagggccacagccggacagggggtagcccctggattcaggcacacgaccaccacacgagcacgtgccacgcatgcctcgtgtgctcatctcacacacacccccctcccgggtcacgcagacaccccccaaccacacacatctcatgctgtacacctgaggctgctcacgtctcacgcccagtgttggtgcacatttgcctctcacatgctgccctctccacccacccagggacaccccacggctcctccctgcccctgcccctcccccagccttgaggtgccctgcccggcggggcctgtgaatatgcaatgggagtcccaggctgtacagtggtgagtgtgtgtgtggcgtggcgtgcccgtccccagggctggctggtgccccacgcggggcctgtcatgtgaagctcgtgtcctgactttgtcttaagtgcattcacgcacttactcttggccttatgtacacagccttgcccggccgccggggcacataggggttttatcgggcgtgaatgtaaataaattatatatatatattgc

SEQ ID NO: 33836 - DNA, 6841 bp, Homo sapiens
  source 1..6841: mol_type = unassigned DNA
attgtggcaggcggctggggccggctagggcgccggagccgcacgcagccgcggggctccgagaggcgcgcactggggctgggactgcgcggcgccgccgctgcgagcgccactgagcggtcgcgcaacttcggaggcacagcgccggagccaggcgagcgctcagagacccggagccagaggggcgcgccggagcctcgttcgagagccggcgccaggcacccaccgcgctccgagtgccaggcggccctccgcgcagcgtggcttccgctgcccccacggaaggcacgggctggcgctgccgggcgccggggaggacggcgaggaggaggcggcggcggcggagacggcggcggcgagactggggccagggagacagccctgggggagaggcgcccgaaccaggccgcgggagcatgggggcccggagcggagctcggggcgcgctgctgctggcactgctgctctgctgggacccgaggctgagccaagcaggcactgattctggcagcgaggtgctccctgactccttcccgtcagcgccagcagagccgctgccctacttcctgcaggagccacaggacgcctacattgtgaagaacaagcctgtggagctccgctgccgcgccttccccgccacacagatctacttcaagtgcaacggcgagtgggtcagccagaacgaccacgtcacacaggaaggcctggatgaggccaccggcctgcgggtgcgcgaggtgcagatcgaggtgtcgcggcagcaggtggaggagctctttgggctggaggattactggtgccagtgcgtggcctggagctccgcgggcaccaccaagagtcgccgagcctacgtccgcatcgcctacctgcgcaagaacttcgatcaggagcctctgggcaaggaggtgcccctggaccatgaggttctcctgcagtgccgcccgccggagggggtgcctgtggccgaggtggaatggctcaagaatgaggatgtcatcgaccccacccaggacaccaacttcctgctcaccatcgaccacaacctcatcatccgccaggcccgcctgtcggacactgccaactatacctgcgtggccaagaacatcgtggccaaacgccggagcaccactgccaccgtcatcgtctacgtgaatggcggctggtccagctgggcagagtggtcaccctgctccaaccgctgtggccgaggctggcagaagcgcacccggacctgcaccaaccccgctccactcaacggaggggccttctgcgagggccaggcattccagaagaccgcctgcaccaccatctgcccagtcgatggggcgtggacggagtggagcaagtggtcagcctgcagcactgagtgtgcccactggcgtagccgcgagtgcatggcgcccccaccccagaacggaggccgtgactgcagcgggacgctgctcgactctaagaactgcacagatgggctgtgcatgcaaaataagaaaactctaagcgaccccaacagccacctgctggaggcctcaggggatgcggcgctgtatgcggggctcgtggtggccatcttcgtggtcgtggcaatcctcatggcggtgggggtggtggtgtaccgccgcaactgccgtgacttcgacacagacatcactgactcatctgctgccctgactggtggtttccaccccgtcaactttaagacggcaaggcccagcaacccgcagctcctacacccctctgtgcctcctgacctgacagccagcgccggcatctaccgcggacccgtgtatgccctgcaggactccaccgacaaaatccccatgaccaactctcctctgctggaccccttacccagccttaaggtcaaggtctacagctccagcaccacgggctctgggccaggcctggcagatggggctgacctgctgggggtcttgccgcctggcacataccctagcgatttcgcccgggacacccacttcctgcacctgcgcagcgccagcctcggttcccagcagctcttgggcctgccccgagacccagggagcagcgtcagcggcacctttggctgcctgggtgggaggctcagcatccccggcacaggggtcagcttgctggtgcccaatggagccattccccagggcaagttctacgagatgtatctactcatcaacaaggcagaaagtaccctcccgctttcagaagggacccagacagtattgagcccctcggtgacctgtggacccacaggcctcctgctgtgccgccccgtcatcctcaccatgccccactgtgccgaagtcagtgcccgtgactggatctttcagctcaagacccaggcccaccagggccactgggaggaggtggtgaccctggatgaggagaccctgaacacaccctgctactgccagctggagcccagggcctgtcacatcctgctggaccagctgggcacctacgtgttcacgggcgagtcctattcccgctcagcagtcaagcggctccagctggccgtcttcgcccccgccctctgcacctccctggagtacagcctccgggtctactgcctggaggacacgcctgtagcactgaaggaggtgctggagctggagcggactctgggcggatacttggtggaggagccgaaaccgctaatgttcaaggacagttaccacaacctgcgcctctccctccatgacctcccccatgcccattggaggagcaagctgctggccaaataccaggagatccccttctatcacatttggagtggcagccagaaggccctccactgcactttcaccctggagaggcacagcttggcctccacagagctcacctgcaagatctgcgtgcggcaagtggaaggggagggccagatattccagctgcataccactctggcagagacacctgctggctccctggacactctctgctctgcccctggcagcactgtcaccacccagctgggaccttatgccttcaagatcccactgtccatccgccagaagatatgcaacagcctagatgcccccaactcacggggcaatgactggcggatgttagcacagaagctctctatggaccggtacctgaattactttgccaccaaagcgagccccacgggtgtgatcctggacctctgggaagctctgcagcaggacgatggggacctcaacagcctggcgagtgccttggaggagatgggcaagagtgagatgctggtggctgtggccaccgacggggactgctgagcctcctgggacagcgggctggcagggactggcaggaggcaggtgcagggaggcctggggcagcctcctgatggggatgtttggcctctgcttcctcccagttcacagccagagttgcctctcctcctcctcttccccaacccccagaccatgaccagccttagaaaatccatgtactctgttgttagagggcccagagttccttctccacccccgctctctctctcttggcctgagatctctgtgcaggaaccaagatggggctgaagcctctggaggcagttggttgggggcgggcaggcaggaggccctccctccacccccccaccctcagcccggcaacttctgggttccatgggttttagttccgttctcgttttcttcctccgttattgatttctcctttctccctaagcccccttctgcttccacgcccttttcctctttgaagagtcaagtacaattcagacaaactgctttctcctgtccaaaagcaaaaaggcaaaggaaagaaagaaagcttcagaccgctagtaaggctcaaagaagaagaaaaacaccaaaaccacaagggaaaagaaaaacccagtttcttaggaaacgcaaacgatttattatccagattatttggataagtcctttttaagaaaaaaaaagaaaatgaaaaacaacacaaaaaaaatagaaaactcttttcttgagtgtggatgagaatgggcacgctcacacttctggccaggagtgaatgtgcctgtgtgtgtgtgtgtgtgtgtgtgtgtgtgtgtacatgtacgcgtgtgcattgaggagagagagactgaacagagagtactttgctgctaacgaatccatcttggactaaattctgacaaggcctcagtttccccagttgtgcagggagtaggtcagacagggttttcactgtctagatttagctggttagattttcctctaaaatcttaagcagatgctgaatccataaagccaaggagtgctgagggctggagtgggtgggccctccctcccacagccccagggagatacatctggactcctgggaatctggattaagaaagttgggatgaaagaggaggactgctcaggccagttgtgagccagggagaatgttccagtctggttttggtctggtggctcctagaaagggatgtggcccagaagtgggactcaaacagagagatgaagtaggggaggggagtcctccacgggcatctctctcctggcggctggatagctttaccctagggtggggccagccctgacaccctcatcccctcctcagcccagcagcctctagagcagcgtggtgctctcttgatggccaggaatccagaatctgcccttccccaaccttggtttctccttctgtaaagcagagtgatggctgagaagtcctctctagctgcagaagcctgagcttcccggtgtcagtcagctctgcaacgtgggagccttggaggcgggtggcctggctgtgcttcatatgcccaggagtggagaaggaggctgagaagctggtttcccagctctgatctccacaggcacctcctataaccctcctctcacccaccccgctacggtctgagagatctgaaataacctttcccagtgggcagggttgccagggttgaggggacagcacataccacccccacccaacctgttcgaggggccctgcatggcacgggatgagtccctgccctgtgcagctgcctggcagtggctgggacaaggatcttgcagccagcacagaggcctcttcaaaggcctctccctcttggcactccaggcaaggcaggtgcccgcttccccaacacctccaggcagtgaccctagggcatgccccagcaggtctccgagcagccactgggacccgtctcagcacatcctggcctttgaaagtctgatatcctgagaggagggcaggttttagggccgcagttccagccagcgtccccagcctggcttccctgccatggactcagtagctcgtggggcttcttaccacccaccagccccgctggggtgcggcctggctgtgggcaaaggaggacttgcctggagatttgagagaagattccttctaccagggctgctgaggggccaggcctgcatcaggggctaggctctggctgggcccggaggctgagactaaggctttcgaccctggtgcctccatgtggatgctgcctcagacaaaggcagtgagccttccctgccaaagtgcccatcccatgggctcggcctcactggtcactgttagcccatgaacacgtgtgggcctcggtcacgtggctttgagggcagtctgaccaggctagaccacacgtgccgtgacagggggtgccattcccctcgcaggctctaatgtgcccacatgtagcctggcagtccaaagaccaagaatcaacttgcaaatctgccattaaactgctgtgcgacttcaggcatatcactgccttctctgggcttcagtgtccttttcatacctagaagtctgcggtctgaggctctttgggttcagacacactgttctaggcttctgtaggggaccttgtgatctgccgtgcccctcctccctgttcttttctgtcctccccaccccaccctcagaagctgcttgctctgcccccaggacaggagcttgacggatgaagtgcagccagccacccaggtgccatttccagtctgacttccagaaatgtgcaccatgtcctagagcacagacccattggctggagcctcctgggagggttcaaaccatcagctctatgagaaatgcccagaaaggctttgccgactccatccgtctgtggaggctgcctgcctccggggtgggatgggtggtttctcctccaattcagacccaagaggtagcccccgagggcatgtacctggtgggaagcagctcaggtacccttgggggttgcagggcccttacgcaggtatttctctctctctcctctctggggtgcgtgtgtgcgtgcgcgtgtgcgtgcctatgcttttctctgtgggcacatcaggatgcccctcggagagcatgtgcacgtgtccccacctgagcgagcgtgtgtgtgtgctcctctgcgtcccaggtttggacgtctagggtttggtgtgcctgtcttctgccctccctgagcccacagggtcagtcaatgtatcttctacgtgcctctccctctgccttctctcacagtgcccccggctccagagctcaggggtaggggttctcctgagggtgcaggggatccttctcatctcctggaccctccagggcactctggtccctattccccagctcctaggcagctgagccgggtcccttaggggaggtgaccaggagctttggtgcagggagctcttggtggggcaaagggctggacccctgccaggtctgtggacatggttatatgcccgggagaggggggtgcagggccccagggatggcccccaatcccacctctgtttattctgtaaactgcaacctataaataacctttagcattcctattgtaacaaaattaatttttatgaaataaattatatttcctagtctaataaaa

SEQ ID NO: 33837 - DNA, 6451 bp, Homo sapiens
  source 1..6451: mol_type = unassigned DNA
gagactggggccagggagacagccctgggggagaggcgcccgaaccaggccgcgggagcatgggggcccggagcggagctcggggcgcgctgctgctggcactgctgctctgctgggacccgaggctgagccaagcaggcactgattctggcagcgaggtgctccctgactccttcccgtcagcgccagcagagccgctgccctacttcctgcaggagccacaggacgcctacattgtgaagaacaagcctgtggagctccgctgccgcgccttccccgccacacagatctacttcaagtgcaacggcgagtgggtcagccagaacgaccacgtcacacaggaaggcctggatgaggccaccggcctgcgggtgcgcgaggtgcagatcgaggtgtcgcggcagcaggtggaggagctctttgggctggaggattactggtgccagtgcgtggcctggagctccgcgggcaccaccaagagtcgccgagcctacgtccgcatcgcctacctgcgcaagaacttcgatcaggagcctctgggcaaggaggtgcccctggaccatgaggttctcctgcagtgccgcccgccggagggggtgcctgtggccgaggtggaatggctcaagaatgaggatgtcatcgaccccacccaggacaccaacttcctgctcaccatcgaccacaacctcatcatccgccaggcccgcctgtcggacactgccaactatacctgcgtggccaagaacatcgtggccaaacgccggagcaccactgccaccgtcatcgtctacgtgaatggcggctggtccagctgggcagagtggtcaccctgctccaaccgctgtggccgaggctggcagaagcgcacccggacctgcaccaaccccgctccactcaacggaggggccttctgcgagggccaggcattccagaagaccgcctgcaccaccatctgcccagtcgatggggcgtggacggagtggagcaagtggtcagcctgcagcactgagtgtgcccactggcgtagccgcgagtgcatggcgcccccaccccagaacggaggccgtgactgcagcgggacgctgctcgactctaagaactgcacagatgggctgtgcatgcaaatgctggaggcctcaggggatgcggcgctgtatgcggggctcgtggtggccatcttcgtggtcgtggcaatcctcatggcggtgggggtggtggtgtaccgccgcaactgccgtgacttcgacacagacatcactgactcatctgctgccctgactggtggtttccaccccgtcaactttaagacggcaaggcccagcaacccgcagctcctacacccctctgtgcctcctgacctgacagccagcgccggcatctaccgcggacccgtgtatgccctgcaggactccaccgacaaaatccccatgaccaactctcctctgctggaccccttacccagccttaaggtcaaggtctacagctccagcaccacgggctctgggccaggcctggcagatggggctgacctgctgggggtcttgccgcctggcacataccctagcgatttcgcccgggacacccacttcctgcacctgcgcagcgccagcctcggttcccagcagctcttgggcctgccccgagacccagggagcagcgtcagcggcacctttggctgcctgggtgggaggctcagcatccccggcacaggggtcagcttgctggtgcccaatggagccattccccagggcaagttctacgagatgtatctactcatcaacaaggcagaaagtaccctcccgctttcagaagggacccagacagtattgagcccctcggtgacctgtggacccacaggcctcctgctgtgccgccccgtcatcctcaccatgccccactgtgccgaagtcagtgcccgtgactggatctttcagctcaagacccaggcccaccagggccactgggaggaggtggtgaccctggatgaggagaccctgaacacaccctgctactgccagctggagcccagggcctgtcacatcctgctggaccagctgggcacctacgtgttcacgggcgagtcctattcccgctcagcagtcaagcggctccagctggccgtcttcgcccccgccctctgcacctccctggagtacagcctccgggtctactgcctggaggacacgcctgtagcactgaaggaggtgctggagctggagcggactctgggcggatacttggtggaggagccgaaaccgctaatgttcaaggacagttaccacaacctgcgcctctccctccatgacctcccccatgcccattggaggagcaagctgctggccaaataccaggagatccccttctatcacatttggagtggcagccagaaggccctccactgcactttcaccctggagaggcacagcttggcctccacagagctcacctgcaagatctgcgtgcggcaagtggaaggggagggccagatattccagctgcataccactctggcagagacacctgctggctccctggacactctctgctctgcccctggcagcactgtcaccacccagctgggaccttatgccttcaagatcccactgtccatccgccagaagatatgcaacagcctagatgcccccaactcacggggcaatgactggcggatgttagcacagaagctctctatggaccggtacctgaattactttgccaccaaagcgagccccacgggtgtgatcctggacctctgggaagctctgcagcaggacgatggggacctcaacagcctggcgagtgccttggaggagatgggcaagagtgagatgctggtggctgtggccaccgacggggactgctgagcctcctgggacagcgggctggcagggactggcaggaggcaggtgcagggaggcctggggcagcctcctgatggggatgtttggcctctgcttcctcccagttcacagccagagttgcctctcctcctcctcttccccaacccccagaccatgaccagccttagaaaatccatgtactctgttgttagagggcccagagttccttctccacccccgctctctctctcttggcctgagatctctgtgcaggaaccaagatggggctgaagcctctggaggcagttggttgggggcgggcaggcaggaggccctccctccacccccccaccctcagcccggcaacttctgggttccatgggttttagttccgttctcgttttcttcctccgttattgatttctcctttctccctaagcccccttctgcttccacgcccttttcctctttgaagagtcaagtacaattcagacaaactgctttctcctgtccaaaagcaaaaaggcaaaggaaagaaagaaagcttcagaccgctagtaaggctcaaagaagaagaaaaacaccaaaaccacaagggaaaagaaaaacccagtttcttaggaaacgcaaacgatttattatccagattatttggataagtcctttttaagaaaaaaaaagaaaatgaaaaacaacacaaaaaaaatagaaaactcttttcttgagtgtggatgagaatgggcacgctcacacttctggccaggagtgaatgtgcctgtgtgtgtgtgtgtgtgtgtgtgtgtgtgtgtacatgtacgcgtgtgcattgaggagagagagactgaacagagagtactttgctgctaacgaatccatcttggactaaattctgacaaggcctcagtttccccagttgtgcagggagtaggtcagacagggttttcactgtctagatttagctggttagattttcctctaaaatcttaagcagatgctgaatccataaagccaaggagtgctgagggctggagtgggtgggccctccctcccacagccccagggagatacatctggactcctgggaatctggattaagaaagttgggatgaaagaggaggactgctcaggccagttgtgagccagggagaatgttccagtctggttttggtctggtggctcctagaaagggatgtggcccagaagtgggactcaaacagagagatgaagtaggggaggggagtcctccacgggcatctctctcctggcggctggatagctttaccctagggtggggccagccctgacaccctcatcccctcctcagcccagcagcctctagagcagcgtggtgctctcttgatggccaggaatccagaatctgcccttccccaaccttggtttctccttctgtaaagcagagtgatggctgagaagtcctctctagctgcagaagcctgagcttcccggtgtcagtcagctctgcaacgtgggagccttggaggcgggtggcctggctgtgcttcatatgcccaggagtggagaaggaggctgagaagctggtttcccagctctgatctccacaggcacctcctataaccctcctctcacccaccccgctacggtctgagagatctgaaataacctttcccagtgggcagggttgccagggttgaggggacagcacataccacccccacccaacctgttcgaggggccctgcatggcacgggatgagtccctgccctgtgcagctgcctggcagtggctgggacaaggatcttgcagccagcacagaggcctcttcaaaggcctctccctcttggcactccaggcaaggcaggtgcccgcttccccaacacctccaggcagtgaccctagggcatgccccagcaggtctccgagcagccactgggacccgtctcagcacatcctggcctttgaaagtctgatatcctgagaggagggcaggttttagggccgcagttccagccagcgtccccagcctggcttccctgccatggactcagtagctcgtggggcttcttaccacccaccagccccgctggggtgcggcctggctgtgggcaaaggaggacttgcctggagatttgagagaagattccttctaccagggctgctgaggggccaggcctgcatcaggggctaggctctggctgggcccggaggctgagactaaggctttcgaccctggtgcctccatgtggatgctgcctcagacaaaggcagtgagccttccctgccaaagtgcccatcccatgggctcggcctcactggtcactgttagcccatgaacacgtgtgggcctcggtcacgtggctttgagggcagtctgaccaggctagaccacacgtgccgtgacagggggtgccattcccctcgcaggctctaatgtgcccacatgtagcctggcagtccaaagaccaagaatcaacttgcaaatctgccattaaactgctgtgcgacttcaggcatatcactgccttctctgggcttcagtgtccttttcatacctagaagtctgcggtctgaggctctttgggttcagacacactgttctaggcttctgtaggggaccttgtgatctgccgtgcccctcctccctgttcttttctgtcctccccaccccaccctcagaagctgcttgctctgcccccaggacaggagcttgacggatgaagtgcagccagccacccaggtgccatttccagtctgacttccagaaatgtgcaccatgtcctagagcacagacccattggctggagcctcctgggagggttcaaaccatcagctctatgagaaatgcccagaaaggctttgccgactccatccgtctgtggaggctgcctgcctccggggtgggatgggtggtttctcctccaattcagacccaagaggtagcccccgagggcatgtacctggtgggaagcagctcaggtacccttgggggttgcagggcccttacgcaggtatttctctctctctcctctctggggtgcgtgtgtgcgtgcgcgtgtgcgtgcctatgcttttctctgtgggcacatcaggatgcccctcggagagcatgtgcacgtgtccccacctgagcgagcgtgtgtgtgtgctcctctgcgtcccaggtttggacgtctagggtttggtgtgcctgtcttctgccctccctgagcccacagggtcagtcaatgtatcttctacgtgcctctccctctgccttctctcacagtgcccccggctccagagctcaggggtaggggttctcctgagggtgcaggggatccttctcatctcctggaccctccagggcactctggtccctattccccagctcctaggcagctgagccgggtcccttaggggaggtgaccaggagctttggtgcagggagctcttggtggggcaaagggctggacccctgccaggtctgtggacatggttatatgcccgggagaggggggtgcagggccccagggatggcccccaatcccacctctgtttattctgtaaactgcaacctataaataacctttagcattcctattgtaacaaaattaatttttatgaaataaattatatttcctagtctaataaaa

SEQ ID NO: 33838 - DNA, 3017 bp, Homo sapiens
  source 1..3017: mol_type = unassigned DNA
gatgatgacttttttcatgaactcccagaaacttttccttctgatccacctgagcctctgccacatttccttattgagcctgaagaagcttatattgtgaagaataagcccgtgaacctgtactgtaaagcaagccctgccacccagatctatttcaagtgtaatagtgaatgggttcatcagaaggaccacatagtagatgaaagagtagatgaaacttccggtctcattgtccgggaagtgagcattgagatttcgcgccagcaagtggaagaactctttggacctgaagattactggtgccagtgtgtggcctggagctccgcgggtaccacaaagagccggaaggcgtatgtgcgcattgcatatctacggaagacatttgagcaggaacccctaggaaaggaagtgtctttggaacaggaagtcttactccagtgtcgaccacctgaagggatcccagtggctgaggtggaatggttgaaaaatgaagacataattgatcccgttgaagatcggaatttttatattactattgatcacaacctcatcataaagcaggcccgactctctgatactgcaaattacacctgtgttgccaaaaacattgttgccaagaggaaaagtacaactgccactgtcatagtctatgtcaacggtggctggtccacctggacggagtggtctgtgtgtaacagccgctgtggacgagggtatcagaaacgtacaaggacttgtaccaacccggcaccactcaatgggggtgccttctgtgaagggcagagtgtgcagaaaatagcctgtactacgttatgcccagtggatggcaggtggacgccatggagcaagtggtctacttgtggaactgagtgcacccactggcgcaggagggagtgcacggcgccagcccccaagaatggaggcaaggactgcgacggcctcgtcttgcaatccaagaactgcactgatgggctttgcatgcagactgctcctgattcagatgatgttgctctctatgttgggattgtgatagcagtgatcgtttgcctggcgatctctgtagttgtggccttgtttgtgtatcggaagaatcatcgtgactttgagtcagatattattgactcttcggcactcaatgggggctttcagcctgtgaacatcaaggcagcaagacaagatctgctggctgtacccccagacctcacgtcagctgcagccatgtacagaggacctgtctatgccctgcatgacgtctcagacaaaatcccaatgaccaactctccaattctggatccactgcccaacctgaaaatcaaagtgtacaacacctcaggtgctgtcaccccccaagatgacctctctgagtttacgtccaagctgtcccctcagatgacccagtcgttgttggagaatgaagccctcagcctgaagaaccagagtctagcaaggcagactgatccatcctgtaccgcatttggcagcttcaactcgctgggaggtcaccttattgttcccaattcaggagtcagcttgctgattcccgctggggccattccccaagggagagtctacgaaatgtatgtgactgtacacaggaaagaaactatgaggccacccatggatgactctcagacacttttgacccctgtggtgagctgtgggcccccaggagctctgctcacccgcccagtcgtcctcactatgcatcactgcgcagaccccaataccgaggactggaaaatactgctcaagaaccaggcagcacagggacagtgggaggatgtggtggtggtcggggaggaaaacttcaccaccccctgctacattcagctggatgcagaggcctgccacatcctcacagagaacctcagcacctacgccctggtaggacattccaccaccaaagcggctgcgaagcgcctcaagctggccatctttgggcccctgtgctgctcctcgctggagtacagcatccgagtctactgtctggatgacacccaggatgccctgaaggaaattttacatcttgagagacagatgggaggacagctcctagaagaacctaaggctcttcattttaaaggcagcacccacaacctgcgcctgtcaattcacgatatcgcccattccctctggaagagcaaattgctggctaaatatcaggaaattccattttaccatgtttggagtggatctcaaagaaacctgcactgcaccttcactctggaaagatttagcctgaacacagtggagctggtttgcaaactctgtgtgcggcaggtggaaggagaagggcagatcttccagctcaactgcaccgtgtcagaggaacctactggcatcgatttgccgctgctggatcctgcgaacaccatcaccacggtcacggggcccagtgctttcagcatccctctccctatccggcagaagctctgtagcagcctggatgccccccagacgagaggccatgactggaggatgctggcccataagctgaacctggacaggtacttgaattactttgccaccaaatccagcccaactggcgtaatcctggatctttgggaagcacagaacttcccagatggaaacctgagcatgctggcagctgtcttggaagaaatgggaagacatgaaacggtggtgtccttagcagcagaagggcagtattaaccaccatgctggaaggggaaatgaaggacaaaaatgcacagggagtctgtggccgtccaggtgaatcacagctgaggaggaaatccagatgagaccaatgcacttcacaggcaagactgcagcaggagccagaaggaaaacagatacaactgcccatgtacatgcccactttactcggacatcatcacgggagttaagaaaaattgtgtaaatttgtaccttgaatttagctatcaacctaattttcctcttagttgggctgtatgctgtgtggtacaggatcttacagtttcctaggaaacgctttttattgctatccagatatatggataaactttcttaac

SEQ ID NO: 33839 - DNA, 9875 bp, Homo sapiens
  source 1..9875: mol_type = unassigned DNA
cagacttcggcgtgcggcggagctgcggctgctcctgctgctggggggagcggcggaggtggccgccttgcgcctccctggacttcccaagtgggggcagagcagtcgctcgcgggagacgtcagttagaaggcattgggaaagagggaccttcaaactcctcctcggcgtctcctctcctcccccttttggcccctgcctttggagaaagtggagtgtggcgcttggttgtcgttatttcttcggactgcttcgcggtgcacggattcagcttctgcccagtggggctttcagctgtttgcgcgtctctctgtccccctcccctccccccggcacacctctgtctacgatgaggaaaggtctgcgggcgacagcggcccgctgcggactgggactgggatacttgctgcaaatgctcgtgctacctgccctggccctgctcagcgccagcggcactggctccgccgcccaagatgatgacttttttcatgaactcccagaaacttttccttctgatccacctgagcctctgccacatttccttattgagcctgaagaagcttatattgtgaagaataagcccgtgaacctgtactgtaaagcaagccctgccacccagatctatttcaagtgtaatagtgaatgggttcatcagaaggaccacatagtagatgaaagagtagatgaaacttccggtctcattgtccgggaagtgagcattgagatttcgcgccagcaagtggaagaactctttggacctgaagattactggtgccagtgtgtggcctggagctccgcgggtaccacaaagagccggaaggcgtatgtgcgcattgcatatctacggaagacatttgagcaggaacccctaggaaaggaagtgtctttggaacaggaagtcttactccagtgtcgaccacctgaagggatcccagtggctgaggtggaatggttgaaaaatgaagacataattgatcccgttgaagatcggaatttttatattactattgatcacaacctcatcataaagcaggcccgactctctgatactgcaaattacacctgtgttgccaaaaacattgttgccaagaggaaaagtacaactgccactgtcatagtctatgtcaacggtggctggtccacctggacggagtggtctgtgtgtaacagccgctgtggacgagggtatcagaaacgtacaaggacttgtaccaacccggcaccactcaatgggggtgccttctgtgaagggcagagtgtgcagaaaatagcctgtactacgttatgcccagtggatggcaggtggacgccatggagcaagtggtctacttgtggaactgagtgcacccactggcgcaggagggagtgcacggcgccagcccccaagaatggaggcaaggactgcgacggcctcgtcttgcaatccaagaactgcactgatgggctttgcatgcagactgctcctgattcagatgatgttgctctctatgttgggattgtgatagcagtgatcgtttgcctggcgatctctgtagttgtggccttgtttgtgtatcggaagaatcatcgtgactttgagtcagatattattgactcttcggcactcaatgggggctttcagcctgtgaacatcaaggcagcaagacaagatctgctggctgtacccccagacctcacgtcagctgcagccatgtacagaggacctgtctatgccctgcatgacgtctcagacaaaatcccaatgaccaactctccaattctggatccactgcccaacctgaaaatcaaagtgtacaacacctcaggtgctgtcaccccccaagatgacctctctgagtttacgtccaagctgtcccctcagatgacccagtcgttgttggagaatgaagccctcagcctgaagaaccagagtctagcaaggcagactgatccatcctgtaccgcatttggcagcttcaactcgctgggaggtcaccttattgttcccaattcaggagtcagcttgctgattcccgctggggccattccccaagggagagtctacgaaatgtatgtgactgtacacaggaaagaaactatgaggccacccatggatgactctcagacacttttgacccctgtggtgagctgtgggcccccaggagctctgctcacccgcccagtcgtcctcactatgcatcactgcgcagaccccaataccgaggactggaaaatactgctcaagaaccaggcagcacagggacagtgggaggatgtggtggtggtcggggaggaaaacttcaccaccccctgctacattcagctggatgcagaggcctgccacatcctcacagagaacctcagcacctacgccctggtaggacattccaccaccaaagcggctgcgaagcgcctcaagctggccatctttgggcccctgtgctgctcctcgctggagtacagcatccgagtctactgtctggatgacacccaggatgccctgaaggaaattttacatcttgagagacagatgggaggacagctcctagaagaacctaaggctcttcattttaaaggcagcacccacaacctgcgcctgtcaattcacgatatcgcccattccctctggaagagcaaattgctggctaaatatcaggaaattccattttaccatgtttggagtggatctcaaagaaacctgcactgcaccttcactctggaaagatttagcctgaacacagtggagctggtttgcaaactctgtgtgcggcaggtggaaggagaagggcagatcttccagctcaactgcaccgtgtcagaggaacctactggcatcgatttgccgctgctggatcctgcgaacaccatcaccacggtcacggggcccagtgctttcagcatccctctccctatccggcagaagctctgtagcagcctggatgccccccagacgagaggccatgactggaggatgctggcccataagctgaacctggacaggtacttgaattactttgccaccaaatccagcccaactggcgtaatcctggatctttgggaagcacagaacttcccagatggaaacctgagcatgctggcagctgtcttggaagaaatgggaagacatgaaacggtggtgtccttagcagcagaagggcagtattaaccaccatgctggaaggggaaatgaaggacaaaaatgcacagggagtctgtggccgtccaggtgaatcacagctgaggaggaaatccagatgagaccaatgcacttcacaggcaagactgcagcaggagccagaaggaaaacagatacaactgcccatgtacatgcccactttactcggacatcatcacgggagttaagaaaaattgtgtaaatttgtaccttgaatttagctatcaacctaattttcctcttagttgggctgtatgctgtgtggtacaggatcttacagtttcctaggaaacgctttttattgctatccagatatatggataaactttcttaacaaacccaatttctacaaatgttgtttacatcaaattggacagggatgcagacactgtccatggctcgttctatttttgttcaaatcatttgaagttgaagctgtggacggtttgttgtgtctatttcagattagtaatttacagagaaatcacagacttttgctacaaatcgtgtgcatcaagtgtctcagataatcctcccatcagtgttctgtttctagaacttgtagaaccagtgttactgtttgtatcagggaagtggagaatctaagtgtaaaaaagaaataactaagactcctattccttggagggacccttctggtgccctttgggaataaagctgtagcactgcagggaagacagtgattcatgttcaaccccacaaacaagcatttttttcacaacatgtgtgtttgtttgtaatatgcaatatgaagtgtttttttttaaaggtattattattatttacaggtattctggtaaaatgatttttttaaatttctatttttgttagcagtgctgtttgttagtatttggttattgactagacctgtcccaccttttcacctatcaaggtgggtgtggtcatcagtttaattcaacatgcatcacttccttgaccttttacctttcccttattccaccccagaaaggtgattgataaatgctgaatggctttgtcagtctgttccttcagcttgctcaggcagggtctttctttctcctctgaggagtcttaaggagacgtgttctctattaagttcacttaatattgccgttgtgtggccccacgtcgactccctatggtgctctactctagaggcagtgtggttggaggaatggactctaaactggagatcaagaaaccagttctcattgtgggtctgtcactgtcttgttgcgccaccttgagaaagtcatttaaccacacgacctcagtgtcctcactagaaagtgaaagggtgggattagatcatctccaagttctgaaatgctcaacttccaccgtgatgcctccagtctcattcatcagtctgaagaccacaatggactctgacctggatcatcatttaaaaatcatcagctggtcttttgcccaggctatgttacgcctttcaagtagttctgacaaggaagatgattattctaaccagcattatgatgttgtttgtttggcctgagtcgctctgcatcattgcattatgctgttcactgagagatgacatccctttattatcattttcttagcctctcttgggatgcccctgcccccagccttcctgactggttgcaaattctgttttttattattgtcttggcatcttgatatctagaccactcctacaagtttatctggcagtaggaacttggtgcatttttttctacgctacacccccccacccttaatctttctttgctgtcataatattcagtagcatttataaaagctgtctagttagctctttaaaaacttttgtcctgcaaaatgtttgttagtcaacacactactttgtgtaaacaactattatgtttccttgggaccatcacaagctctttaacaaacacaaggactcaattcattcagcaggtggggattaaagaatcaaagcccagtagcaaaaccaaaactgaagaacaagcagacatgtgtatgaatcggaacctttagaacatgactgtggtttacttttaggctggaggcacacaagttgctgaacagacttgaattatacatgtgcttccatctttccatgtttccgctcctattttggtagcatcttgagattccttgatgcctccgccatcctcatccctgaggaactgctgataccttgctatggaacctcttctttctttcatgctttttattccgtatcttctgttttggacatacatacatatattctataaaatctctctcagcccaccccctgcattaggatttccatatttaaaatatttgtacactgactggggaagggagagattgcactataaacaagttcagtggatgtttgtagcaatgagtaaaactgtattctaaattaaaaatcaaatatatatacacgcagttatacacacacattttttaaaaggaggaggaggaaagagagctattgtccattcctacattttgaaataaacttgtcaagattacgcatcagtaccagggttgtggaatcatctatggaaatcaagaactagaatctgaactgaatggtcaaagaaacttctatgcctagtgaaaactagaggggagcaactatgtagctatgaacatgaatcaattccataactgttactaaaaacttattttgactaaaaagtcaccaacacagaactattgaacacaaacaggaattgtttgtcttactgaagtcactgagaacccttggggttcacttcagatgcttttttggttcaacttcccaccaccagaaaagggaaaagtgattgatttcgtgtgtgaggtactcatctgtcagaacccttaatgtttcctattaagtgaatgacaacttccatacatacactatttataccaaataattttcactacaaattctgatttccttctcctttggagtaaagtaatagctgttagattgctttcaaacttagaaggtccagatataacagttcatttcataggaagccacttcatcaaccattctatgtgatacatcctgcttctttctacaccgctggagaggcagtttggctggtttcatttggatagaaaaaactatcatttgtgcatgctgccatctagtggtgtacaacacaatctaacctgagtttaatattcactagaatgtgtttgacgaagggaatgaaaacctgtagagttcaaggacctttatgacaaacagatgtagggaaattttcacttcaaatttataattttcttattctcacttttttttcatttgcatcactcatctcaatattaggtcactgtgagcccagtacatcaactcattcatacacaacatatcttcagttgcttcttgtaacagaactatgtaaaatctatataaaacagtctttgaagagttgtcatttttaacacttatggttttcattggggtttgtatactttaaatctccttttagttccttaatatttatctttggaaatgtaagaagtatctgcttagaaagaaataagtcttatatatgcgaatggaatactatgtctagggaagagaaaattggggttgttaatcaaagggaagaaagcagcttcttttctgctgaatttgggaatccaaaggcagaggtttcatcctgtttttattttcttcttatcacactctttcaagtttccttaatgtatctggaaggaatagaagttggattcagaattgataactggcatggtgatgacaaacctgtgtaacaccaaggttctcacagctaacagctgtttcacaaacggcatcttccaaatgaacagtcacctctgctatgcagaaaacccccatcctgctgtgagcaagttaggctcttcaagaactggacaacttttgggtgaggtgttcaatatcaaactgcataatcattagccattttcatatatactattttatagatttaagtctctcaactatcaaaaagtagagcgattttcaggagaaaaaagtcgtggggactgagttcaggacaccctgaaactatgcgaccagtaatttttttaaggtattttttcctacaagtaaggtatctgaaaagtcaacgttttgagggtggaatcaagacttttcacttctcctggcaaagagcaacaaggctcttgtctcgtgtccttctgtgtgtctctgtcaggatcacagcagctgtgctcttggtctgcttactcctctgtaatccacgtatgcagaagggagttaataaggtgatcaccatctccccagaattcaaaggtctttgcctctataaggtctgcccctatggggccaggaaaatataaacctatataaggacttgcaagagagcataaagaaggtagaaaaggtttacttgttgggttttcaagccttcaagttgaatgagtcttagcttttgctgggcagttgttctggacaagtcatcagtttcatgtggagaactcagtgtaagcccaaggctaatgaatgagaggggtcccatggaaacacagctgaaatgaaatgggactttatccatcttctttgagaatggaagagcttttgtgaagcagtacatcattgctcaagataatggttgataagcattagattttatagatctaataaggaaaatattttattatctcaagttaacaaaacatttttttacctctcgagtgcctcataggaccaactattactctttggcttttatttttctttttgtattatttttatatattctttaaccttgctgagctagtattgactgaaatctttagaactttgcctctgggcaatgaagtaatgtttctctaccctaagatatctatttgtataatctctggctgtaatgatcactttggaagatttcctttgcatctctaattatttctttttaatggaataaggcataagggggaataaatatattgtaaccaatgttatgtaaacccatatccatacaggccaggaaagccaaatgaagtcatttccagaattctagtgtgaaaaacctatttttgaaaagtggggagatggctttgtgtagaactgggtgggttttctctgcagactaagtctagccatgagcttccagatcctttagttttatcagccttgtgcttaccccattttcataaatgctactttaacagccagtcttcataagtcatggttcctaggttttcctgtcacctcattgtattcatctgtggtaggatattaacgggctcattcaaccaaatgtaatgtgtgcctcagacctatttagcatggttggggggcatcagcaggacaaaccaacaggtactccgcaagtgtactggcacagcaagcccaccaattattagcagctcttcatcagcctgctgtctactcagacgcttgcctactgaagggacctgtccagagatcttctggaatcccaggttgggaatctctgcagaatgtcgtgacagttgtggcccaactagcttctgagtagaaacaaggaagctaccctgagatatagtcagctgcccacctgccatagtatttgctactgaatgccagccttttaacataccatttcagatttgtccttcaacaaaaatataaattgcaagtcataccatttaagggtcttttacaaatatgtctaaattgtgtgtcatttttaagttccaaaggtctactggactaagtactatcagaccagctgtagaacctgatggcgctgatccggggtggaataaccctcagtactggtgtgtagaagatgaattgtaggcaggttttgctgatcagcagcctaaggattgatgggctctcttttggcctctgatcctgagcactatggaggcagcatcagagaatggggacctgagctacataggttctcaatgttaaaacaactctgttcggagtgacatataagagcaagaaatctacagctggtgtaaaatacctttgccttttctatcccgaaagtaacaaatggcatctgtacatgtaggggtaaaaactcagatgtctactcctccaggccatggacaagaaaaagtacagcagtcagaacagtggaacaagtgatttgcattctcttcttcacgctttcctagatctgccattggtagcgcagccctcgccctccagacataatgcatcgagcccagttgcagggaacatcactgtgtgtgtgtgatgtcatggtgttatatgtgttgagtttaatgttgagctgaagcaagttggtgaccttcctctttgctctttgtaaagaagacaccaatgtttgtcagagaaaaatccccagcagtcgtgttgaagaggcagtgtcatccacctactgtcccctttggaacagttcaactgcagaaaggtcggattgaggttttgtgctttgtcgtttttcttttttaaacaaaacatgacaaccttggcttttccgatatggaacacttttgttgttgtggagttccctcttgctgtatcttctatgcaattccttttctaaaaaaaccccccggcagaggcagagtgccctccggatatctgtccggcgccttgctgagtggtggaggtgagggataccagctccgggtgtgcctcttttctctccctggctgccaatcctgattttccctgcagtccccttggtttgtaaattgcctgcatttattctgtcagccaacatgtacaaaatgtaagaaagaatttttaaacaggtaataaattatatttataagcaacaaa

SEQ ID NO: 33840 - DNA, 5293 bp, Homo sapiens
  source 1..5293: mol_type = unassigned DNA
gaggcccgggcgccgcggctcttttgtttctccgttggggccgagcccgggccctagttggagccggagtcggagtcggagtcggatccggattcggattagcagcccgggaagagtgccgtggcacaggcgccggagggagcgcgaccctcggaccccgcctggcccgcggggctgggacccggccccggcctgcccgatggggcgcgcggccccggagatgcgccctcgcccggccccgcgcccccggccccgcgcccccggcccgcccgccccggcccgcgcctccgcctgagtcccccgcgccttggcccgccaccccccgccccgcgcccccggcccgcctgcgccatggagcccggccgcggcggcacagagaccgtgggcaagttcgagttctcccgcaaggacctgatcggccacggcgccttcgcggtggtcttcaagggccgccaccgcgagaagcacgatttggaggtcgccgtcaagtgcattaacaagaagaacctcgccaagtctcagacgctgctggggaaggaaatcaaaatcctgaaggaactgaaacatgaaaacatcgtggccctgtacgacttccaggaaatggctaattctgtctacctggttatggagtactgcaacggtggggacctggccgactacctgcacgccatgcgcacgctgagcgaggacaccatcaggctcttcctgcagcagatcgcgggcgccatgcggcttctgcacagcaaaggcatcatccaccgcgacctgaaaccgcagaacatcctgctgtccaaccccgccggccgccgcgccaaccccaacagcatccgcgtcaagatcgctgacttcggcttcgcgcggtacctccagagcaacatgatggcggccacactctgcggctcccccatgtacatggcccccgaggtcatcatgtcccagcactacgacgggaaggcggacctgtggagcatcggcaccatcgtctaccagtgcctgacggggaaggcgcccttccaggccagcagcccccaggacctgcgcctgttctacgagaagaacaagacgttggtccccaccatcccccgggagacctcggccccgctgcggcagctgctcctggccctactgcaacgcaaccacaaggaccgcatggacttcgatgagttttttcatcaccctttcctcgatgccagcccctcggtcaggaaatccccacccgtgcctgtgccctcgtacccaagctcggggtccggcagcagctccagcagcagctccacctcccacctggcctccccgccgtccctgggcgagatgcagcagctgcagaagaccctggcctccccggctgacaccgctggcttcctgcacagctcccgggactctggtggcagcaaggactcttcctgtgacacagacgacttcgtcatggtccccgcgcagtttccaggtgacctggtggctgaggcgcccagtgccaaacccccgccagacagcctgatgtgcagtgggagctcactggtggcctctgcgggcttggagagccacggccggaccccatctccatccccaccctgcagcagctcccccagtccctcaggccgggctggcccgttctccagcagcaggtgcggcgcctctgtccccatcccagtccccacgcaggtgcagaactaccagcgcattgagcgaaacctgcagtcacccacccagttccaaacacctcggtcctctgccatccgcaggtcaggcagcaccagccccctgggctttgcaagggccagcccctcgccccctgcccacgctgagcatggaggcgtcctggccaggaagatgtctctgggtggaggccggccctacacgccatctcctcaagttggaaccatccctgagcggccaggctggagcgggacgccctccccacagggagctgagatgcggggtggcaggtcccctcgtccaggctcctctgcacccgagcactctccccgcacttccgggctgggctgccgcctgcacagcgcccccaacctgtctgacttgcacgtcgtccgccccaagctgcccaaaccccccacggaccccctgggagctgtgttcagcccaccacaggccagccctccccagccgtcccacggcctgcagtcctgccggaacctgcggggctcacccaagctgcccgacttcctgcagcgaaaccccctgccccccatcctgggctcccccaccaaggctgtgccctcctttgacttcccgaagacccccagctcccagaacctgctggccctcctagcccggcagggcgtggtgatgacgccccctcgaaaccggacgctgcccgacctctcggaggtgggacccttccatggtcagccgttgggccctggcctgcggccaggcgaggaccccaagggcccctttggccggtctttcagcaccagccgcctcactgacctgctccttaaggcggcgtttgggacacaagccccggacccgggcagcacggagagcctgcaggagaagcccatggagatcgcaccctcagctggctttggagggagcctgcacccaggagcccgtgctgggggcaccagcagcccttccccggtggtcttcaccgtgggctctcccccgagcgggagcacgcccccccagggcccccgcaccaggatgttctcagcgggccccactggctctgccagctcttctgcccgccacctggtgcctgggccctgcagcgaggccccagcccctgagctccctgctccaggacacggctgcagctttgccgaccccattactgcgaacctggagggggctgtgaccttcgaggcccccgacctccctgaggagaccctcatggagcaagagcacacggagatcctgcgtggcctgcgcttcacgctgctgttcgtgcagcacgtcctggagatcgcagccctgaagggcagcgccagtgaggcggcggggggccctgagtaccagctgcaggagagtgtggtggccgaccagatcagcctgctgagccgagaatggggcttcgcggaacagctggtgctgtacctgaaggtggccgagctactgtcctccggcctgcaaagtgccatcgaccagatccgggccggcaagctctgcctgtcgtccactgtgaagcaggtggtgcgcaggctgaatgagctgtacaaggccagcgtggtgtcctgccagggcctgagcctgcggctgcagcgcttcttcctggacaagcagcggctcctggaccgcattcacagcatcactgccgagaggctcatcttcagccacgctgtgcagatggtgcagtcggctgccctggacgagatgttccagcaccgtgagggctgcgtcccacgctaccacaaggccctgctgctcctggaggggctgcagcacatgctctcggaccaggccgacatcgagaacgtcaccaagtgcaagctgtgcattgagcggagactctcggcgctgctgactggcatctgtgcctgacctttctggcctggctgggccccccgtcctgccgagccctgcagagtgggctctgtgtgctggctggactcctcgggacaagcccatggcgctgatcgctggtgctgagccctgccctgggccccacggacagtcagcctgccggcctccctgcagctcacggggcagaaccagcacatctggagccacacagcttggggggtgtctcccatcttttacaggtggggatcacagaatttctgcccctccagctgcctggctcagcaggcgtgggtgccaccaccctctagccccagggcagccccggaggacaggcaagggcctgagaccactgccgactcaaagccaaagcgagctcctgcttagggaaggtcagcaggcactgtgcccaggaagagcctgcggcctcggcgtcccccagtctccaggagcctctccctccgagatacccacccagctttgtcaatcacccaagcactttatgcatatagagacagaacctggacctcaccagggactgctgggcagcgattcctggcagtggcctggtgtttgtacatacacatatgcagacacatgccagggccccccaagcccgagcaccggaccacgttgctgcccaggtctggacctcagcgggagaactggctccggggggagtggggccctgcgctagaggcagaggcagttctttgttcaagcgttcctctggggaccggcagcagaggcaccgtgttctctcagccctggatacgtcttgtaatctttcacactttattcctaaaacgtgtcttatttttatgcagctcattttttctttaaaggagaaaacttgtaggtgtttaagaattggttttgggagggcgaggactgggccaggttagaggcagatggcacaggggcgtgtggcgggcgggtgaggctgctttgcacacctgtgttggtggctgtcccctgccgcccctccctgtggcagcagcaggacaggtgtgtgcccagcaccctccctacctgggcctggaagcagatgaggggaatacttcatgcaaagaaaaaagtaacatgtgcaaaagctccccgtccagctttgacagtcagttttgatgtcagctcctcggcagggtaggcctgatgacagccctgtccctccctgcctctgccttgcccaaggccacggagggcatctgcagagaggcctgccttccggattccaggcgggcatgccctgcaaaccccgcctgggcctcccttggtctgcccagccctcgattagccctgcctgaatcagtagatacttgaacgagtccccagtctgcgggaggcagtggtggggccatggacccatgcggggggttccagggtcacacgccacataacagacaaaaatacacacacgtgtgtttttctttgcaatacttgaaatattgccactgtgcttggacttagaagaagaaaatccccgtgacttcttcctcatcaccttgatggctttattctcaccttgtggggcatgtttgtatttattgcttcatggccgactggaatcctgagtcctgggaagctggcactgcggggatcttgcccggtgtcctggtcctcttgcttccgtcgcggccgcatgtgcgtgtgtccaagcaggtcctgggcgcctcaactgctgcccctggttgaatgttctcttgatagtgctggaccctttgtctattttaaagcgaattttgtgtgatttcctgccctttgcgttatattgtataataccaacgtaaggaaataaacctttggaattgtt

SEQ ID NO: 33841 - DNA, 1631 bp, Homo sapiens
  source 1..1631: mol_type = unassigned DNA
agaatgcaaagaaatggatcagctagccgagggttggagaagaccaggctgaggctgtgtcgggaagccaggattccagaatcagcattcctcactggcctcacaagggaaagctgggaagcccggtgctggtgtgcaaaggacactcgtgaagtggtagccataaagtgtgtagccaagaaaagtctgaacaaggcatcggtggagaacctcctcacggagattgagatcctcaagggcattcgacatccccacattgtgcagctgaaagactttcagtgggacagtgacaatatctacctcatcatggagttttgcgcagggggcgacctgtctcgcttcatccatacccgcaggattctgcctgagaaggtggcgcgtgtcttcatgcagcaattagctagcgccctgcaattcctgcatgaacggaatatctctcacctggatctgaagccacagaacattctactgagctccttggagaagccccacctaaaactggcagactttggtttcgcacaacacatgtccccgtgggatgagaagcacgtgctccgtggctcccccctctacatggcccccgagatggtgtgccagcggcagtatgacgcccgcgtggacctctggtccatgggggtcatcctgtatgaagccctcttcgggcagcccccctttgcctccaggtcgttctcggagctggaagagaagatccgtagcaaccgggtcatcgagctccccttgcggcccctgctctcccgagactgccgggacctactgcagcggctcctggagcgggaccccagccgtcgcatctccttccaggacttttttgcgcacccctgggtggacctggagcacatgcccagtggggagagtctggggcgagcaaccgccctggtggtgcaggctgtgaagaaagaccaggagggggattcagcagctgccttatcactctactgcaaggctctggacttctttgtacctgccctgcactatgaagtggatgcccagcggaaggaggcaattaaggcaaaggtggggcagtacgtgtcccgggctgaggagctcaaggccatcgtctcctcttccaatcaggccctgctgaggcaggggacctctgcccgagacctgctcagagagatggcccgggacaagccacgcctcctagctgccctggaagtggcttcagctgccatggccaaggaggaggccgccggcggggagcaggatgccctggacctgtaccagcacagcctgggggagctactgctgttgctggcagcggagcccccgggccggaggcgggagctgcttcacactgaggttcagaacctcatggcccgagctgaatacttgaaggagcaggtcaagatgagggaatctcgctgggaagctgacaccctggacaaagagggactgtcggaatctgttcgtagctcttgcacccttcagtgaccctagaagaatgattggacagtgctgagacccccatatcccagagtccccagcctccctcaggttactctgcaccccacagatggtttgatggctgtgctgtatactggaggggagggcaggactctgggagaacagcacttctttcatgagacctttgttactcggtggttact

SEQ ID NO: 33842 - DNA, 2635 bp, Homo sapiens
  source 1..2635: mol_type = unassigned DNA
cggcgctgggggcagcgtggagccacccagtgctcggcccgccccgcaacccgccggaaccgccgcccgcagcgaggaagcgcccgcgcgggcgcaggcggccggaatggcggggcccggctggggtcccccgcgcctggacggcttcatcctcaccgagcgcctgggcagcggcacgtacgccacggtgtacaaggcctacgccaagaaggacactcgtgaagtggtagccataaagtgtgtagccaagaaaagtctgaacaaggcatcggtggagaacctcctcacggagattgagatcctcaagggcattcgacatccccacattgtgcagctgaaagactttcagtgggacagtgacaatatctacctcatcatggagttttgcgcagggggcgacctgtctcgcttcatccatacccgcaggattctgcctgagaaggtggcgcgtgtcttcatgcagcaattagctagcgccctgcaattcctgcatgaacggaatatctctcacctggatctgaagccacagaacattctactgagctccttggagaagccccacctaaaactggcagactttggtttcgcacaacacatgtccccgtgggatgagaagcacgtgctccgtggctcccccctctacatggcccccgagatggtgtgccagcggcagtatgacgcccgcgtggacctctggtccatgggggtcatcctgtatgaagccctcttcgggcagcccccctttgcctccaggtcgttctcggagctggaagagaagatccgtagcaaccgggtcatcgagctccccttgcggcccctgctctcccgagactgccgggacctactgcagcggctcctggagcgggaccccagccgtcgcatctccttccaggacttttttgcgcacccctgggtggacctggagcacatgcccagtggggagagtctggggcgagcaaccgccctggtggtgcaggctgtgaagaaagaccaggagggggattcagcagctgccttatcactctactgcaaggctctggacttctttgtacctgccctgcactatgaagtggatgcccagcggaaggaggcaattaaggcaaaggtggggcagtacgtgtcccgggctgaggagctcaaggccatcgtctcctcttccaatcaggccctgctgaggcaggggacctctgcccgagacctgctcagagagatggcccgggacaagccacgcctcctagctgccctggaagtggcttcagctgccatggccaaggaggaggccgccggcggggagcaggatgccctggacctgtaccagcacagcctgggggagctactgctgttgctggcagcggagcccccgggccggaggcgggagctgcttcacactgaggttcagaacctcatggcccgagctgaatacttgaaggagcaggtcaagatgagggaatctcgctgggaagctgacaccctggacaaagagggactgtcggaatctgttcgtagctcttgcacccttcagtgaccctagaagaatgattggacagatgtgagccatctggagcagaggggcactaacccaggctgacgccaagaatgaagtggcccactgcagccctggcgagcaggcttcttggatggacagtgctgagacccccatatcccagagtccccagcctccctcaggttactctgcaccccacagatggtttgatggctgtgctgtatactggaggggagggcaggactctgggagaacagcacttctttcatgagacctttgttactcggtggttactgggtcctgtgcctgtccgttttggggcatgcagccctctatcatttttggctccgagaagagggcaaggggcccccgcagggtacttctgtgcttgccctcgccctgccagcaggcagctgtgcccctggcctgcccttcccgggaccccttattccaactcagctcctctttgcactggaatggggcactccaacacccctcagggaccaccctccccacagtatgcactcagccccacagaacccaccagtctttctgggaactcacacctgcccgccatcttggtactttaggttaatccctcaagcatgaaagctggatcttttggggtttaagaagcccaagccttgttcctgccctggcctagggagcactcaggagggttccttggtcctcatctctcccacctccgttccctctgggccccacactagccacagcgcgggccttgtgctggagtttgagcctgggacagggagagggaggcttggagacagtctgacccagtgccctctaggccacccacttctaggcctgccctgccgccgtggagccctgggcaagctctttcccctttctgggcctgggtctccccatctcttcaatggggctgataccttcacagcccacagcatgggcacttatgaggacaaagtgaatttaacctggaaaagaatgtatttgagagtttcttttaaataatcagcgggtgttggtgatttgtagcccttctgcccttaaatgcttccttgggcaagagctgtctgtcctccctgcaggaggctgagtgtaaagagtatcattcattgtttctctattaaattattttctcta

SEQ ID NO: 33843 - DNA, 10702 bp, Homo sapiens
  source 1..10702: mol_type = unassigned DNA
gggtcctgcagtaggactcccgggagccaccattatggtgaagaggaagagctccgagggccaggagcaggacggcggccgcggcatccccctgcccatccagaccttcctgtggcggcaaaccagtgcatttttgaggcccaaactggggaagcaatatgaagcttcttgtgtgtcctttgagcgagtgttggtagaaaacaagctgcatggcctctctccagctctctctgaagccatccagagcatttccagatgggaactggtgcaagctgctttgcctcatgtcctccactgcactgcaaccctgctttcaaaccgaaacaagctaggccaccaggataaattgggtgttgctgagacaaagctccttcacactctacactggatgcttctggaggccccccaggactgcaacaatgagcggtttgggggtacagaccgaggctccagctggggtggaagcagcagtgctttcatccaccaggttgaaaaccagggttctccagggcagccttgccaaagcagctctaatgacgaagaagagaacaaccgaagaaagatcttccagaactccatggctactgtggagctcttcgtgtttctgtttgctcccctggtacacaggatcaaggaatctgacctcaccttccgtctggccagtgggcttgttatatggcagcccatgtgggaacacagacagcccggagtctctggctttaccgcactggtgaagcccatcaggaacatcattacagctaagagaagttctcctatcaacagtcaaagccggacctgtgaatcaccaaatcaagatgcaagacacttagagggactccaggtggtttgtgaaacattccagtctgattccatctcacccaaggccaccatttcaggctgtcaccgaggaaactcctttgatggaagtctgtcctcccaaacttcccaggaaagaggcccatcacattccagggcctctcttgtgatacctccgtgccaaaggtcccgctatgccacctactttgacgttgctgttctgcgctgcctacttcagccccattggtctgaggaaggcactcagtggtctctgatgtactatctacaaaggctgcgacacatgttggaagagaagccagaaaagcctccggagccagatattcctctcctgcccagacccaggagtagctccatggtggcagcagctccctcactagtgaacacccacaaaacccaagatctcaccatgaagtgtaacgaggaggaaaaatctcttagctctgaggccttttccaaggtttcactgaccaatctgcgtagatctgcagtcccagatctttcttcagacctgggcatgaatatttttaaaaagttcaagagccgcaaagaagaccgagagaggaaaggctccattccattccaccacacaggcaagaggaggccacggagaatgggagtgcccttcctgcttcacgaggaccacctggatgtgtcccccacgcgcagcacattctcctttggaagtttctctgggctgggagaagacaggcgaggaattgagaaaggaggctggcaaaccaccattttagggaaattgacccggcgaggcagttcagatgcagccactgagatggagagtctgagcgccaggcattcccactcccatcacaccctggtaagcgacctgccggacccctccaacagccatggagaaaacaccgtcaaggaagtgcgatctcagatctccaccatcacagttgcgaccttcaataccactttggcgtcattcaacgtaggctatgcagactttttcaatgagcatatgaggaaactctgcaaccaggtgcctatcccggagatgccacatgaacctctggcatgtgctaacctacctcgaagcctcacagactcctgcataaactacagctacctagaggacacagaacatattgacgggaccaataactttgtccacaagaatggaatgcttgatctttctgtagttctgaaggctgtttatcttgtccttaatcatgacatcagctctcgtatctgtgacgtggcgctaaacattgtggaatgcttgcttcaacttggtgtggtgccctgtgtagaaaagaatagaaagaagagtgaaaacaaggaaaatgagaccttggaaaagaggccaagtgagggagctttccaattcaaaggagtatctggaagttccacctgtggattcggaggccctgctgttagtggagctggagatggtggaggagaagaaggaggaggtggagatggaggaggtggaggaggtgatggaggaggaggtggaggaggtggaggcggcccttatgagaagaatgataagaaccaagagaaggatgaaagtacacctgtaagcaaccataggcttgctctaacaatgctcatcaaaatagtgaagtctttgggatgtgcctatggttgtggtgaaggacaccgagggctctctggagatcgtctgagacaccaggcccagaactgcctcactaagctatacaagctagataagatgcagttccgacaaaccatgagggactatgtgaacaaggactctctcaataatgtagtggacttcttgcatgctttgctaggattttgtatggagccggtcactgacaacaaggctgggtttggaaataacttcaccacagtggacaacaaatccacagcccaaaatgtggaaggcattatcgtcagcgccatgtttaaatccctcatcacacgctgcgcttcaaccacacatgaattgcacagccctgagaatctgggactgtattgtgacattcgtcagctggtccagtttatcaaagaggctcatgggaatgtcttcaggagagtggccctcagcgctctgcttgacagtgccgagaagttagcaccagggaaaaaggtggaggagaatgaacaggaatctaagcctgcaggcagtaaaaggtcagaggcgggaagcattgtggataaaggccaggtatcctctgcacctgaggaatgtcgcagcttcatgtctggtcgcccctcacagactccagagcacgatgaacaaatgcaaggagccaacttggggcggaaagatttctggcgtaagatgttcaagtcccagagtgcagcaagtgacaccagcagccagtctgaacaggacacttcagaatgcacgactgcccactcagggaccacctctgaccgacgtgcccgctcacgatcccgcagaatttccctccgaaagaagcttaaactccccataggtaaaaggaactggctgaagagatcatccctctcaggcctggcagatggtgtggaggacctcctggacattagctctgtggaccgactctctttcatcaggcaaagctccaaggtcaaattcactagtgctgtgaagctttctgaaggtgggccaggaagtggcatggaaaatggaagagatgaagaggagaatttcttcaagcgtcttggttgccacagttttgatgatcatctctctcccaaccaagatggtggaaaaagcaaaaacgtggtgaatcttggagcaatccgacaaggcatgaaacgcttccaatttctgttaaactgctgtgagccagggacaattcctgatgcctccatcctagcagctgccttggatctagaagcccctgtggtggccagagcagccttgttcctggaatgtgctcgttttgttcaccgctgcaaccgtggcaactggccagagtggatgaaagggcaccacgtgaacatcaccaagaaaggactttcccggggacgctctcccattgtgggcaacaagcgaaaccagaagctgcagtggaatgcagccaagctcttctaccaatggggagacgcaattggcgtccgattgaatgagctgtgccacggggaaagtgagagcccagccaacctgctgggtctcatttacgatgaagagaccaagaggagacttagaaaggaggatgaggaggaagactttttagatgacagtactgtgaacccctctaaatgcggttgcccctttgccttgaagatggcagcatgtcagcttcttctggagattaccaccttcctgcgagagaccttttcttgcctgcccagacctcgcactgagcctctggtggacttggagagctgcagacttcgtttggatcccgagttggaccggcacagatatgagaggaagatcagctttgctggggtcctggacgaaaatgaagactcaaaagattctctccacagcagcagccacactctcaaatcagatgcaggagtcgaggagaagaaagaagggagtccttggagtgcaagcgagcccagcattgagccagagggaatgagtaatgccggcgcggaggagaattaccacagaaacatgtcgtggcttcatgtgatgatcttgctgtgcaatcagcagagtttcatctgcactcacgttgactactgccatccccactgctacctgcaccacagccgctcctgtgcccgactggtcagagccatcaagctactctatggagacagtgtggactccctgagggaaagcagcaacatcagcagtgtggctctccggggcaagaaacagaaagaatgctcagataagtcatgcctgaggacaccttctctaaagaagagagtttcagatgccaatctggaaggaaaaaaagattccggaatgctgaagtacatcagacttcaggtgatgagcttgtcgcctgctcccttatctctgttaatcaaggcagcaccaattctgacagaggagatgtacggagacatccagccagctgcctgggagctcctgctcagcatggatgagcacatggcaggggcagcagctgccatgttcctgctgtgtgcagtgaaggtgcctgaggccgtgtccgacatgctgatgtcagagttccaccacccggagactgtgcagaggctgaacgctgtcctcaagttccacacgctctggaggtttcgctatcaggtctggccccggatggaggaaggggcacagcagatttttaagattccgcctcccagtatcaatttcacccttccctcgccggtgcttggaatgccatccgtcccaatgtttgacccaccgtgggttcctcagtgcagcgggagtgtccaggaccccattaatgaagaccagtctaaatccttttcagcccgggctgtgtcccgctcccatcaaagggcagaacacatcttaaagaacttgcagcaggaggaagaaaagaaacgacttggtagagaagccagcctcatcactgccatccccatcacccaggaggcttgctatgagcccacatgcacgcccaactcagaaccggaagaagaagtagaagaagtcaccaatctggcatcccgtcgactgtctgtgagtccatcctgcacctccagcacttcccacaggaattattccttccgccgcgggtcagtctggtcagtgcgttcagccgtcagtgctgaagatgaggaacataccactgaacacacgccgaaccaccatgtgcctcagcccccacaagcagtgttcccagcatgcatctgtgcagcagtacttcccattgttcatctgatggaggatggtgaggtgcgggaagatggagtagcagtgagtgctgtggctcaacaagtcttatggaactgtctaattgaagatccatcaacggttcttcgacattttctggaaaaactgaccatcagcaatagacaagatgagttaatgtacatgctgcgcaaacttctcttgaatattggagactttcctgctcagacatctcacatcctattcaactatttggtaggattaatcatgtactttgtgcggaccccctgcgagtgggggatggatgccatttcagccaccctgacattcctgtgggaggtggtgggttacgtggagggcctcttcttcaaggatctcaagcagacgatgaagaaggagcagtgtgaggtgaagctcctggtgaccgcttcaatgccaggtactaaaaccttggtagttcatggacagaatgagtgcgatatcccaacccagttaccagtccatgaagacactcaatttgaagccctgttgaaggagtgtctggagttttttaatatcccagaatcccagtcaacacattattttcttatggataaacgatggaaccttatccactacaataagacctatgttcgagatatttatcctttccggaggtcagtatctccccagctgaatcttgtacatatgcatccagagaagggacaggagctcattcagaaacaggtgttcacccgaaagctggaagaagtagggcgggtgttgtttctcatctccctaacccagaagatccccacagcccacaaacagtcccacgtctccatgcttcaggaagacctcctccgcctgccctcattccctcgtagtgctattgatgctgagttttcactcttcagtgatcctcaagctggaaaggaactgtttggcctcgacactcttcagaaaagcttgtggatccagctgctggaggaaatgttcctgggcatgccgagcgagtttccatggggagacgaaatcatgcttttcctcaacgtttttaacggggctctgatcctccacccggaagacagtgccctgctcaggcagtatgctgccaccgtcatcaacaccgcggtgcacttcaaccacctcttctctctcagcggctaccagtggattctccccaccatgctgcaggtgtactccgactatgaaagcaatccccagctgcgtcaagccatcgaatttgcctgtcaccagttctatattctacaccggaagccctttgtgctccagctgtttgctagtgtggcccctctcctggaatttcctgatgctgccaataatgggcccagcaaaggtgtgtcagctcagtgcctgtttgacttgctgcagtccctagagggagagaccaccgacatattagacatcttagagctggtcaaagctgagaagcctctcaagtcattagatttctgctatggaaacgaagatctgacattttctatcagtgaagccattaagctctgtgtcactgtggtggcgtatgctcccgaatcattcagaagtcttcagatgctgatggtcttagaagccttagttccatgttacctacaaaagctaaagaggcagacatcacaggtggagacagtacctgctgcccgagaggagattgcggccactgctgctcttgcgacgtccctacaggcccttttgtacagtgtagaggtcctcaccaggcccatgacagccccacagatgagcaggtgtgaccaaggtcataagggaaccaccacagccaatcacaccatgtcgtctggggtgaacaccaggtaccaggaacaaggagccaaactgcactttatcagggaaaaccttcatttactggaggaagggcaaggcattcccagagaggaactggatgaacgaattgctcgggaagagttcagaagaccccgggagtccttactgaatatttgcactgagttctataagcactgtgggccacggctgaagatcttgcaaaatctggctggggagcctcgggtcattgccttggaactgctggatgtgaagtctcacatgaggttggcagaaattgcacactcccttctgaagctggcaccatatgacactcagacaatggagagtcgtgggcttcggcgctacatcatggagatgctacccattactgactggacagctgaggcagtgaggccggccctcatcctcattttaaaaagattggatagaatgttcaacaaaattcataagatgcctactttgaggcgacaggttgagtgggagcctgccagcaatttgattgaaggggtttgtttgacacttcagaggcagccaatcatatccttcctgcctcaccttaggtcactgatcaatgtctgtgtcaatctggtgatgggagtggtaggaccttccagtgttgctgatggattaccccttcttcatctcagcccttatctctcaccacctctgcccttcagcacagctgttgtccggcttgtagcattgcagatacaggctttaaaagaagattttcctttaagccatgtgatctccccattcaccaatcaagagcgaagggaggggatgcttttaaatctgctcatcccatttgtgctcacagtaggatctggaagcaaagatagcccatggctggagcagcctgaggtgcagctgctgctgcagacagtcatcaatgtactcctcccaccgcggatcatcagcacatccaggagcaagaacttcatgttagagagctccccagcccactgctccacccctggggatgcggggaaagacttgcgcagggaagggctggctgagtccaccagccaagcagcatacttggcgctgaaggtgattctcgtctgctttgagaggcagctcggaagccagtggtactggctgagcctccaggtgaaggagatggctctgcggaaggtgggaggcctggccctttgggatttcctcgacttcatcgtgcggacccgaatacccatctttgtgcttttgcgccctttcatccagtgcaagctgctggcccaaccagcagagaatcatgaagagctttccgcccggcaacatattgccgaccagctggagcggcgcttcataccacgccctttgtgtaagagctcgctcattgctgagttcaacagtgaactaaaaattctaaaagaggcagttcatagtggatcagcctaccaaggcaagacatccatcagtaccgtgggcacctccacctctgcttaccgcctgagcttggccaccatgtcccgctctaacacgggcacgggcactgtctgggagcaggacagtgagccatcccagcaggcttcgcaggacaccctgagtcggactgatgaggaagatgaggaaaatgactctataagcatgcccagcgtggtaagtgaacaagaagcttacctcctgagtgccattggaaggaggcgattctccagccatgtctccagcatgtctgtacctcaggctgaggtgggcatgctacccagccagagggtggcaagtatacagagtgaacctggtcaacagaacctccttgttcagcagccgctggggaggaagaggggcctgaggcagctaagacgtcctctactatcacgtcagaaaactcagactgaacccagaaatcgccaaggggctcggctgtcaaccactcgcaggagcattcaacctaaaacgaagccgtctgcggatcagaaacgatctgtgaccttcattgaggctcagccagagccagcagctgccccaacagatgcgcttcctgcaacaggccaactacagggctgtagcccagccccttctaggaaaccagaagcaatggacgaaccagtcctcacatcttctcccgccatagttgttgcggatctccacagcgtgtctcccaagcagagtgagaacttccccactgaagaaggagaaaaggaggaggacacagaagcacaaggtgctactgcacacagtccactctctgcccaactctctgaccctgatgacttcacaggcctcgagacatccagcctcctacagcatggagacactgtccttcatatcagtgaggaaaatggcatggagaacccgctactatctagtcagttcacctttactcccactgagctggggaaaacggatgcagtattagatgagtctcatgtttaattctgtatcttgtaagctctgcaggtatagagaagacatgaaagtgatctctctactacaagttcaatacttttgcttgaaaaagattaattacaaaatagcactttacttctaatgggtggcacaaatctgaataggttttgctgccaatacacatgatgtttcataaacatcttaaaagtcaatggctaaaaggatttagttgtgtgaaaatcacaaaaccagggaggaataaggggaaagagccatttcactgcacattgtttatgattcaagaagccttcagcagttaaaaatatatactattcattgctgctttcatagaaatattaacaaatgatatgatctaaaaatagaatgcaattttttgagattactcacattatacatctcatgcaaatatttatttttatagtttaaaaaatatcaattcaggttggctatacaagtagcaatttacataaaaaaataattaataggaaaaatattactttggggagactaaataacaagcctgcagccatttttgttttgagtaacaatacagccatttagaagaagaaaaaaatactatatagagagctgtggacttttagatatttatttttcaactatcattttcattgcatgttgtaaatcaaaatgcagatggcataagatcatcccatttcataatctatcacattagaatattacagaatattctagaaatcatcagaaataattctgaattaagaacctaaacagcctatacaattataaaaactaaatgtatatataatcacttaaaagagatggtattcctattcctagccctgactacatcaataccaagattagaagctattggaaaatgtgattagtaatacttttccttatagtatcctgtgcctgccctggagggcatattttcagatattaaggttagtgttgttagaatcggtttaataaaataacattttc

SEQ ID NO: 33844 - DNA, 13562 bp, Homo sapiens
  source 1..13562: mol_type = unassigned DNA
agcagcgggaggaggcggcggcggcggctagcgaggagacagagctgggtcctgcagtaggactcccgggagccaccattatggtgaagaggaagagctccgagggccaggagcaggacggcggccgcggcatccccctgcccatccagaccttcctgtggcggcaaaccagtgcatttttgaggcccaaactggggaagcaatatgaagcttcttgtgtgtcctttgagcgagtgttggtagaaaacaagctgcatggcctctctccagctctctctgaagccatccagagcatttccagatgggaactggtgcaagctgctttgcctcatgtcctccactgcactgcaaccctgctttcaaaccgaaacaagctaggccaccaggataaattgggtgttgctgagacaaagctccttcacactctacactggatgcttctggaggccccccaggactgcaacaatgagcggtttgggggtacagaccgaggctccagctggggtggaagcagcagtgctttcatccaccaggttgaaaaccagggttctccagggcagccttgccaaagcagctctaatgacgaagaagagaacaaccgaagaaagatcttccagaactccatggctactgtggagctcttcgtgtttctgtttgctcccctggtacacaggatcaaggaatctgacctcaccttccgtctggccagtgggcttgttatatggcagcccatgtgggaacacagacagcccggagtctctggctttaccgcactggtgaagcccatcaggaacatcattacagctaagagaagttctcctatcaacagtcaaagccggacctgtgaatcaccaaatcaagatgcaagacacttagagggactccaggtggtttgtgaaacattccagtctgattccatctcacccaaggccaccatttcaggctgtcaccgaggaaactcctttgatggaagtctgtcctcccaaacttcccaggaaagaggcccatcacattccagggcctctcttgtgatacctccgtgccaaaggtcccgctatgccacctactttgacgttgctgttctgcgctgcctacttcagccccattggtctgaggaaggcactcagtggtctctgatgtactatctacaaaggctgcgacacatgttggaagagaagccagaaaagcctccggagccagatattcctctcctgcccagacccaggagtagctccatggtggcagcagctccctcactagtgaacacccacaaaacccaagatctcaccatgaagtgtaacgaggaggaaaaatctcttagctctgaggccttttccaaggtttcactgaccaatctgcgtagatctgcagtcccagatctttcttcagacctgggcatgaatatttttaaaaagttcaagagccgcaaagaagaccgagagaggaaaggctccattccattccaccacacaggcaagaggaggccacggagaatgggagtgcccttcctgcttcacgaggaccacctggatgtgtcccccacgcgcagcacattctcctttggaagtttctctgggctgggagaagacaggcgaggaattgagaaaggaggctggcaaaccaccattttagggaaattgacccggcgaggcagttcagatgcagccactgagatggagagtctgagcgccaggcattcccactcccatcacaccctggtaagcgacctgccggacccctccaacagccatggagaaaacaccgtcaaggaagtgcgatctcagatctccaccatcacagttgcgaccttcaataccactttggcgtcattcaacgtaggctatgcagactttttcaatgagcatatgaggaaactctgcaaccaggtgcctatcccggagatgccacatgaacctctggcatgtgctaacctacctcgaagcctcacagactcctgcataaactacagctacctagaggacacagaacatattgacgggaccaataactttgtccacaagaatggaatgcttgatctttctgtagttctgaaggctgtttatcttgtccttaatcatgacatcagctctcgtatctgtgacgtggcgctaaacattgtggaatgcttgcttcaacttggtgtggtgccctgtgtagaaaagaatagaaagaagagtgaaaacaaggaaaatgagaccttggaaaagaggccaagtgagggagctttccaattcaaaggagtatctggaagttccacctgtggattcggaggccctgctgttagtggagctggagatggtggaggagaagaaggaggaggtggagatggaggaggtggaggaggtgatggaggaggaggtggaggaggtggaggcggcccttatgagaagaatgataagaaccaagagaaggatgaaagtacacctgtaagcaaccataggcttgctctaacaatgctcatcaaaatagtgaagtctttgggatgtgcctatggttgtggtgaaggacaccgagggctctctggagatcgtctgagacaccaggtattccgagagaatgcccagaactgcctcactaagctatacaagctagataagatgcagttccgacaaaccatgagggactatgtgaacaaggactctctcaataatgtagtggacttcttgcatgctttgctaggattttgtatggagccggtcactgacaacaaggctgggtttggaaataacttcaccacagtggacaacaaatccacagcccaaaatgtggaaggcattatcgtcagcgccatgtttaaatccctcatcacacgctgcgcttcaaccacacatgaattgcacagccctgagaatctgggactgtattgtgacattcgtcagctggtccagtttatcaaagaggctcatgggaatgtcttcaggagagtggccctcagcgctctgcttgacagtgccgagaagttagcaccagggaaaaaggtggaggagaatgaacaggaatctaagcctgcaggcagtaaaaggtcagaggcgggaagcattgtggataaaggccaggtatcctctgcacctgaggaatgtcgcagcttcatgtctggtcgcccctcacagactccagagcacgatgaacaaatgcaaggagccaacttggggcggaaagatttctggcgtaagatgttcaagtcccagagtgcagcaagtgacaccagcagccagtctgaacaggacacttcagaatgcacgactgcccactcagggaccacctctgaccgacgtgcccgctcacgatcccgcagaatttccctccgaaagaagcttaaactccccataggtaaaaggaactggctgaagagatcatccctctcaggcctggcagatggtgtggaggacctcctggacattagctctgtggaccgactctctttcatcaggcaaagctccaaggtcaaattcactagtgctgtgaagctttctgaaggtgggccaggaagtggcatggaaaatggaagagatgaagaggagaatttcttcaagcgtcttggttgccacagttttgatgatcatctctctcccaaccaagatggtggaaaaagcaaaaacgtggtgaatcttggagcaatccgacaaggcatgaaacgcttccaatttctgttaaactgctgtgagccagggacaattcctgatgcctccatcctagcagctgccttggatctagaagcccctgtggtggccagagcagccttgttcctggaatgtgctcgttttgttcaccgctgcaaccgtggcaactggccagagtggatgaaagggcaccacgtgaacatcaccaagaaaggactttcccggggacgctctcccattgtgggcaacaagcgaaaccagaagctgcagtggaatgcagccaagctcttctaccaatggggagacgcaattggcgtccgattgaatgagctgtgccacggggaaagtgagagcccagccaacctgctgggtctcatttacgatgaagagaccaagaggagacttagaaaggaggatgaggaggaagactttttagatgacagtactgtgaacccctctaaatgcggttgcccctttgccttgaagatggcagcatgtcagcttcttctggagattaccaccttcctgcgagagaccttttcttgcctgcccagacctcgcactgagcctctggtggacttggagagctgcagacttcgtttggatcccgagttggaccggcacagatatgagaggaagatcagctttgctggggtcctggacgaaaatgaagactcaaaagattctctccacagcagcagccacactctcaaatcagatgcaggagtcgaggagaagaaagaagggagtccttggagtgcaagcgagcccagcattgagccagagggaatgagtaatgccggcgcggaggagaattaccacagaaacatgtcgtggcttcatgtgatgatcttgctgtgcaatcagcagagtttcatctgcactcacgttgactactgccatccccactgctacctgcaccacagccgctcctgtgcccgactggtcagagccatcaagctactctatggagacagtgtggactccctgagggaaagcagcaacatcagcagtgtggctctccggggcaagaaacagaaagaatgctcagataagtcatgcctgaggacaccttctctaaagaagagagtttcagatgccaatctggaaggaaaaaaagattccggaatgctgaagtacatcagacttcaggtgatgagcttgtcgcctgctcccttatctctgttaatcaaggcagcaccaattctgacagaggagatgtacggagacatccagccagctgcctgggagctcctgctcagcatggatgagcacatggcaggggcagcagctgccatgttcctgctgtgtgcagtgaaggtgcctgaggccgtgtccgacatgctgatgtcagagttccaccacccggagactgtgcagaggctgaacgctgtcctcaagttccacacgctctggaggtttcgctatcaggtctggccccggatggaggaaggggcacagcagatttttaagattccgcctcccagtatcaatttcacccttccctcgccggtgcttggaatgccatccgtcccaatgtttgacccaccgtgggttcctcagtgcagcgggagtgtccaggaccccattaatgaagaccagtctaaatccttttcagcccgggctgtgtcccgctcccatcaaagggcagaacacatcttaaagaacttgcagcaggaggaagaaaagaaacgacttggtagagaagccagcctcatcactgccatccccatcacccaggaggcttgctatgagcccacatgcacgcccaactcagaaccggaagaagaagtagaagaagtcaccaatctggcatcccgtcgactgtctgtgagtccatcctgcacctccagcacttcccacaggaattattccttccgccgcgggtcagtctggtcagtgcgttcagccgtcagtgctgaagatgaggaacataccactgaacacacgccgaaccaccatgtgcctcagcccccacaagcagtgttcccagcatgcatctgtgcagcagtacttcccattgttcatctgatggaggatggtgaggtgcgggaagatggagtagcagtgagtgctgtggctcaacaagtcttatggaactgtctaattgaagatccatcaacggttcttcgacattttctggaaaaactgaccatcagcaatagacaagatgagttaatgtacatgctgcgcaaacttctcttgaatattggagactttcctgctcagacatctcacatcctattcaactatttggtaggattaatcatgtactttgtgcggaccccctgcgagtgggggatggatgccatttcagccaccctgacattcctgtgggaggtggtgggttacgtggagggcctcttcttcaaggatctcaagcagacgatgaagaaggagcagtgtgaggtgaagctcctggtgaccgcttcaatgccaggtactaaaaccttggtagttcatggacagaatgagtgcgatatcccaacccagttaccagtccatgaagacactcaatttgaagccctgttgaaggagtgtctggagttttttaatatcccagaatcccagtcaacacattattttcttatggataaacgatggaaccttatccactacaataagacctatgttcgagatatttatcctttccggaggtcagtatctccccagctgaatcttgtacatatgcatccagagaagggacaggagctcattcagaaacaggtgttcacccgaaagctggaagaagtagggcgggtgttgtttctcatctccctaacccagaagatccccacagcccacaaacagtcccacgtctccatgcttcaggaagacctcctccgcctgccctcattccctcgtagtgctattgatgctgagttttcactcttcagtgatcctcaagctggaaaggaactgtttggcctcgacactcttcagaaaagcttgtggatccagctgctggaggaaatgttcctgggcatgccgagcgagtttccatggggagacgaaatcatgcttttcctcaacgtttttaacggggctctgatcctccacccggaagacagtgccctgctcaggcagtatgctgccaccgtcatcaacaccgcggtgcacttcaaccacctcttctctctcagcggctaccagtggattctccccaccatgctgcaggtgtactccgactatgaaagcaatccccagctgcgtcaagccatcgaatttgcctgtcaccagttctatattctacaccggaagccctttgtgctccagctgtttgctagtgtggcccctctcctggaatttcctgatgctgccaataatgggcccagcaaaggtgtgtcagctcagtgcctgtttgacttgctgcagtccctagagggagagaccaccgacatattagacatcttagagctggtcaaagctgagaagcctctcaagtcattagatttctgctatggaaacgaagatctgacattttctatcagtgaagccattaagctctgtgtcactgtggtggcgtatgctcccgaatcattcagaagtcttcagatgctgatggtcttagaagccttagttccatgttacctacaaaagctaaagaggcagacatcacaggtggagacagtacctgctgcccgagaggagattgcggccactgctgctcttgcgacgtccctacaggcccttttgtacagtgtagaggtcctcaccaggcccatgacagccccacagatgagcaggtgtgaccaaggtcataagggaaccaccacagccaatcacaccatgtcgtctggggtgaacaccaggtaccaggaacaaggagccaaactgcactttatcagggaaaaccttcatttactggaggaagggcaaggcattcccagagaggaactggatgaacgaattgctcgggaagagttcagaagaccccgggagtccttactgaatatttgcactgagttctataagcactgtgggccacggctgaagatcttgcaaaatctggctggggagcctcgggtcattgccttggaactgctggatgtgaagtctcacatgaggttggcagaaattgcacactcccttctgaagctggcaccatatgacactcagacaatggagagtcgtgggcttcggcgctacatcatggagatgctacccattactgactggacagctgaggcagtgaggccggccctcatcctcattttaaaaagattggatagaatgttcaacaaaattcataagatgcctactttgaggcgacaggttgagtgggagcctgccagcaatttgattgaaggggtttgtttgacacttcagaggcagccaatcatatccttcctgcctcaccttaggtcactgatcaatgtctgtgtcaatctggtgatgggagtggtaggaccttccagtgttgctgatggattaccccttcttcatctcagcccttatctctcaccacctctgcccttcagcacagctgttgtccggcttgtagcattgcagatacaggctttaaaagaagattttcctttaagccatgtgatctccccattcaccaatcaagagcgaagggaggggatgcttttaaatctgctcatcccatttgtgctcacagtaggatctggaagcaaagatagcccatggctggagcagcctgaggtgcagctgctgctgcagacagtcatcaatgtactcctcccaccgcggatcatcagcacatccaggagcaagaacttcatgttagagagctccccagcccactgctccacccctggggatgcggggaaagacttgcgcagggaagggctggctgagtccaccagccaagcagcatacttggcgctgaaggtgattctcgtctgctttgagaggcagctcggaagccagtggtactggctgagcctccaggtgaaggagatggctctgcggaaggtgggaggcctggccctttgggatttcctcgacttcatcgtgcggacccgaatacccatctttgtgcttttgcgccctttcatccagtgcaagctgctggcccaaccagcagagaatcatgaagagctttccgcccggcaacatattgccgaccagctggagcggcgcttcataccacgccctttgtgtaagagctcgctcattgctgagttcaacagtgaactaaaaattctaaaagaggcagttcatagtggatcagcctaccaaggcaagacatccatcagtaccgtgggcacctccacctctgcttaccgcctgagcttggccaccatgtcccgctctaacacgggcacgggcactgtctgggagcaggacagtgagccatcccagcaggcttcgcaggacaccctgagtcggactgatgaggaagatgaggaaaatgactctataagcatgcccagcgtggtaagtgaacaagaagcttacctcctgagtgccattggaaggaggcgattctccagccatgtctccagcatgtctgtacctcaggctgaggtgggcatgctacccagccagagtgaacctaatgtcctcgatgactcccagggcctggccgccgagggcagcctctctagggtggcaagtatacagagtgaacctggtcaacagaacctccttgttcagcagccgctggggaggaagaggggcctgaggcagctaagacgtcctctactatcacgtcagaaaactcagactgaacccagaaatcgccaaggggctcggctgtcaaccactcgcaggagcattcaacctaaaacgaagccgtctgcggatcagaaacgatctgtgaccttcattgaggctcagccagagccagcagctgccccaacagatgcgcttcctgcaacaggccaactacagggctgtagcccagccccttctaggaaaccagaagcaatggacgaaccagtcctcacatcttctcccgccatagttgttgcggatctccacagcgtgtctcccaagcagagtgagaacttccccactgaagaaggagaaaaggaggaggacacagaagcacaaggtgctactgcacacagtccactctctgcccaactctctgaccctgatgacttcacaggcctcgagacatccagcctcctacagcatggagacactgtccttcatatcagtgaggaaaatggcatggagaacccgctactatctagtcagttcacctttactcccactgagctggggaaaacggatgcagtattagatgagtctcatgtttaattctgtatcttgtaagctctgcaggtatagagaagacatgaaagtgatctctctactacaagttcaatacttttgcttgaaaaagattaattacaaaatagcactttacttctaatgggtggcacaaatctgaataggttttgctgccaatacacatgatgtttcataaacatcttaaaagtcaatggctaaaaggatttagttgtgtgaaaatcacaaaaccagggaggaataaggggaaagagccatttcactgcacattgtttatgattcaagaagccttcagcagttaaaaatatatactattcattgctgctttcatagaaatattaacaaatgatatgatctaaaaatagaatgcaattttttgagattactcacattatacatctcatgcaaatatttatttttatagtttaaaaaatatcaattcaggttggctatacaagtagcaatttacataaaaaaataattaataggaaaaatattactttggggagactaaataacaagcctgcagccatttttgttttgagtaacaatacagccatttagaagaagaaaaaaatactatatagagagctgtggacttttagatatttatttttcaactatcattttcattgcatgttgtaaatcaaaatgcagatggcataagatcatcccatttcataatctatcacattagaatattacagaatattctagaaatcatcagaaataattctgaattaagaacctaaacagcctatacaattataaaaactaaatgtatatataatcacttaaaagagatggtattcctattcctagccctgactacatcaataccaagattagaagctattggaaaatgtgattagtaatacttttccttatagtatcctgtgcctgccctggagggcatattttcagatattaaggttagtgttgttagaatcggtttaataaaataacattttcctaatagaaacaatattcttatgatacttggaacatctaagtttataaggaaaaatgtataaagtaagcaatttcttcatagacacctccagtttatatattttgcaaataggcctttaacttgaagttcaattacttcaagaaaagtgtaacacttagaaggcttgtgaggccaacacctagtgtgttactgatcctatggtagggctgtgcatcacgtggttcacaattgaatttcaaaattttaacagtttacattagaaaactgttacctaacaaccaagcatatacaaactcatatacatacttaaattggtacggtggtgtatgtgtgcgtgcgtgtgtgtgtgtatgtgttgtagtcctcaagatgaagttaaatatagactttaattaccctgcaatgaatttaaaacacattctgtatgcttaaactttgagtgcgttggctgtgaaatgtatacatatataaagaggatacctactaaacccaccttaatcataaaggaaaattattttttgttagaattgcttattaaataggcatactttatactgtggtttataatttcaaatataacttggggttatggtcctattcactaagagaatgaaagatatccatgagttaaaagaacaaaactaaaaatttcagatctaacaattgaaagaaaattgaggcagtaaatgacctcttttactcttttatgttttacaatattatcatgttatttacagttaatgctgaaataattctcaagtgcaggaatataaatgttaagtggttttatgattccaagctgatatatttcacctgttaaaaattatgctgctaaattagcattagaggccttatgtttggtaattacaagtgtctgggctattggcgcgtctctatatatgtgtgtgctttgttccagtttcttcaaattatctatgtataattgtatgaaatatttaaatagcaaagaagtcaaagaagattgttaaatattcaacaagaatcataaatacctttatatgtattttaaaagtattgggctgttctgaacatgattatgctggtctgtctgtcttttagcctgactccttcactcttgtgtgtgaagtctattagcaactttcaataagctaagcaatgttgtaacttgcaaaaaagcctccactctgagaaacagggccttatagagtaggaatgttttcatactgggactactgaaattttgcagatgtgtgcatctgttccatttaaggtgcccttaaatgtgttgaatgtaatgtgttgaatgtttatgtgtaatggctaaagtatctatatgtatgtgcataaaactgtcacaagatgtattctcaggaatactgttacctggagtttgaaaggaataactattaaaaaaaaaagttggggaagattagaaaaaagctcaagataaatgttcaaaatattattaagtacatgactaaaagctaattactacatatgataaatgcagtgttggtaatagtagatcatttcttaagccatgatacttaatgatatttatcttattcagaggaaaaacaaaaaaggtacccacttcccatgtagaaaaaattagactcagcaaagaggttgcttcttctgaaattagcttttgagagaccttggaataaaccatgtgttatccatgatagtatgactcagatccaattaaaacagtttaaattctggatataggatctcctatagcaaaacattttactttcatttttcagtatttgctgctttctagaattctattagataagctatgtcatttttctgaaaaagaaactgagttattgagtgtattaagacaaggcactgagaactacagtgtcaaaatcaaagggcataaatgggcatggcagtgctggtggaaaaatctgtggtactggtgatctggttagggcctgttgcacaggctgggagtaactggtttgctgtttcaagcctccaagagtaccttaaacaaggtgatagctcctctcttctttagcattatattcctttagtcaacaaagaactttctccactctgctgcccagctctgagagtatctgagatgagaataggatgtgtgtggaggggcttttagggaagaaagggtcataaatgaatagaagtacagtctgaaacatgaattaaatatccttcctcaagttataaaggatactttaatagaacacagtctccagaattcgctgctatcacaccaagtcatgctgttgccctgtgacctcacacttcccattccatggccttgtcttggcagggagtaaaaaatcccacttctttttactttagtgggtctcaactgcagcatttcagaaacaaattttgatttgacactcaggagaataaaaacaagttgagggcagaatgtatttggaaaagcttaagacaaatttactgatattattttatgatcatttaggattacagatcaatttacctccataaatctttgaattgtcactgtgaccacaggatgaaaatcctttattagccattttataggttaaaacaaaaaattgactacacagccgacttccctcagataactatgaagtctattatgagtactgaatgaccaaagaacatggaaaaaatgcatatgaataaatactgaaatgtttatgaaagatatttatgaaagatattaagacttctgtgtttaggtatgcacatatgataaaataaatctaaaaacattaaagatg

SEQ ID NO: 33845 - DNA, 2033 bp, Homo sapiens
  source 1..2033: mol_type = unassigned DNA
actaatgctaatgagaatggttcaaatactatgttaaacactggggatgtaaactaaggtcctggtcttcaagattatcacggttcaatgcaagaggcacataagaaaataactatgatacaaagttgttggcagaaattgcacactcccttctgaagctggcaccatatgacactcagacaatggagagtcgtgggcttcggcgctacatcatggagatgctacccattactgactggacagctgaggcagtgaggccggccctcatcctcattttaaaaagattggatagaatgttcaacaaaattcataagatgcctactttgaggcgacaggttgagtgggagcctgccagcaatttgattgaaggggtttgtttgacacttcagaggcagccaatcatatccttcctgcctcaccttaggtcactgatcaatgtctgtgtcaatctggtgatgggagtggtaggaccttccagtgttgctgatggattaccccttcttcatctcagcccttatctctcaccacctctgcccttcagcacagctgttgtccggcttgtagcattgcagatacaggctttaaaagaagattttcctttaagccatgtgatctccccattcaccaatcaagagcgaagggaggggatgcttttaaatctgctcatcccatttgtgctcacagtaggatctggaagcaaagatagcccatggctggagcagcctgaggtgcagctgctgctgcagacagtcatcaatgtactcctcccaccgcggatcatcagcacatccaggagcaagaacttcatgttagagagctccccagcccactgctccacccctggggatgcggggaaagacttgcgcagggaagggctggctgagtccaccagccaagcagcatacttggcgctgaaggtgattctcgtctgctttgagaggcagctcggaagccagtggtactggctgagcctccaggtgaaggagatggctctgcggaaggtgggaggcctggccctttgggatttcctcgacttcatcgtgcggacccgaatacccatctttgtgcttttgcgccctttcatccagtgcaagctgctggcccaaccagcagagaatcatgaagagctttccgcccggcaacatattgccgaccagctggagcggcgcttcataccacgccctttgtgtaagagctcgctcattgctgagttcaacagtgaactaaaaattctaaaagaggcagttcatagtggatcagcctaccaaggcaagacatccatcagtaccgtgggcacctccacctctgcttaccgcctgagcttggccaccatgtcccgctctaacacgggcacgggcactgtctgggagcaggacagtgagccatcccagcaggcttcgcaggacaccctgagtcggactgatgaggaagatgaggaaaatgactctataagcatgcccagcgtggtaagtgaacaagaagcttacctcctgagtgccattggaaggaggcgattctccagccatgtctccagcatgtctgtacctcaggctgaggtgggcatgctacccagccagaggtaaacagctatggttatactgtactctgcatttgggggcaaagttagaaattctgaaaatacactcctgttattctacaaagacagaaagagaagcaagcaatggtaatgtttttagatagatcattccacaaaggatttgtcaactaggttcctgcaggcaacactttgcagttttctaagccaagctagtagaagggatcccaatttccaagtattgtctctccttaaaaattttccatagacacatggtcttctttctgttgtcaaatggcattcttgtatttcagatttatcattagctaagctaatgatgggtacttggcaagagtttggaccatctttatgtttttggtaaagtttaggcttctgatatattattagtattcagttgtaggtagtgacacttaaccaagcagaaaaggatctatgccactgagtgtgaccttgggca

SEQ ID NO: 33846 - DNA, 2116 bp, Homo sapiens
  source 1..2116: mol_type = unassigned DNA
attaacgagtgacagtcttaatgactaacacacctctaacatttcacctctagctcagatgagagagagaatgggacttcttggtactgattgtttttcccatgcctcaattggtttcttttagggagctacaaatttacgtgttcactggtgattgatcttttcatccagcacaatggacagaagtctaaggaacgtccttgtggtttcctttgggttcctgcttctctttacagcctatggaggtctgcagagcctgcagagcagcctgtacagcgaggagggcctgggtgtcacagcgctcagcaccctctatggaggcatgctcctgtcctccatgttcctcccaccgctcctcatcgagaggctgggctgcaaggggaccatcatcctctccatgtgtggctacgtggccttctccgtgggcaacttcttcgccagctggtacactttgatccccacctccatactgctgggactcggggccgccccgctgtggtctgcacagtgcacatacctcacgatcacgggaaacacacatgcagagaaggcgggaaagcgtggcaaagacatggtgaaccagtattttggcatcttcttcctcatattccagtcatccggtgtgtggggcaacttgatctcatcgctggtatttggccagactcccagccaagagacccttccagaagagcagctcacgtcctgtggggccagtgactgcctgatggccaccacaaccaccaacagcacccagaggccctcccagcagctggtctacaccctcctgggcatctacactgggagtggtgtcctggctgtcctgatgatagctgcgttcctccaacccatacgagatgttcagcgggaaagtgaaggagagaagaaatcagtacctttctggtccactttactgtcgactttcaagctatatagagataaacgtctgtgcctcttaattctgctgccgctgtacagtggattgcagcaaggattcctctccagcgaatacacaaggtcctatgtcacctgcaccctgggcatccagttcgtcggctacgtgatgatctgcttctcggccactgacgcgctgtgctccgtgttgtatggaaaggtctcgcagtacacgggcagggctgtgctgtacgtgctgggcgcggtgacccacgtgtcctgcatgattgccctactgctgtggagacctcgtgctgaccatctggcagtgttcttcgtattctctggcctgtggggcgtggcagatgccgtctggcagacacaaaacaatgctctctacggcgttctgtttgagaagagcaaggaagctgccttcgccaattaccgcctgtgggaggccctgggcttcgtcattgccttcgggtacagcatgtttttgtgcgtgcacgtcaagctctacattctgctgggggtcctgagcctgaccatggtggcgtatgggcttgtggagtgcgtggagtccaagaacccgatcagaccccacgctccaggacaggtcaaccaggcagaggatgaagaaatacaaacaaaaatgtgagagcagtgaggtccgaggaggatgaactcagaaagcaccagccagagaattttcttagaagatgcctcaggacatagagcggctcctcatcaccatctcagcacaatttggccattctgaagagatcatgttatttcactcttcatgtattttttttctattctaacaaatttttcgtccaccatcttaacagagatcaagtgtatacatgaaggtatcagttcatttaattttagatgcaaaagaaaaaggtctaacgtacaatcagccaattagaatttgcctgaaatcatagactcaccctagttttattgctgtagttgtttttaagaattggaagcctgcttaaaaaatgtagttgagccccataattttacaaatgggcgaacttttaaacttctaactctacttggatcaaaacctcatacattttacaaaggggtcctgacaagtcagctgactcaacctcacagagtcagggggtgacaaagccagactggggctcaggattcctgaaacgtgtggggtctgcgtttctaaataaagacggttatttaatggacttac

SEQ ID NO: 33847 - DNA, 1810 bp, Homo sapiens
  source 1..1810: mol_type = unassigned DNA
ggtgattgatcttttcatccagcacaatggacagaagtctaaggaacgtccttgtggtttcctttgggttcctgcttctctttacagcctatggaggtctgcagagcctgcagagcagcctgtacagcgaggagggcctgggtgtcacagcgctcagcaccctctatggaggcatgctcctgtcctccatgttcctcccaccgctcctcatcgagaggctgggctgcaaggggaccatcatcctctccatgtgtggctacgtggccttctccgtgggcaacttcttcgccagctggtacactttgatccccacctccatactgctgggactcggggccgccccgctgtggtctgcacagtgcacatacctcacgatcacgggaaacacacatgcagagaaggcgggaaagcgtggcaaagacatggtgaaccagtattttggcatcttcttcctcatattccagtcatccggtgtgtggggcaacttgatctcatcgctggtatttggccagactcccagccaagggagtggtgtcctggctgtcctgatgatagctgcgttcctccaacccatacgagatgttcagcgggaaagtgaaggagagaagaaatcagtacctttctggtccactttactgtcgactttcaagctatatagagataaacgtctgtgcctcttaattctgctgccgctgtacagtggattgcagcaaggattcctctccagcgaatacacaaggtcctatgtcacctgcaccctgggcatccagttcgtcggctacgtgatgatctgcttctcggccactgacgcgctgtgctccgtgttgtatggaaaggtctcgcagtacacgggcagggctgtgctgtacgtgctgggcgcggtgacccacgtgtcctgcatgattgccctactgctgtggagacctcgtgctgaccatctggcagtgttcttcgtattctctggcctgtggggcgtggcagatgccgtctggcagacacaaaacaatgctctctacggcgttctgtttgagaagagcaaggaagctgccttcgccaattaccgcctgtgggaggccctgggcttcgtcattgccttcgggtacagcatgtttttgtgcgtgcacgtcaagctctacattctgctgggggtcctgagcctgaccatggtggcgtatgggcttgtggagtgcgtggagtccaagaacccgatcagaccccacgctccaggacaggtcaaccaggcagaggatgaagaaatacaaacaaaaatgtgagagcagtgaggtccgaggaggatgaactcagaaagcaccagccagagaattttcttagaagatgcctcaggacatagagcggctcctcatcaccatctcagcacaatttggccattctgaagagatcatgttatttcactcttcatgtattttttttctattctaacaaatttttcgtccaccatcttaacagagatcaagtgtatacatgaaggtatcagttcatttaattttagatgcaaaagaaaaaggtctaacgtacaatcagccaattagaatttgcctgaaatcatagactcaccctagttttattgctgtagttgtttttaagaattggaagcctgcttaaaaaatgtagttgagccccataattttacaaatgggcgaacttttaaacttctaactctacttggatcaaaacctcatacattttacaaaggggtcctgacaagtcagctgactcaacctcacagagtcagggggtgacaaagccagactggggctcaggattcctgaaacgtgtggggtctgcgttt

SEQ ID NO: 33848 - DNA, 775 bp, Homo sapiens
  source 1..775: mol_type = unassigned DNA
gagggccagagttaagacagagcttaagacagagaacctcaacaggaggcctgaaggaaagcacctgggagtcattaggcagcaagggagggaattgcaattctgggcggggctcagctgtgcagagtttagcaaggtctccaggtgcttctgctgagggccagagttaagaaagagcgagaacctcatcaggaggactgaaggaaaggagccaggctgcagccctctgcctgcccttccgtgccatcatctccaggattaatgaaagggccattcaggaaacagcacagggagctacaaatttacgtgttcactggtgattgatcttttcatccagcacaatggacagaagtctaaggaacgtccttgtggtttcctttgggttcctgcttctctttacagcctatggaggtctgcagagcctgcagagcagcctgtacagcgaggagggcctgggtgtcacagcgctcagcaccctctatggaggcatgctcctgtcctccatgttcctcccaccgctcctcatcgagaggctgggctgcaaggggaccatcatcctctccatgtgtggctacgtggccttctccgtgggcaacttcttcgccagctggtacactttgatccccacctccatactgctgggactcggggccgccccgctgtggtctgcacagtgcacatacctcacgatcacgggaaacacacatgcagagaaggcgggaaagcgtggcaaagacatggtgaaccagtattttggcatcttcttcctcatatt

SEQ ID NO: 33849 - DNA, 2313 bp, Homo sapiens
  source 1..2313: mol_type = unassigned DNA
gtcccggccgccgggaggaagtggccgggcggtcgcagggactccggggcgaccgccgcgagtccgcagtagttcgggccatggaggcggagccgccgctctacccgatggcgggggctgcggggccgcagggcgacgaggacctgctcggggtcccggacgggcccgaggccccgctggacgagctggtgggcgcgtaccccaactacaacgaggaggaggaggagcgccgctactaccgccgcaagcgcctgggcgtgctcaagaacgtgctggctgccagcgccgggggcatgctcacctacggcgtctacctgggcctcctgcagatgcagctgatcctgcactacgacgagacctaccgcgaggtgaagtatggcaacatggggctgcccgacatcgacagcaaaatgctgatgggcatcaacgtgactcccatcgccgccctgctctacacacctgtgctcatcaggttttttggaacgaagtggatgatgttcctcgctgtgggcatctacgccctctttgtctccaccaactactgggagcgctactacacgcttgtgccctcggctgtggccctgggcatggccatcgtgcctctttgggcttccatgggcaactacatcaccaggatggcgcagaagtaccatgagtactcccactacaaggagcaggatgggcaggggatgaagcagcggcctccgcggggctcccacgcgccctatctcctggtcttccaagccatcttctacagcttcttccatctgagcttcgcctgcgcccagctgcccatgatttatttcctgaaccactacctgtatgacctgaaccacacgctgtacaatgtgcagagctgcggcaccaacagccacgggatcctcagcggcttcaacaagacggttctgcggacgctcccgcggagcggaaacctcattgtggtggagagcgtgctcatggcagtgttcctggccatgctgctggtgctgggtttgtgcggagccgcttaccggcccacggaggagatcgatctgcgcagcgtgggctggggcaacatcttccagctgcccttcaagcacgtgcgtgactaccgcctgcgccacctcgtgcctttctttatctacagcggcttcgaggtgctctttgcctgcactggtatcgccttgggctatggcgtgtgctcggtggggctggagcggctggcttacctcctcgtggcttacagcctgggcgcctcagccgcctcactcctgggcctgctgggcctgtggctgccacgcccggtgcccctggtggccggagcaggggtgcacctgctgctcaccttcatcctctttttctgggcccctgtgcctcgggtcctgcaacacagctggatcctctatgtggcagctgccctttggggtgtgggcagtgccctgaacaagactggactcagcacactcctgggaatcttgtacgaagacaaggagagacaggacttcatcttcaccatctaccactggtggcaggctgtggccatcttcaccgtgtacctgggctcgagcctgcacatgaaggctaagctggcggtgctgctggtgacgctggtggcggccgcggtctcctacctgcggatggagcagaagctgcgccggggcgtggccccgcgccagccccgcatcccgcggccccagcacaaggtgcgcggttaccgctacttggaggaggacaactcggacgagagcgacgcggagggcgagcatggggacggcgcggaggaggaggcgccgcccgcagggcccaggcctggccccgagcccgctggactcggccgccggccctgcccgtacgaacaggcgcaggggggagacgggccggaggagcagtgaggggccgcctggtccccggactcagcctccctcctcgccggcctcagtttaccacgtctgaggtcggggggaccccctccgagtcccgcgctgtcttcaaaggcccctgtctcccctcccccacgttggggacgcccctcccagagcccaggtcacctccgggcttccgcagccccctccaaggcggagtggagccttgggaacccctcggccaagcacaggggttcgaaaatacagctgaaaccccgcgggcccttagcacgcgccccagcgccggagcacggtcagggtcttcttgcgacccggcccgctccagatccccacagctctcggccgcggacccgggccgcgtgtgagcgcactttgcacctcctatccccagggtccgccgagagccacgattttttacagaaaatgagcaataaagagattttgtactgtc

SEQ ID NO: 33850 - DNA, 1462 bp, Homo sapiens
  source 1..1462: mol_type = unassigned DNA
agagcaagggaaaggaacttcctccaccttcggggctggagcccttttcctctgcatctccagtctctgagtgaagatggggggcctgacagcctcggacgtacacccgaccctgggggtccagctcttctcagctggaatagcggcgtgcttggcggacgtgatcaccttcccgctggacacggccaaagtccggctccaggtccaaggtgaatgcccgacgtccagtgttattaggtataaaggtgtcctgggaacaatcaccgctgtggtaaaaacagaagggcggatgaaactctacagcgggctgcctgcggggcttcagcggcaaatcagctccgcctctctcaggatcggcctctacgacacggtccaggagttcctcaccgcagggaaagaaacagcacctagtttaggaagcaagattttagctggtctaacgactggaggagtggcagtattcattgggcaacccacagaggtcgtgaaagtcagacttcaagcacagagccatctccacggaatcaaacctcgctacacggggacttataatgcgtacagaataatagcaacaaccgaaggcttgacgggtctttggaaagggactactcccaatctgatgagaagtgtcatcatcaattgtacagagctagtaacatatgatctaatgaaggaggcctttgtgaaaaacaacatattagcagatgacgtcccctgccacttggtgtcggctcttatcgctggattttgcgcaacagctatgtcctccccggtggatgtagtaaaaaccagatttattaattctccaccaggacagtacaaaagtgtgcccaactgtgcaatgaaagtgttcactaacgaaggaccaacggctttcttcaaggggttggtaccttccttcttgcgacttggatcctggaacgtcattatgtttgtgtgctttgaacaactgaaacgagaactgtcaaagtcaaggcagactatggactgtgccacataatcagcttcaagaaaatgatgtaacataccagtgggaatcttgctgactggatcataaaaacaaacaaaacttattcacttattttaacctaaaaagataaaggaattttggcagagaattttggacttttttatataaaaaagaggaaaattaatgcctatttcatataactttttttttttctcagtgtcttaagaaggggaaagcaaaacattcagcatataccctggcaaatgtaatgcagataagctactgcatttgaccatttctggagtgcaattgtgtgaatgaatgtgaagaactttaacatgttttaattacaattccaactggtggaaaagaaactgagtgaaatgcagtttatatttataaatacttaaaaatgaagttattaaaaatattagtttttattaaccacagttgtcagttaatatattcaataaagtattgctaatacctttt

SEQ ID NO: 33851 - DNA, 2113 bp, Homo sapiens
  source 1..2113: mol_type = unassigned DNA
agccgcgcgctcgctcgcaggagggtgggtagtttgcccagcgtaggggggctgggcccataaaagaggaagtgcacttaagacacggccccgctggacgctgttagaaaccgtcctggctgggaaggcaagaggtgtgtgactggacaagacttgtttctggcggtcagtcttgccatcctcacagaggttggcggcccgagagagtgtgaggcagaggcggggagtggcaagggagtgaccatctcggggaacgaaggagtaaacgcggtgatgggacgcacggaaacgggagtggagaaagtcatggagagaaccctaggcggggcggtccccgcggaaaggcggctgctccagggtctccgcacccaagtaggagctggcaggcccggccccgccccgcaggccccaccccgggccccgcccccgaggcttaagccgcgccgccgcctgcgcggagccccactgcgaagcccagctgcgcgcgccttgggattgactgtccacgctcgcccggctcgtccgacgcgccctccgccagccgacagacacagccgcacgcactgccgtgttctccctgcggctcggacacatagtatgaccattaggtgtttcgtctcccacccattttctatggaaaaccaaggggatcgggccatgatagccactggcagctttgaagaacgggacacctttagagaagcttgatcttggaggcctcaccgtgagaccttacaaagccggattccggcagagttcctctatctcgtcttgttgctgattaaaggtgcccctgtctccagtttttctccatctcctgggacgtagcaggaaatcagcatcatggttgggttcaaggccacagatgtgccccctactgccactgtgaagtttcttggggctggcacagctgcctgcatcgcagatctcatcacctttcctctggatactgctaaagtccggttacagatccaaggagaaagtcaggggccagtgcgcgctacagccagcgcccagtaccgcggtgtgatgggcaccattctgaccatggtgcgtactgagggcccccgaagcctctacaatgggctggttgccggcctgcagcgccaaatgagctttgcctctgtccgcatcggcctgtatgattctgtcaaacagttctacaccaagggctctgagcatgccagcattgggagccgcctcctagcaggcagcaccacaggtgccctggctgtggctgtggcccagcccacggatgtggtaaaggtccgattccaagctcaggcccgggctggaggtggtcggagataccaaagcaccgtcaatgcctacaagaccattgcccgagaggaagggttccggggcctctggaaagggacctctcccaatgttgctcgtaatgccattgtcaactgtgctgagctggtgacctatgacctcatcaaggatgccctcctgaaagccaacctcatgacagatgacctcccttgccacttcacttctgcctttggggcaggcttctgcaccactgtcatcgcctcccctgtagacgtggtcaagacgagatacatgaactctgccctgggccagtacagtagcgctggccactgtgcccttaccatgctccagaaggaggggccccgagccttctacaaagggttcatgccctcctttctccgcttgggttcctggaacgtggtgatgttcgtcacctatgagcagctgaaacgagccctcatggctgcctgcacttcccgagaggctcccttctgagcctctcctgctgctgacctgatcacctctggctttgtctctagccgggccatgctttccttttcttccttctttctcttccctccttcccttctctccttccctctttccccacctcttccttccgctcctttacctaccaccttccctctttctacattctcatctactcattgtctcagtgctggtggagttgacatttgacagtgtgggaggcctcgtaccagccaggatcccaagcgtcccgtcccttggaaagttcagccagaatcttcgtcctgcccccgacagcccagcctagcccacttgtcatccataaagcaagctcaaccttggcgtc

SEQ ID NO: 33852 - DNA, 464 bp, Homo sapiens
  source 1..464: mol_type = unassigned DNA
gggcagcagctgggtcttattcttctctggccttcacaacatcctgcaacccagctcaaggtcaggaatgtgacagactcatgtcatcatatctctgatgcccagagaagggataccatttgcctgagccttctcagtactgtttaatcagcctgtgagaactttccttgtgaaaggccctgtctgtgcctggggctgataaaacagcaagaacgaactgaggagctgggcagcagtgcaaagcaaatactaccagctttggtgcctattccggcagagttcctctatctcgtcttgttgctgattaaaggtgcccctgtctccagtttttctccatctcctgggacgtagcaggaaatcagcatcatggttgggttcaaggccacagatgtgccccctactgccactgtgaagtttcttggggctggcacagctgcctgcatcgcagatctcatcacctttcc

SEQ ID NO: 33853 - DNA, 2623 bp, Homo sapiens
  source 1..2623: mol_type = unassigned DNA
atatttagcacatagtaggcacaaagaaatgacattattattaagagacctgggagagctgtgcccagcctatcgtgggaggccttgacctttggactcaaaagtggcagcaggtccacccccccatacacccttgtcaccaaggaagcgtccacagcttaaaggagctatattaaagcaccccaagtcaagaggactgaaccagatctggaactcactcacctcccctctcacctcactgccctcaccagccagcctcttgtcaagtgatcaggctgtcaaccaacttctctaggataaggtttcaggtcagcccgtgtgtataagaccagtgccaagccagaagcagcagagacaacagtgaatgacaaggaggggccatccaatccctgctgccacctcctgggatggagccctagggagcccctgtgctgcccctgccgtggcaggactcacagccccaccgctgcactgaagcccagggctgtggagcagcctctctccttggacctcctctcggccctaaagggactgggcagagccttccaggactatggttggactgaagccttcagacgtgcctcccaccatggctgtgaagttcctgggggcaggcacagcagcctgttttgctgacctcgttacctttccactggacacagccaaggtccgcctgcagatccagggggagaaccaggcggtccagacggcccggctcgtgcagtaccgtggcgtgctgggcaccatcctgaccatggtgcggactgagggtccctgcagcccctacaatgggctggtggccggcctgcagcgccagatgagcttcgcctccatccgcatcggcctctatgactccgtcaagcaggtgtacacccccaaaggcgcggacaactccagcctcactacccggattttggccggctgcaccacaggagccatggcggtgacctgtgcccagcccacagatgtggtgaaggtccgatttcaggccagcatacacctcgggccatccaggagcgacagaaaatacagcgggactatggacgcctacagaaccatcgccagggaggaaggagtcaggggcctgtggaaaggaactttgcccaacatcatgaggaatgctatcgtcaactgtgctgaggtggtgacctacgacatcctcaaggagaagctgctggactaccacctgctcactgacaacttcccctgccactttgtctctgcctttggagccggcttctgtgccacagtggtggcctccccggtggacgtggtgaagacccggtatatgaactcacctccaggccagtacttcagccccctcgactgtatgataaagatggtggcccaggagggccccacagccttctacaagggatttacaccctcctttttgcgtttgggatcctggaacgtggtgatgttcgtaacctatgagcagctgaaacgggccctgatgaaagtccagatgttacgggaatcaccgttttgaacaagacaagaaggccactggtagctaacgtgtccgaaaccagttaagaatggaagaaaacggtgcatccacgcacacatggacacagacccacacatgtttacagaactgttgtttacttgttgctgattcaagaaacagaagtagaagaggaggagggattctggtcttcactgccatgcctcaagaacacctttgttttgcactgacaagatggaaaataaattatattaatttttgaaacccattaggcatgcctaatatttaggcaagagaaaataaaccaagatagatccatttggacaaaatggaaggttggagacgtgtatccccgtgaaatctggttagataatgaatgataagcaggaaggatggcaagcacgggacaggaggggcccacaatggagtgggagatcagccacggagcctggagggatgccacccagcaacacagagctggcgactgcagctgcaccatcacacatgcatcatcagcctatttgtaatatgtctgccacagagagtcctttgggattctaggaaacccaaggaacaagagaaaaaactagagcctgtgctaaagaagccctgctgggcccatgtgaggctggggctcgtaaatattccctgacgacactgaagaatcaagagggcagcccccactttcctacaaaatggagggagccatcccttccctgtccacctcaccaggggtgctatgacatgcaagtgagaagctgggcatgaacgcactttataaaagcaaaagctctgtgtaaatctaactacaaggacaatgccttgggagagattttgtcgggacagagaggagttgccagggaagaaggtttgaaagatacggttgtctagaggtgagaccaaaggatccagagacttggggaccagaggtgacagtggatgacgtgaagccacaggagccccacccccatgcagcctcttccccaccccccccaccacgtgctcaatcatgagtacctcaaaggattgttgggcttgggggaaaagaggtggattcctgggcaagaacctaaagtagcaggactcggaattctcgggaaattattatgactcaataaaagaattcacaccttaggtgtgggagtaagaaca

SEQ ID NO: 33854 - DNA, 2112 bp, Homo sapiens
  source 1..2112: mol_type = unassigned DNA
gaaccagatctggaactcactcacctcccctctcacctcactgccctcaccagccagcctcttgtcaagtgatcaggctgtcaaccaacttctctaggataaggtttcaggtcagcccgtgtgtataagaccagtgccaagccagaagcagcagagacaacagtgaatgacaaggaggggccatccaatccctgctgccacctcctgggatggagccctagggagcccctgtgctgcccctgccgtggcaggactcacagccccaccgctgcactgaagcccagggctgtggagcagcctctctccttggacctcctctcggccctaaagggactgggcagagccttccaggactatggttggactgaagccttcagacgtgcctcccaccatggctgtgaagttcctgggggcaggcacagcagcctgttttgctgacctcgttacctttccactggacacagccaaggtccgcctgcagatccagggggagaaccaggcggtccagacggcccggctcgtgcagtaccgtggcgtgctgggcaccatcctgaccatggtgcggactgagggtccctgcagcccctacaatgggctggtggccggcctgcagcgccagatgagcttcgcctccatccgcatcggcctctatgactccgtcaagcaggtgtacacccccaaaggcgcggacaacaacttcccctgccactttgtctctgcctttggagccggcttctgtgccacagtggtggcctccccggtggacgtggtgaagacccggtatatgaactcacctccaggccagtacttcagccccctcgactgtatgataaagatggtggcccaggagggccccacagccttctacaagggatttacaccctcctttttgcgtttgggatcctggaacgtggtgatgttcgtaacctatgagcagctgaaacgggccctgatgaaagtccagatgttacgggaatcaccgttttgaacaagacaagaaggccactggtagctaacgtgtccgaaaccagttaagaatggaagaaaacggtgcatccacgcacacatggacacagacccacacatgtttacagaactgttgtttacttgttgctgattcaagaaacagaagtagaagaggaggagggattctggtcttcactgccatgcctcaagaacacctttgttttgcactgacaagatggaaaataaattatattaatttttgaaacccattaggcatgcctaatatttaggcaagagaaaataaaccaagatagatccatttggacaaaatggaaggttggagacgtgtatccccgtgaaatctggttagataatgaatgataagcaggaaggatggcaagcacgggacaggaggggcccacaatggagtgggagatcagccacggagcctggagggatgccacccagcaacacagagctggcgactgcagctgcaccatcacacatgcatcatcagcctatttgtaatatgtctgccacagagagtcctttgggattctaggaaacccaaggaacaagagaaaaaactagagcctgtgctaaagaagccctgctgggcccatgtgaggctggggctcgtaaatattccctgacgacactgaagaatcaagagggcagcccccactttcctacaaaatggagggagccatcccttccctgtccacctcaccaggggtgctatgacatgcaagtgagaagctgggcatgaacgcactttataaaagcaaaagctctgtgtaaatctaactacaaggacaatgccttgggagagattttgtcgggacagagaggagttgccagggaagaaggtttgaaagatacggttgtctagaggtgagaccaaaggatccagagacttggggaccagaggtgacagtggatgacgtgaagccacaggagccccacccccatgcagcctcttccccaccccccccaccacgtgctcaatcatgagtacctcaaaggattgttgggcttgggggaaaagaggtggattcctgggcaagaacctaaagtagcaggactcggaattctcgggaaattattatgactcaataaaagaattcacaccttaggtgtgggagt

SEQ ID NO: 33855 - DNA, 1406 bp, Homo sapiens
  source 1..1406: mol_type = unassigned DNA
agagacaacagtgaatgacaaggaggggccatccaatccctgctgccacctcctgggatggagccctagggagcccctgtgctgcccctgccgtggcaggactcacagccccaccgctgcactgaagcccagggctgtggagcagcctctctccttggacctcctctcggccctaaagggactgggcagagccttccaggactatggttggactgaagccttcagacgtgcctcccaccatggctgtgaagttcctgggggcaggcacagcagcctgttttgctgacctcgttacctttccactggacacagccaaggtccgcctgcagatccagggggagaaccaggcggtccagacggcccggctcgtgcagtaccgtggcgtgctgggcaccatcctgaccatggtgcggactgagggtccctgcagcccctacaatgggctggtggccggcctgcagcgccagatgagcttcgcctccatccgcatcggcctctatgactccgtcaagcaggtgtacacccccaaaggcgcggacaactccagcctcactacccggattttggccggctgcaccacaggagccatggcggtgacctgtgcccagcccacagatgtggtgaaggtccgatttcaggccagcatacacctcgggccatccaggagcgacagaaaatacagcgggactatggacgcctacagaaccatcgccagggaggaaggagtcaggggcctgtggaaaggaactttgcccaacatcatgaggaatgctatcgtcaactgtgctgaggtggtgacctacgacatcctcaaggagaagctgctggactaccacctgctcactgacaacttcccctgccactttgtctctgcctttggagccggcttctgtgccacagtggtggcctccccggtggacgtggtgaagacccggtatatgaactcacctccaggccagtacttcagccccctcgactgtatgataaagatggtggcccaggagggccccacagccttctacaaggggtgagcctcctcctgcctccagcactccctcccagagaacaggggcttctttcttttcgaatgtggctaccgtgggtcaacctgggatgtagcggtgaagagtacagatgtaaatgccacaaagaagaagtttaaaaaaccatgcaagtaaaagaaaaaaagtgaaccatacctgatggggagggttagggaagcctgactgagaacaaacactccaggaataggtaaaagtactgcctgtctccagaggaagttagcaatcctgagacctcctggacctcctgccatggccattgagcaccacactgaccatggccagtgccttcctcactgtctccacacgctccacgttttcttgcacttactgctccctctgcgt

SEQ ID NO: 33856 - DNA, 551 bp, Homo sapiens
  source 1..551: mol_type = unassigned DNA
attcaagggataggaacgtgacctgtttttataggccaaattcatgcagcttaagtatggcaccacccaggcttctccctttctaaagcccctcctgggtaaggaagagttcctgggagccaggccagacatcactccatcagccttctctggcctgtctcctgcagccccaccgctgcactgaagcccagggctgtggagcagcctctctccttggacctcctctcggccctaaagggactgggcagagccttccaggactatggttggactgaagccttcagacgtgcctcccaccatggctgtgaagttcctgggggcaggcacagcagcctgttttgctgacctcgttacctttccactggacacagccaaggtccgcctgcagatccagggggagaaccaggcggtccagacggcccggctcgtgcagtaccgtggcgtgctgggcaccatcctgaccatggtgcggactgagggtccctgcagcccctacaatgggctggtggccggcctgcagcgccagatgagcttcgcctccatccgcatcg

SEQ ID NO: 33857 - DNA, 1157 bp, Homo sapiens
  source 1..1157: mol_type = unassigned DNA
cgccccagccccgggatgctgctccggccccgcaggccgcccccgctcgcgccccccgcgccgccctcgcccgccagccccgaccccgagccgcggacacccggagacgccccggggaccccgccccggaggcccgcctcgcccagcgcgctgggggaactcgggttgccggtgtccccgggctcggcgcagcgcacgccctggagcgcccgggagacggagctgctgctggggacgctgctgcaaccggccgtgtggcgcgcgctgctcctggaccgccgccaggccctgcccacctaccgccgcgtgtcggccgcgctggcccagcagcaggtgcgccgcacccccgcgcagtgccgccgccgctacaagttccttaaagacaagtttcgcgaggcgcacggccagccgcccgggcccttcgacgagcagatccggaagctcatggggctgctgggcgacaacgggcgcaaacggcctcgccgccgctccccggggtccgggcgcccccagcgcgcccgccgcccggtccccaacgcgcacgcgccggctcccagcgaaccagacgccaccccgctgcccaccgcccgcgaccgcgacgcggaccccacctggacgctccgcttcagcccgtccccaccgaagtctgcggacgcctcccccgcccccggctccccgccagctcccgccccgaccgccctcgccacctgcatccccgaggaccgcgcgcccgtccgcggccccgggtccccgccgccacccccggcccgcgaagaccccgactcgccgcccggccgccccgaggactgcgcgccccctccggccgcgcccccgtcgctgaacaccgccctgctgcagaccctggggcacctgggcgacatcgcgaacatcctgggcccgctgcgcgaccagctgctgaccttgaaccagcacgtggagcagctgcgcggcgccttcgaccagacagtgtccctggccgtgggcttcattctgggcagcgcggccgccgagcgaggggtcctcagggacccgtgccagtgagtcccggctgcggccagtctcccctctccaggccgaggcccctccgccctgacccctcctgctgccttcccacccccgttcttgggtatgttcaataaaaggattgttttcctaga

SEQ ID NO: 33858 - DNA, 5344 bp, Homo sapiens
  source 1..5344: mol_type = unassigned DNA
cacggcgacggcggcggtggcggcagttcctgctctaggctgcgagcggctggcggcttcgaggggagctgaggcgcggaggggctcggcggcagcggcggcggctcggcactgttacctctcggtccggctggcgccggggcgcgcggtttggtcctttccgggcgcgcgggggcgacagcggcagcgacccgaggcctgcggcctaggcctcagcgcggcggcgggctcgagtgcagcgcggaaccggcccgagggccctacccggaggcaccatgagcgtggaggcgtacgggcccagctcgcagactctcactttcctggacacggaggaggccgagctgcttggcgccgacacacagggctccgagttcgagttcaccgactttactcttcctagccagacgcagacgccccccggcggccccggcggcccgggcggtggcggcgcgggaggcccgggcggcgcgggcgcgggcgctgcggcgggacagctcgacgcgcaggttgggcccgaaggcatcctgcagaacggggctgtggacgacagtgtagccaagaccagccagttgttggctgagttgaacttcgaggaagatgaagaagacacctattacacgaaggacctccccatacacgcctgcagttactgtggaatacacgatcctgcctgcgtggtttactgtaataccagcaagaagtggttctgcaacggacgtggaaatacttctggcagccacattgtaaatcaccttgtgagggcaaaatgcaaagaggtgaccctgcacaaggacgggcccctgggggagacagtcctggagtgctacaactgcggctgtcgcaacgtcttcctcctcggcttcatcccggccaaagctgactcagtggtggtgctgctgtgcaggcagccctgtgccagccagagcagcctcaaggacatcaactgggacagctcgcagtggcagccgctgatccaggaccgctgcttcctgtcctggctggtcaagatcccctccgagcaggagcagctgcgggcacgccagatcacggcacagcagatcaacaagctggaggagctgtggaaggaaaacccttctgccacgctggaggacctggagaagccgggggtggacgaggagccgcagcatgtcctcctgcggtacgaggacgcctaccagtaccagaacatattcgggcccctggtcaagctggaggccgactacgacaagaagctgaaggagtcccagactcaagataacatcactgtcaggtgggacctgggccttaacaagaagagaatcgcctacttcactttgcccaagactgactctgacatgcggctcatgcagggggatgagatatgcctgcggtacaaaggggaccttgcgcccctgtggaaagggatcggccacgtcatcaaggtccctgataattatggcgatgagatcgccattgagctgcggagcagcgtgggtgcacctgtggaggtgactcacaacttccaggtggattttgtgtggaagtcgacctcctttgacaggatgcagagcgcattgaaaacgtttgccgtggatgagacctcggtgtctggctacatctaccacaagctgttgggccacgaggtggaggacgtaatcatcaagtgccagctgcccaagcgcttcacggcgcagggcctccccgacctcaaccactcccaggtttatgccgtgaagactgtgctgcaaagaccactgagcctgatccagggcccgccaggcacggggaagacggtgacgtcggccaccatcgtctaccacctggcccggcaaggcaacgggccggtgctggtgtgtgctccgagcaacatcgccgtggaccagctaacggagaagatccaccagacggggctaaaggtcgtgcgcctctgcgccaagagccgtgaggccatcgactccccggtgtcttttctggccctgcacaaccagatcaggaacatggacagcatgcctgagctgcagaagctgcagcagctgaaagacgagactggggagctgtcgtctgccgacgagaagcggtaccgggccttgaagcgcaccgcagagagagagctgctgatgaacgcagatgtcatctgctgcacatgtgtgggcgccggtgacccgaggctggccaagatgcagttccgctccattttaatcgacgaaagcacccaggccaccgagccggagtgcatggttcccgtggtcctcggggccaagcagctgatccttgtaggcgaccactgccagctgggcccagtggtgatgtgcaagaaggcggccaaggccgggctgtcacagtcgctcttcgagcgcctggtggtgctgggcatccggcccatccgcctgcaggtccagtaccggatgcaccctgcactcagcgccttcccatccaacatcttctacgagggctccctccagaatggtgtcactgcagcggatcgtgtgaagaagggatttgacttccagtggccccaacccgataaaccgatgttcttctacgtgacccagggccaagaggagattgccagctcgggcacctcctacctgaacaggaccgaggctgcgaacgtggagaagatcaccacgaagttgctgaaggcaggcgccaagccggaccagattggcatcatcacgccctacgagggccagcgctcctacctggtgcagtacatgcagttcagcggctccctgcacaccaagctctaccaggaggtggagatcgccagtgtggacgcctttcagggacgcgagaaggacttcatcatcctgtcctgtgtgcgggccaacgagcaccaaggcattggctttttaaatgaccccaggcgtctgaacgtggccctgaccagagcaaggtatggcgtcatcattgtgggcaacccgaaggcactatcaaagcagccgctctggaaccacctgctgaactactataaggagcagaaggtgctggtggaggggccgctcaacaacctgcgtgagagcctcatgcagttcagcaagccacggaagctggtcaacactatcaacccgggagcccgcttcatgaccacagccatgtatgatgcccgggaggccatcatcccaggctccgtctatgatcggagcagccagggccggccttccagcatgtacttccagacccatgaccagattggcatgatcagtgccggccctagccacgtggctgccatgaacattcccatccccttcaacctggtcatgccacccatgccaccgcctggctattttggacaagccaacgggcctgctgcagggcgaggcaccccgaaaggcaagactggtcgtgggggacgccagaagaaccgctttgggcttcctggacccagccagactaacctccccaacagccaagccagccaggatgtggcgtcacagcccttctctcagggcgccctgacgcagggctacatctccatgagccagccttcccagatgagccagcccggcctctcccagccggagctgtcccaggacagttaccttggtgacgagtttaaatcacaaatcgacgtggcgctctcacaggactccacgtaccagggagagcgggcttaccagcatggcggggtgacggggctgtcccagtattaaaaggtggcggcggaagagctaagcaacgtggcttagtccatcagcatcttattctgggtaataaaaaataaaaataaacggatacctgttttccactgctaaaactgaagcaccactgtgtgagcaacaggaagggagagcgcacgagggagaggagccgaggccgagcgccccctgctggcccgcggcggcgaggagcagagggagcggaggaggggccggcccgcgggagccgcggccaccaggaggccccgctccgtcccatcggggctgcggccagggcggagggaggaagaccctcatctcagagtagccctttcctctgttcttttatttctttttctctttgattgaaaggggactacgtcttagcaggaaaaaaaacttcgcatttctgtgcccgagcaggctccttgcaaagacagcagcgtgcggggcagagccccgggagggcgcgtctgtccacgcctaccggacgcgccgaggtcgcgctgcctgtgttctccgagggccttcatttaaagaaaataagggtgttttgggtttttctctttgtttttttcaagattcttttaaaggagtactgaagaatactttcctaagtttgtctgtaaaatcttagcggtggacctgggagatttgagaagcttccagaaacagtttaaacaagccagcgctactggagaagaggagcaacacctgtgccgcggccggaggagttttgttgttggttttagcttccagtggcttctttctgcggggcatcaggctgctggggtagccgcccgccgagcctggaagctgctcgttctccgctggactcagaagccaagctgcttcccgcctagactcggcgcagggccccgcaccggtgaggaaggtgcttttggccccattgcgaggggccttggccaggactggccctgtggccaggaggcgagaaggtggctgttcccggattgacggctttttcccgggggcctttggaagatttggtggaaggacaagagggcctgtccctgtccccgtccccaggaggtaccgacagtccctgtgctggttagacacggagcgctgcacaccgaaagcccaaattgggagctctgcctgccggcaactttgctgatggggtgattgctgcttctggggggtaaggaaacaagttacagaaattaccgcgttctgtgtgaagggactgagggtgtggtgtcattggcagagggtcattttaggagagctgccccagcccctcgaacgcctggcttggggtgtcattctgcctggcggccaggcctccagcttcccctgccccgggcctggggctgtcactggccctgatccgaacacctccagattccggcttctacatgggacagacggggacgcacaggccaccttccttctggcagggactcttatttattcccattgctctagggctttcggtttccccttcttccggtaggccgcgtagaggcatgcaccgggtaggtttccgcggtgaccccgcggcggcctgagggacgctccctgccccatcccggctgttgggctgggccgctttgcctctgcttcgccctgtgctgtgttctccagctttgtagcagcagccttgacaaacccaggcgcactgtaccaaggcaatgtaacttttgattttcggtcaatttaagttcttttgtcaccaaatattaataaacagttttgacttc

SEQ ID NO: 33859 - DNA, 1740 bp, Homo sapiens
  source 1..1740: mol_type = unassigned DNA
atgccagctgagcgtaaaaagccagcaagtatggaagaaaaagactctttaccaaacaacaaggaaaaagactgcagtgaaaggcggacagtgagcagcaaggagaggccaaaagacgatatcaagctcactgccaagaaggaggtcagcaaggcccctgaagaatcaaagaaaaaagaagaggaagaaaaaaagaaacatcaagaggaagagagaaagaagcaagaagagcaggccaaacgtcagcaagaagaagaagcagctgctcagatgaaagaaaaagaagaatccattcagcttcatcaggaagcttgggaacgacatcatttaagaaaggaacttcgtagcaaaaaccaaaatgctccggacagccgaccagaggaaaacttcttcagccgcctcgactcaagtttgaagaaaaatactgcttttgtcaagaaactaaaaactattacagaacaacagagagactccttgtcccatgattttaatggcctaaatttaagcaaatacattgcagaagctgtagcttccatcgtggaagcaaaactaaaaatctctgatgtgaactgtgctgtgcacctctgctctctctttcaccagcgttatgctgactttgccccatcacttcttcaggtctggaaaaaacattttgaagcaaggaaagaggagaaaacacctaacatcaccaagttaagaactgatttgcgttttattgcagaattgacaatagttgggattttcactgacaaggaaggtctttccttaatctatgaacagctaaaaaatattattaatgctgatcgggagtcccacactcatgtctctgtagtgattagtttctgtcgacattgtggagatgatattgctggacttgtaccaaggaaagtaaagagtgctgcagagaagtttaatttgagttttcctcctagtgagataattagtccagagaaacaacagcccttccagaatcttttaaaagagtactttacgtctttgaccaaacacctgaaaagggaccacagggagctccagaatactgagagacaaaacaggcgcattctacattctaaaggggagctcagtgaagatagacataaacagtatgaggaatttgctatgtcttaccagaagctgctggcaaattctcaatccttagcagaccttttggatgaaaatatgccagatcttcctcaagacaaaccaacaccagaagaacatgggcctggaattgatatattcacacctggtaaacctggagaatatgacttggaaggtggtatatgggaagatgaagatgctcggaatttttatgagaacctcattgatttgaaggcttttgtcccagccatcttgtttaaagacaatgaaaaaagttgtcagaataaagagtccaacaaagatgataccaaagaggcaaaagaatctaaggagaataaggaggtatcaagtcccgatgatttggaacttgagttggagaatctagaaattaatgatgacaccttagaattagagggtggagatgaagctgaagatcttacaaagaaacttcttgatgaacaagaacaagaagatgaggaagccagcactggatctcatctcaagctcatagtagatgctttcctacagcagttacccaactgtgtcaaccgagatctgatagacaaggcggaaaaggccttttgtaatggaaatctcgcgagggttaatcttctcttgagaatggcagtcaagaaatga

SEQ ID NO: 33860 - DNA, 5569 bp, Homo sapiens
  source 1..5569: mol_type = unassigned DNA
gctgaaatactgacattgaatattatatgaaatagtgaactgccatctttcatggttgtcaaatgctagggttaaagctgactcaaaatgttcacagatatattctgaagtatttacaattaaatgacatattgttttggagttgatagtggctgaatctgagtgatgggtacgtggaggttccttatattatgctctctacttttgtctgggcttggatttttccttataaaaagtaaaaaacaagtacttagacataggcctaactaataatgataggatgtggaatgtgatgaataacttattttgtaacagaaatagtattcattttacctgcctttatttactcttttacaattgccaagttgcattaatatgttctgtttaaaaaaatagtgtgatatcattttaaaaagtcactgcatctatggtactgacattctttccctcttacagattgtcctgggtcacataatgccagctgagcgtaaaaagccagcaagtatggaagaaaaagactctttaccaaacaacaaggaaaaagactgcagtgaaaggcggacagtgagcagcaaggagaggccaaaagacgatatcaagctcactgccaagaaggaggtcagcaaggcccctgaagacaagaagaagagactggaagatgataagagaaaaaaggaagacaaggaacgcaagaaaaaagacgaagaaaaggtgaaggcagaggaagaatcaaagaaaaaagaagaggaagaaaaaaagaaacatcaagaggaagagagaaagaagcaagaagagcaggccaaacgtcagcaagaagaagaagcagctgctcagatgaaagaaaaagaagaatccattcagcttcatcaggaagcttgggaacgacatcatttaagaaaggaacttcgtagcaaaaaccaaaatgctccggacagccgaccagaggaaaacttcttcagccgcctcgactcaagtttgaagaaaaatactgcttttgtcaagaaactaaaaactattacagaacaacagagagactccttgtcccatgattttaatggcctaaatttaagcaaatacattgcagaagctgtagcttccatcgtggaagcaaaactaaaaatctctgatgtgaactgtgctgtgcacctctgctctctctttcaccagcgttatgctgactttgccccatcacttcttcaggtctggaaaaaacattttgaagcaaggaaagaggagaaaacacctaacatcaccaagttaagaactgatttgcgttttattgcagaattgacaatagttgggattttcactgacaaggaaggtctttccttaatctatgaacagctaaaaaatattattaatgctgatcgggagtcccacactcatgtctctgtagtgattagtttctgtcgacattgtggagatgatattgctggacttgtaccaaggaaagtaaagagtgctgcagagaagtttaatttgagttttcctcctagtgagataattagtccagagaaacaacagcccttccagaatcttttaaaagagtactttacgtctttgaccaaacacctgaaaagggaccacagggagctccagaatactgagagacaaaacaggcgcattctacattctaaaggggagctcagtgaagatagacataaacagtatgaggaatttgctatgtcttaccagaagctgctggcaaattctcaatccttagcagaccttttggatgaaaatatgccagatcttcctcaagacaaaccaacaccagaagaacatgggcctggaattgatatattcacacctggtaaacctggagaatatgacttggaaggtggtatatgggaagatgaagatgctcggaatttttatgagaacctcattgatttgaaggcttttgtcccagccatcttgtttaaagacaatgaaaaaagttgtcagaataaagagtccaacaaagatgataccaaagaggcaaaagaatctaaggagaataaggaggtatcaagtcccgatgatttggaacttgagttggagaatctagaaattaatgatgacaccttagaattagagggtggagatgaagctgaagatcttacaaagaaacttcttgatgaacaagaacaagaagatgaggaagccagcactggatctcatctcaagctcatagtagatgctttcctacagcagttacccaactgtgtcaaccgagatctgatagacaaggcagcaatggatttttgcatgaacatgaacacaaaagcaaacaggaagaagttggtacgggcactcttcatagttcctagacaaaggttggatttgctaccattttatgcaagattggttgctacattgcatccctgcatgtctgatgtagcagaggatctttgttccatgctgaggggggatttcagatttcatgtacggaaaaaggaccagatcaatattgaaacaaagaataaaactgttcgttttataggagaactaactaagtttaagatgttcaccaaaaatgacacactgcattgtttaaagatgcttctgtcagacttctctcatcaccatattgaaatggcatgcaccctgctggagacatgtggacggtttcttttcagatctccagaatctcacctgaggaccagtgtacttttggagcaaatgatgagaaagaagcaagcaatgcatcttgatgcgagatacgtcacaatggtagagaatgcatattactactgcaacccacctccagctgaaaaaaccgtgaaaaagaaacgtcctcctctccaggaatatgtccggaaacttttgtacaaggatctctctaaggttaccaccgagaaggttttgagacagatgcgaaagctgccctggcaggaccaagaagtgaaagactatgttatttgttgtatgataaacatctggaatgtgaaatataatagtattcattgtgtagccaacctcttagcaggactagtgctctaccaagaggatgttgggatccacgttgtggatggagtgttagaagatattcgattaggaatggaggttaatcaacctaaatttaatcagaggcgcatcagcagtgccaagttcttaggagaactttacaattaccgaatggtggaatcagctgttattttcagaactctgtattcttttacctcatttggtgttaatcctgatggctctccaagttccctggacccacctgagcatcttttcagaattagactcgtatgcactattctggacacatgtggccagtactttgacagaggttccagtaaacgaaaacttgattgtttccttgtatattttcagcgttatgtttggtggaagaaaagtttggaggtttggacaaaagaccatccatttcctattgatatagattacatgatcagtgatacactagaactgctaagaccaaagatcaaactctgtaattctctggaagaatccatcaggcaggtacaagacttggaacgagaattcttaataaaactaggcctagtaaatgacaaagactcaaaagattctatgacagaaggagaaaatcttgaagaggatgaagaagaagaagaaggtggggctgaaacagaagaacaatctggaaatgaaagtgaagtaaatgagccagaagaagaggagggttctgataatgatgatgatgagggagaagaagaggaggaagagaatacagattaccttacagattccaataaggaaaatgaaaccgatgaagagaatactgaggtaatgattaaaggcggtggacttaagcatgtaccttgtgtagaagatgaggacttcattcaagctctggataaaatgatgctagaaaatctacagcaacgaagtggtgaatctgttaaagtgcaccaactagatgttgccattcctttgcatctcaaaagccagctgaggaaagggcccccactgggaggtggggaaggagaggctgagtctgcagacacaatgccgtttgtcatgttaacaagaaaaggcaataaacagcagtttaagatccttaatgtacccatgtcctctcaacttgctgcaaatcactggaaccagcaacaggcagaacaagaagagaggatgagaatgaaaaagctcacactagatatcaatgaacggcaagaacaagaagattatcaagaaatgttgcagtctcttgcacagcgcccagctccagcaaacaccaatcgtgagaggcggcctcgctaccaacatccgaagggagcacctaatgcagatctaatctttaagactggtgggaggagacgttgatccagcagcacgtgtcatttcattaggtcctgtatctgatgttgtggttagtggagtcctccagcaattgaatgagagcagtggacacatctcagcaggtcggtctagagagttgcgaatctaaacctgggacaggctggggccaggaggcagaaacaccagcctctgccaacaccggaacaagccgacgcttccagacaaggcggaaaaggccttttgtaatggaaatctcgcgagggttaatcttctcttgagaatggcagtcaagaaatgagatggttcacttgactactgagcagttacaccaaggagagcgtgaaggagatgattgagccagagaagaaacgggttgtgatggtaatggtgtgggggaaatgaacttgagctttaaacttgatttgagtttcagtgtctctgaattgaacatcccacgttggaagaagatacatttgggggctccaggactacagtagaaaagtatagagcaagcaggaaaatcttctagtaaaacttacatgcaggacaacaaaatgatgaaagatatccaaataccagataatccaccaggaaggcttttgtttaggaatttgtttcaagaggaacaagggatgagggagaaaaatccgttttatccatcagagtcagtgctataaaattgcctattaaggtaaaagaaaaatgtggagactattttactatacagagagcattaattcagatggcttagaaaagtgataccagcccaagaacagggatctaggtgagcccattgtaagtatcattgaaaacaaaacatgcccgtcaacatgtcacagaaaacgaacgaaggacaacaagaagtggatgagaatattttgttgaccttcatgggtttacagcctctgtctctaaacaaagtatggaaacaagtagagcttttattttgcttttgtttttgttttgtttttttttttgttttcccccactaaatagaaatgagggtccttagtctgtttctgacaatctgttaatttcttaggacagctgtctttggtttgctttccagcaggcgtagtatatttagtcggagagcacatctgtatgcgacaacttgattacatctttttttctagctattttgcattttttcttttaccatgtttcagtttctgcatgtagatttaaataaaaaacaaaacttgtaaagttgtaacatttcacatggaaatgctgcccaatcttcaccagcttcagaaatctgacctttgccgatgctgcaataaagtgttgtaattta

SEQ ID NO: 33861 - DNA, 5193 bp, Homo sapiens
  source 1..5193: mol_type = unassigned DNA
gtggggggaggggaggggagagcccgagcgctggagttggtgctgggaaacccggggctaatgttgacaacaggctcgagattgtcctgggtcacataatgccagctgagcgtaaaaagccagcaagtatggaagaaaaagactctttaccaaacaacaaggaaaaagactgcagtgaaaggcggacagtgagcagcaaggagaggccaaaagacgatatcaagctcactgccaagaaggaggtcagcaaggcccctgaagacaagaagaagagactggaagatgataagagaaaaaaggaagacaaggaacgcaagaaaaaagacgaagaaaaggtgaaggcagaggaagaatcaaagaaaaaagaagaggaagaaaaaaagaaacatcaagaggaagagagaaagaagcaagaagagcaggccaaacgtcagcaagaagaagaagcagctgctcagatgaaagaaaaagaagaatccattcagcttcatcaggaagcttgggaacgacatcatttaagaaaggaacttcgtagcaaaaaccaaaatgctccggacagccgaccagaggaaaacttcttcagccgcctcgactcaagtttgaagaaaaatactgcttttgtcaagaaactaaaaactattacagaacaacagagagactccttgtcccatgattttaatggcctaaatttaagcaaatacattgcagaagctgtagcttccatcgtggaagcaaaactaaaaatctctgatgtgaactgtgctgtgcacctctgctctctctttcaccagcgttatgctgactttgccccatcacttcttcaggtctggaaaaaacattttgaagcaaggaaagaggagaaaacacctaacatcaccaagttaagaactgatttgcgttttattgcagaattgacaatagttgggattttcactgacaaggaaggtctttccttaatctatgaacagctaaaaaatattattaatgctgatcgggagtcccacactcatgtctctgtagtgattagtttctgtcgacattgtggagatgatattgctggacttgtaccaaggaaagtaaagagtgctgcagagaagtttaatttgagttttcctcctagtgagataattagtccagagaaacaacagcccttccagaatcttttaaaagagtactttacgtctttgaccaaacacctgaaaagggaccacagggagctccagaatactgagagacaaaacaggcgcattctacattctaaaggggagctcagtgaagatagacataaacagtatgaggaatttgctatgtcttaccagaagctgctggcaaattctcaatccttagcagaccttttggatgaaaatatgccagatcttcctcaagacaaaccaacaccagaagaacatgggcctggaattgatatattcacacctggtaaacctggagaatatgacttggaaggtggtatatgggaagatgaagatgctcggaatttttatgagaacctcattgatttgaaggcttttgtcccagccatcttgtttaaagacaatgaaaaaagttgtcagaataaagagtccaacaaagatgataccaaagaggcaaaagaatctaaggagaataaggaggtatcaagtcccgatgatttggaacttgagttggagaatctagaaattaatgatgacaccttagaattagagggtggagatgaagctgaagatcttacaaagaaacttcttgatgaacaagaacaagaagatgaggaagccagcactggatctcatctcaagctcatagtagatgctttcctacagcagttacccaactgtgtcaaccgagatctgatagacaaggcagcaatggatttttgcatgaacatgaacacaaaagcaaacaggaagaagttggtacgggcactcttcatagttcctagacaaaggttggatttgctaccattttatgcaagattggttgctacattgcatccctgcatgtctgatgtagcagaggatctttgttccatgctgaggggggatttcagatttcatgtacggaaaaaggaccagatcaatattgaaacaaagaataaaactgttcgttttataggagaactaactaagtttaagatgttcaccaaaaatgacacactgcattgtttaaagatgcttctgtcagacttctctcatcaccatattgaaatggcatgcaccctgctggagacatgtggacggtttcttttcagatctccagaatctcacctgaggaccagtgtacttttggagcaaatgatgagaaagaagcaagcaatgcatcttgatgcgagatacgtcacaatggtagagaatgcatattactactgcaacccacctccagctgaaaaaaccgtgaaaaagaaacgtcctcctctccaggaatatgtccggaaacttttgtacaaggatctctctaaggttaccaccgagaaggttttgagacagatgcgaaagctgccctggcaggaccaagaagtgaaagactatgttatttgttgtatgataaacatctggaatgtgaaatataatagtattcattgtgtagccaacctcttagcaggactagtgctctaccaagaggatgttgggatccacgttgtggatggagtgttagaagatattcgattaggaatggaggttaatcaacctaaatttaatcagaggcgcatcagcagtgccaagttcttaggagaactttacaattaccgaatggtggaatcagctgttattttcagaactctgtattcttttacctcatttggtgttaatcctgatggctctccaagttccctggacccacctgagcatcttttcagaattagactcgtatgcactattctggacacatgtggccagtactttgacagaggttccagtaaacgaaaacttgattgtttccttgtatattttcagcgttatgtttggtggaagaaaagtttggaggtttggacaaaagaccatccatttcctattgatatagattacatgatcagtgatacactagaactgctaagaccaaagatcaaactctgtaattctctggaagaatccatcaggcaggtacaagacttggaacgagaattcttaataaaactaggcctagtaaatgacaaagactcaaaagattctatgacagaaggagaaaatcttgaagaggatgaagaagaagaagaaggtggggctgaaacagaagaacaatctggaaatgaaagtgaagtaaatgagccagaagaagaggagggttctgataatgatgatgatgagggagaagaagaggaggaagagaatacagattaccttacagattccaataaggaaaatgaaaccgatgaagagaatactgaggtaatgattaaaggcggtggacttaagcatgtaccttgtgtagaagatgaggacttcattcaagctctggataaaatgatgctagaaaatctacagcaacgaagtggtgaatctgttaaagtgcaccaactagatgttgccattcctttgcatctcaaaagccagctgaggaaagggcccccactgggaggtggggaaggagaggctgagtctgcagacacaatgccgtttgtcatgttaacaagaaaaggcaataaacagcagtttaagatccttaatgtacccatgtcctctcaacttgctgcaaatcactggaaccagcaacaggcagaacaagaagagaggatgagaatgaaaaagctcacactagatatcaatgaacggcaagaacaagaagattatcaagaaatgttgcagtctcttgcacagcgcccagctccagcaaacaccaatcgtgagaggcggcctcgctaccaacatccgaagggagcacctaatgcagatctaatctttaagactggtgggaggagacgttgatccagcagcacgtgtcatttcattaggtcctgtatctgatgttgtggttagtggagtcctccagcaattgaatgagagcagtggacacatctcagcaggtcggtctagagagttgcgaatctaaacctgggacaggctggggccaggaggcagaaacaccagcctctgccaacaccggaacaagccgacgcttccagacaaggcggaaaaggccttttgtaatggaaatctcgcgagggttaatcttctcttgagaatggcagtcaagaaatgagatggttcacttgactactgagcagttacaccaaggagagcgtgaaggagatgattgagccagagaagaaacgggttgtgatggtaatggtgtgggggaaatgaacttgagctttaaacttgatttgagtttcagtgtctctgaattgaacatcccacgttggaagaagatacatttgggggctccaggactacagtagaaaagtatagagcaagcaggaaaatcttctagtaaaacttacatgcaggacaacaaaatgatgaaagatatccaaataccagataatccaccaggaaggcttttgtttaggaatttgtttcaagaggaacaagggatgagggagaaaaatccgttttatccatcagagtcagtgctataaaattgcctattaaggtaaaagaaaaatgtggagactattttactatacagagagcattaattcagatggcttagaaaagtgataccagcccaagaacagggatctaggtgagcccattgtaagtatcattgaaaacaaaacatgcccgtcaacatgtcacagaaaacgaacgaaggacaacaagaagtggatgagaatattttgttgaccttcatgggtttacagcctctgtctctaaacaaagtatggaaacaagtagagcttttattttgcttttgtttttgttttgtttttttttttgttttcccccactaaatagaaatgagggtccttagtctgtttctgacaatctgttaatttcttaggacagctgtctttggtttgctttccagcaggcgtagtatatttagtcggagagcacatctgtatgcgacaacttgattacatctttttttctagctattttgcattttttcttttaccatgtttcagtttctgcatgtagatttaaataaaaaacaaaacttgtaaagttgtaacatttcacatggaaatgctgcccaatcttcaccagcttcagaaatctgacctttgccgatgctgcaataaagtgttgtaattta

SEQ ID NO: 33862 - DNA, 1935 bp, Homo sapiens
  source 1..1935: mol_type = unassigned DNA
cccaactgtgtcaaccgagatctgatagacaaggcagcaatggatttttgcatgaacatgaacacaaaagcaaacaggaagaagttggtacgggcactcttcatagttcctagacaaaggttggatttgctaccattttatgcaagattggttgctacattgcatccctgcatgtctgatgtagcagaggatctttgttccatgctgaggggggatttcagatttcatgtacggaaaaaggaccagatcaatattgaaacaaagaataaaactgttcgttttataggagaactaactaagtttaagatgttcaccaaaaatgacacactgcattgtttaaagatgcttctgtcagacttctctcatcaccatattgaaatggcatgcaccctgctggagacatgtggacggtttcttttcagatctccagaatctcacctgaggaccagtgtacttttggagcaaatgatgagaaagaagcaagcaatgcatcttgatgcgagatacgtcacaatggtagagaatgcatattactactgcaacccacctccagctgaaaaaaccgtgaaaaagaaacgtcctcctctccaggaatatgtccggaaacttttgtacaaggatctctctaaggttaccaccgagaaggttttgagacagatgcgaaagctgccctggcaggaccaagaagtgaaagactatgttatttgttgtatgataaacatctggaatgtgaaatataatagtattcattgtgtagccaacctcttagcaggactagtgctctaccaagaggatgttgggatccacgttgtggatggagtgttagaagatattcgattaggaatggaggttaatcaacctaaatttaatcagaggcgcatcagcagtgccaagttcttaggagaactttacaattaccgaatggtggaatcagctgttattttcagaactctgtattcttttacctcatttggtgttaatcctgatggctctccaagttccctggacccacctgagcatcttttcagaattagactcgtatgcactattctggacacatgtggccagtactttgacagaggttccagtaaacgaaaacttgattgtttccttgtatattttcagcgttatgtttggtggaagaaaagtttggaggtttggacaaaagaccatccatttcctattgatatagattacatgatcagtgatacactagaactgctaagaccaaagatcaaactctgtaattctctggaagaatccatcaggcaggtacaagacttggaacgagaattcttaataaaactaggcctagtaaatgacaaagactcaaaagattctatgacagaaggagaaaatcttgaagaggatgaagaagaagaagaaggtggggctgaaacagaagaacaatctggaaatgaaagtgaagtaaatgagccagaagaagaggagggttctgataatgatgatgatgagggagaagaagaggaggaagagaatacagattaccttacagattccaataaggaaaatgaaaccgatgaagagaatactgaggtaatgattaaaggcggtggacttaagcatgtaccttgtgtagaagatgaggacttcattcaagctctggataaaatgatgctagaaaatctacagcaacgaagtggtgaatctgttaaagtgcaccaactagatgttgccattcctttgcatctcaaaagccagctgaggaaagggcccccactgggaggtggggaaggagaggctgagtctgcagacacaatgccgtttgtcatgttaacaagaaaaggcaataaacagcagtttaagatccttaatgtacccatgtcctctcaacttgctgcaaatcactggaaccagcaacaggcagaaagaagagaggatgagaatgaaaaagctcacactagatatcaatga

SEQ ID NO: 33863 - DNA, 2840 bp, Homo sapiens
  source 1..2840: mol_type = unassigned DNA
gtggggggaggggaggggagagcccgagcgctggagttggtgctgggaaacccggggctaatgttgacaacaggctcgagattgtcctgggtcacataatgccagctgagcgtaaaaagccagcaagtatggaagaaaaagactctttaccaaacaacaaggaaaaagactgcagtgaaaggcggacagtgagcagcaaggagaggccaaaagacgatatcaagctcactgccaagaaggaggtcagcaaggcccctgaagaatcaaagaaaaaagaagaggaagaaaaaaagaaacatcaagaggaagagagaaagaagcaagaagagcaggccaaacgtcagcaagaagaagaagcagctgctcagatgaaagaaaaagaagaatccattcagcttcatcaggaagcttgggaacgacatcatttaagaaaggaacttcgtagcaaaaaccaaaatgctccggacagccgaccagaggaaaacttcttcagccgcctcgactcaagtttgaagaaaaatactgcttttgtcaagaaactaaaaactattacagaacaacagagagactccttgtcccatgattttaatggcctaaatttaagcaaatacattgcagaagctgtagcttccatcgtggaagcaaaactaaaaatctctgatgtgaactgtgctgtgcacctctgctctctctttcaccagcgttatgctgactttgccccatcacttcttcaggtctggaaaaaacattttgaagcaaggaaagaggagaaaacacctaacatcaccaagttaagaactgatttgcgttttattgcagaattgacaatagttgggattttcactgacaaggaaggtctttccttaatctatgaacagctaaaaaatattattaatgctgatcgggagtcccacactcatgtctctgtagtgattagtttctgtcgacattgtggagatgatattgctggacttgtaccaaggaaagtaaagagtgctgcagagaagtttaatttgagttttcctcctagtgagataattagtccagagaaacaacagcccttccagaatcttttaaaagagtactttacgtctttgaccaaacacctgaaaagggaccacagggagctccagaatactgagagacaaaacaggcgcattctacattctaaaggggagctcagtgaagatagacataaacagtatgaggaatttgctatgtcttaccagaagctgctggcaaattctcaatccttagcagaccttttggatgaaaatatgccagatcttcctcaagacaaaccaacaccagaagaacatgggcctggaattgatatattcacacctggtaaacctggagaatatgacttggaaggtggtatatgggaagatgaagatgctcggaatttttatgagaacctcattgatttgaaggcttttgtcccagccatcttgtttaaagacaatgaaaaaagttgtcagaataaagagtccaacaaagatgataccaaagaggcaaaagaatctaaggagaataaggaggtatcaagtcccgatgatttggaacttgagttggagaatctagaaattaatgatgacaccttagaattagagggtggagatgaagctgaagatcttacaaagaaacttcttgatgaacaagaacaagaagatgaggaagccagcactggatctcatctcaagctcatagtagatgctttcctacagcagttacccaactgtgtcaaccgagatctgatagacaaggcggaaaaggccttttgtaatggaaatctcgcgagggttaatcttctcttgagaatggcagtcaagaaatgagatggttcacttgactactgagcagttacaccaaggagagcgtgaaggagatgattgagccagagaagaaacgggttgtgatggtaatggtgtgggggaaatgaacttgagctttaaacttgatttgagtttcagtgtctctgaattgaacatcccacgttggaagaagatacatttgggggctccaggactacagtagaaaagtatagagcaagcaggaaaatcttctagtaaaacttacatgcaggacaacaaaatgatgaaagatatccaaataccagataatccaccaggaaggcttttgtttaggaatttgtttcaagaggaacaagggatgagggagaaaaatccgttttatccatcagagtcagtgctataaaattgcctattaaggtaaaagaaaaatgtggagactattttactatacagagagcattaattcagatggcttagaaaagtgataccagcccaagaacagggatctaggtgagcccattgtaagtatcattgaaaacaaaacatgcccgtcaacatgtcacagaaaacgaacgaaggacaacaagaagtggatgagaatattttgttgaccttcatgggtttacagcctctgtctctaaacaaagtatggaaacaagtagagcttttattttgcttttgtttttgttttgtttttttttttgttttcccccactaaatagaaatgagggtccttagtctgtttctgacaatctgttaatttcttaggacagctgtctttggtttgctttccagcaggcgtagtatatttagtcggagagcacatctgtatgcgacaacttgattacatctttttttctagctattttgcattttttcttttaccatgtttcagtttctgcatgtagatttaaataaaaaacaaaacttgtaaagttgtaacatttcacatggaaatgctgcccaatcttcaccagcttcagaaatctgacctttgccgatgctgcaataaagtgttgtaattta

SEQ ID NO: 33864 - DNA, 5223 bp, Homo sapiens
  source 1..5223: mol_type = unassigned DNA
gcatgccgcagggaagacgatcaggactgtttttaatcgggcagtcgcgcggatggccttttccctctcgcctccttccgccccgcccccactctcagcccggccgcgctgattgtcctgggtcacataatgccagctgagcgtaaaaagccagcaagtatggaagaaaaagactctttaccaaacaacaaggaaaaagactgcagtgaaaggcggacagtgagcagcaaggagaggccaaaagacgatatcaagctcactgccaagaaggaggtcagcaaggcccctgaagacaagaagaagagactggaagatgataagagaaaaaaggaagacaaggaacgcaagaaaaaagacgaagaaaaggtgaaggcagaggaagaatcaaagaaaaaagaagaggaagaaaaaaagaaacatcaagaggaagagagaaagaagcaagaagagcaggccaaacgtcagcaagaagaagaagcagctgctcagatgaaagaaaaagaagaatccattcagcttcatcaggaagcttgggaacgacatcatttaagaaaggaacttcgtagcaaaaaccaaaatgctccggacagccgaccagaggaaaacttcttcagccgcctcgactcaagtttgaagaaaaatactgcttttgtcaagaaactaaaaactattacagaacaacagagagactccttgtcccatgattttaatggcctaaatttaagcaaatacattgcagaagctgtagcttccatcgtggaagcaaaactaaaaatctctgatgtgaactgtgctgtgcacctctgctctctctttcaccagcgttatgctgactttgccccatcacttcttcaggtctggaaaaaacattttgaagcaaggaaagaggagaaaacacctaacatcaccaagttaagaactgatttgcgttttattgcagaattgacaatagttgggattttcactgacaaggaaggtctttccttaatctatgaacagctaaaaaatattattaatgctgatcgggagtcccacactcatgtctctgtagtgattagtttctgtcgacattgtggagatgatattgctggacttgtaccaaggaaagtaaagagtgctgcagagaagtttaatttgagttttcctcctagtgagataattagtccagagaaacaacagcccttccagaatcttttaaaagagtactttacgtctttgaccaaacacctgaaaagggaccacagggagctccagaatactgagagacaaaacaggcgcattctacattctaaaggggagctcagtgaagatagacataaacagtatgaggaatttgctatgtcttaccagaagctgctggcaaattctcaatccttagcagaccttttggatgaaaatatgccagatcttcctcaagacaaaccaacaccagaagaacatgggcctggaattgatatattcacacctggtaaacctggagaatatgacttggaaggtggtatatgggaagatgaagatgctcggaatttttatgagaacctcattgatttgaaggcttttgtcccagccatcttgtttaaagacaatgaaaaaagttgtcagaataaagagtccaacaaagatgataccaaagaggcaaaagaatctaaggagaataaggaggtatcaagtcccgatgatttggaacttgagttggagaatctagaaattaatgatgacaccttagaattagagggtggagatgaagctgaagatcttacaaagaaacttcttgatgaacaagaacaagaagatgaggaagccagcactggatctcatctcaagctcatagtagatgctttcctacagcagttacccaactgtgtcaaccgagatctgatagacaaggcagcaatggatttttgcatgaacatgaacacaaaagcaaacaggaagaagttggtacgggcactcttcatagttcctagacaaaggttggatttgctaccattttatgcaagattggttgctacattgcatccctgcatgtctgatgtagcagaggatctttgttccatgctgaggggggatttcagatttcatgtacggaaaaaggaccagatcaatattgaaacaaagaataaaactgttcgttttataggagaactaactaagtttaagatgttcaccaaaaatgacacactgcattgtttaaagatgcttctgtcagacttctctcatcaccatattgaaatggcatgcaccctgctggagacatgtggacggtttcttttcagatctccagaatctcacctgaggaccagtgtacttttggagcaaatgatgagaaagaagcaagcaatgcatcttgatgcgagatacgtcacaatggtagagaatgcatattactactgcaacccacctccagctgaaaaaaccgtgaaaaagaaacgtcctcctctccaggaatatgtccggaaacttttgtacaaggatctctctaaggttaccaccgagaaggttttgagacagatgcgaaagctgccctggcaggaccaagaagtgaaagactatgttatttgttgtatgataaacatctggaatgtgaaatataatagtattcattgtgtagccaacctcttagcaggactagtgctctaccaagaggatgttgggatccacgttgtggatggagtgttagaagatattcgattaggaatggaggttaatcaacctaaatttaatcagaggcgcatcagcagtgccaagttcttaggagaactttacaattaccgaatggtggaatcagctgttattttcagaactctgtattcttttacctcatttggtgttaatcctgatggctctccaagttccctggacccacctgagcatcttttcagaattagactcgtatgcactattctggacacatgtggccagtactttgacagaggttccagtaaacgaaaacttgattgtttccttgtatattttcagcgttatgtttggtggaagaaaagtttggaggtttggacaaaagaccatccatttcctattgatatagattacatgatcagtgatacactagaactgctaagaccaaagatcaaactctgtaattctctggaagaatccatcaggcaggtacaagacttggaacgagaattcttaataaaactaggcctagtaaatgacaaagactcaaaagattctatgacagaaggagaaaatcttgaagaggatgaagaagaagaagaaggtggggctgaaacagaagaacaatctggaaatgaaagtgaagtaaatgagccagaagaagaggagggttctgataatgatgatgatgagggagaagaagaggaggaagagaatacagattaccttacagattccaataaggaaaatgaaaccgatgaagagaatactgaggtaatgattaaaggcggtggacttaagcatgtaccttgtgtagaagatgaggacttcattcaagctctggataaaatgatgctagaaaatctacagcaacgaagtggtgaatctgttaaagtgcaccaactagatgttgccattcctttgcatctcaaaagccagctgaggaaagggcccccactgggaggtggggaaggagaggctgagtctgcagacacaatgccgtttgtcatgttaacaagaaaaggcaataaacagcagtttaagatccttaatgtacccatgtcctctcaacttgctgcaaatcactggaaccagcaacaggcagaacaagaagagaggatgagaatgaaaaagctcacactagatatcaatgaacggcaagaacaagaagattatcaagaaatgttgcagtctcttgcacagcgcccagctccagcaaacaccaatcgtgagaggcggcctcgctaccaacatccgaagggagcacctaatgcagatctaatctttaagactggtgggaggagacgttgatccagcagcacgtgtcatttcattaggtcctgtatctgatgttgtggttagtggagtcctccagcaattgaatgagagcagtggacacatctcagcaggtcggtctagagagttgcgaatctaaacctgggacaggctggggccaggaggcagaaacaccagcctctgccaacaccggaacaagccgacgcttccagacaaggcggaaaaggccttttgtaatggaaatctcgcgagggttaatcttctcttgagaatggcagtcaagaaatgagatggttcacttgactactgagcagttacaccaaggagagcgtgaaggagatgattgagccagagaagaaacgggttgtgatggtaatggtgtgggggaaatgaacttgagctttaaacttgatttgagtttcagtgtctctgaattgaacatcccacgttggaagaagatacatttgggggctccaggactacagtagaaaagtatagagcaagcaggaaaatcttctagtaaaacttacatgcaggacaacaaaatgatgaaagatatccaaataccagataatccaccaggaaggcttttgtttaggaatttgtttcaagaggaacaagggatgagggagaaaaatccgttttatccatcagagtcagtgctataaaattgcctattaaggtaaaagaaaaatgtggagactattttactatacagagagcattaattcagatggcttagaaaagtgataccagcccaagaacagggatctaggtgagcccattgtaagtatcattgaaaacaaaacatgcccgtcaacatgtcacagaaaacgaacgaaggacaacaagaagtggatgagaatattttgttgaccttcatgggtttacagcctctgtctctaaacaaagtatggaaacaagtagagcttttattttgcttttgtttttgttttgtttttttttttgttttcccccactaaatagaaatgagggtccttagtctgtttctgacaatctgttaatttcttaggacagctgtctttggtttgctttccagcaggcgtagtatatttagtcggagagcacatctgtatgcgacaacttgattacatctttttttctagctattttgcattttttcttttaccatgtttcagtttctgcatgtagatttaaataaaaaacaaaacttgtaaagttgtaacatttcacatggaaatgctgcccaatcttcaccagcttcagaaatctgacctttgccgatgctgcaataaagtgttgtaattt

SEQ ID NO: 33865 - DNA, 2235 bp, Homo sapiens
  source 1..2235: mol_type = unassigned DNA
ggagagtgcggcatgcgctcggaaaaggagggggccggaggccttcgggcggccgttgccgcgcggggcccgagcgggagggagaagctgtcggccctagaagtgcagttccaccgcgactcgcagcagcaggaggctgagacgccgccaacttcgtcctccggttgcgggggcggtgcgggcaaacctcgcgaggagaagaggacggccctgagcaaggtggtcatccgccgcctgcctccgggcctcaccaaggagcagctggaggagcagctgcgcccgctgccagcacacgactacttcgagttcttcgccgccgacctgagtctttatcctcatctctactcaagagcatacattaattttaggaatcctgatgacatccttctttttagagatcgttttgatggatatatcttccttgacagcaaagatccagaatataagaagtttttagaaacctactgtgtggaggaagagaagaccagtgccaaccctgagactctgctgggggagatggaggcgaagacaagagagctcattgctagaagaaccacacctcttttggaatatattaaaaatagaaaattagaaaagcagagaattcgagaagagaagcgagaagaacggaggaggagagagttagaaaagaaacgtttgcgggaagaggaaaaaagaagaagaagagaagaagaaagatgcaaaaaaaaagagacagataaacagaagaaaattgcagagaaagaagtaaggattaagcttcttaagaaaccagaaaagggagaggaaccaaccacagagaaaccaaaagaaagaggagaggagattgatactggaggtggcaagcaggaatcctgtgcccccggtgcagtcgtaaaagccaggcccatggaaggctcgctggaggagccccaggagacgtcacacagcggcagtgataaagagcacagggatgtggagagatctcaagaacaagaatctgaagcacaaagataccatgtggatgacggcaggaggcacagagctcaccacgagcctgaacggctttccagaaggagtgaggatgagcagagatgggggaaaggacctggccaagacagagggaagaaggggagccaggacagcggggctccgggggaggccatggagagactgggaagagcgcagaggtgtgacgacagtccagcacccagaaaagagcgactggcaaacaaggaccggccagccttgcagctgtatgatccaggagctcgcttccgagcgcgagagtgtggcggaaacaggaggatctgcaaggcagaaggttcggggactggtcctgagaagagggaagaggcagagtgagtcactgcacgcacctggcctccatggacgagcaagggcatcccagaaacgtgtaaatgaccccgagtgtgactgggaaggagaacttattccttaccaggaaactggaagctaaaaatacagagggtgacgtagaaacacgcagaaaccattctaaagaaagtagtgatcttgtattaaattgagcagaattctcacagattttaccattcctgttataaactagtatttgttgtttagccaaaacagaaaatgatttccactggacagtagaaaaatatgtgtaaaatagggaagaaagttagtattggatcagtgtgagtcctgaagcactttcagtgctgtgagaacgacatccactttgggtttcattcgtttgtaagcagaggagctgtcagtcactcgtgcttctcggtggcctctgagccatggtgtcgagtgaagagtagttcttgtttgttacaacctttgtgagtcagccatgcccgcaaagcgtgctgtgttttagtcctggtaggaatatttatcagagttcacactatataaaacccaacagcttcaactattgccctttcaacagttttgccactgaccggatagaaacggtttcagtctctggatggatgtgtttgtggtttgtaaccattacggtttaaaccatggtttaagaatttgcccaaataacagaaattttgttcgggaagggataaactagatatagcatacagagcctgtttttgagttttagatactttatttgtaaataacttaaaatagctttctgaaaccgtgcattctgtagtttcttcctttcagtgaaattgctaaatgtcaatgtatttttggcactgcgattttaaccatttattaaataaaaattttgttaaagaa

SEQ ID NO: 33866 - DNA, 2378 bp, Homo sapiens
  source 1..2378: mol_type = unassigned DNA
agctctcgcgaggtttcgtcgggggctggcggctgcggctcggcggagagtgcggcatgcgctcggaaaaggagggggccggaggccttcgggcggccgttgccgcgcggggcccgagcgggagggagaagctgtcggccctagaagtgcagttccaccgcgactcgcagcagcaggaggctgagacgccgccaacttcgtcctccggttgcgggggcggtgcgggcaaacctcgcgaggagaagaggacggccctgagcaaggtggtcatccgccgcctgcctccgggcctcaccaaggagcagctggaggagcagctgcgcccgctgccagcacacgactacttcgagttcttcgccgccgacctgagtctttatcctcatctctactcaagagcatacattaattttaggaatcctgatgacatccttctttttagagatcgttttgatggatatatcttccttgacagcaaaggcctagaatatcctgcagtggtagagtttgctccattccagaagatagccaaaaagaagctgagaaaaaaagatgccaagactggaagcatcgaagatgatccagaatataagaagtttttagaaacctactgtgtggaggaagagaagaccagtgccaaccctgagactctgctgggggagatggaggcgaagacaagagagctcattgctagaagaaccacacctcttttggaatatattaaaaatagaaaattagaaaagcagagaattcgagaagagaagcgagaagaacggaggaggagagagttagaaaagaaacgtttgcgggaagaggaaaaaagaagaagaagagaagaagaaagatgcaaaaaaaaagagacagataaacagaagaaaattgcagagaaagaagtaaggattaagcttcttaagaaaccagaaaagggagaggaaccaaccacagagaaaccaaaagaaagaggagaggagattgatactggaggtggcaagcaggaatcctgtgcccccggtgcagtcgtaaaagccaggcccatggaaggctcgctggaggagccccaggagacgtcacacagcggcagtgataaagagcacagggatgtggagagatctcaagaacaagaatctgaagcacaaagataccatgtggatgacggcaggaggcacagagctcaccacgagcctgaacggctttccagaaggagtgaggatgagcagagatgggggaaaggacctggccaagacagagggaagaaggggagccaggacagcggggctccgggggaggccatggagagactgggaagagcgcagaggtgtgacgacagtccagcacccagaaaagagcgactggcaaacaaggaccggccagccttgcagctgtatgatccaggagctcgcttccgagcgcgagagtgtggcggaaacaggaggatctgcaaggcagaaggttcggggactggtcctgagaagagggaagaggcagagtgagtcactgcacgcacctggcctccatggacgagcaagggcatcccagaaacgtgtaaatgaccccgagtgtgactgggaaggagaacttattccttaccaggaaactggaagctaaaaatacagagggtgacgtagaaacacgcagaaaccattctaaagaaagtagtgatcttgtattaaattgagcagaattctcacagattttaccattcctgttataaactagtatttgttgtttagccaaaacagaaaatgatttccactggacagtagaaaaatatgtgtaaaatagggaagaaagttagtattggatcagtgtgagtcctgaagcactttcagtgctgtgagaacgacatccactttgggtttcattcgtttgtaagcagaggagctgtcagtcactcgtgcttctcggtggcctctgagccatggtgtcgagtgaagagtagttcttgtttgttacaacctttgtgagtcagccatgcccgcaaagcgtgctgtgttttagtcctggtaggaatatttatcagagttcacactatataaaacccaacagcttcaactattgccctttcaacagttttgccactgaccggatagaaacggtttcagtctctggatggatgtgtttgtggtttgtaaccattacggtttaaaccatggtttaagaatttgcccaaataacagaaattttgttcgggaagggataaactagatatagcatacagagcctgtttttgagttttagatactttatttgtaaataacttaaaatagctttctgaaaccgtgcattctgtagtttcttcctttcagtgaaattgctaaatgtcaatgtatttttggcactgcgattttaaccatttattaaataaaaattttgttaaagaa

SEQ ID NO: 33867 - DNA, 1464 bp, Homo sapiens
  source 1..1464: mol_type = unassigned DNA
ggaaaaggagggggccggaggccttcgggcggccgttgccgcgcggggcccgagcgggagggagaagctgtcggccctagaagtgcagttccaccgcgactcgcagcagcaggaggctgagacgccgccaacttcgtcctccggttgcgggggcggtgcgggcaaacctcgcgaggagaagaggacggccctgagcaaggtggtcatccgccgcctgcctccgggcctcaccaaggagcagctggaggagcagctgcgcccgctgccagcacacgactacttcgagttcttcgccgccgacctgagtctttatcctcatctctactcaagagcatacattaattttaggaatcctgatgacatccttctttttagagatcgttttgatggatatatcttccttgacagcaaaggcctagaatatcctgcagtggtagagtttgctccattccagaagatagccaaaaagaagctgagaaaaaaagatgccaagactggaagcatcgaagatgatccagaatataagaagtttttagaaacctactgtgtggaggaagagaagaccagtgccaaccctgagactctgctgggggagatggaggcgaagacaagagagctcattgctagaagaaccacacctcttttggaatatattaaaaatagaaaattagaaaagcagagaattcgagaagagaagcgagaagaacggaggaggagagagttagaaaagaaacgtttgcgggaagaggaaaaaagaagaagaagagaagaagaaagatgcaaaaaaaaagagacagataaacagaagaaaattgcagagaaagaagtaaggattaagcttcttaagaaaccagaaaagggagaggaaccaaccacagagaaaccaaaagaaagaggagaggagattgatactggaggtggcaagcaggaatcctgtgcccccggtgcagtcgtaaaagccaggcccatggaaggctcgctggaggagccccaggagacgtcacacagcggcagtgataaagagcacagggatgtggagagatctcaagaacaagaatctgaagcacccagaaaagagcgactggcaaacaaggaccggccagccttgcagctgtatgatccaggagctcgcttccgagcgcgagagtgtggcggaaacaggaggatctgcaaggcagaaggttcggggactggtcctgagaagagggaagaggcagagtgagtcactgcacgcacctggcctccatggacgagcaagggcatcccagaaacgtgtaaatgaccccgagtgtgactgggaaggagaacttattccttaccaggaaactggaagctaaaaatacagagggtgacgtagaaacacgcagaaaccattctaaagaaagtagtgatcttgtattaaattgagcagaattctcacagattttaccattcctgttataaactagtatttgttgtttagcc

SEQ ID NO: 33868 - DNA, 2378 bp, Homo sapiens
  source 1..2378: mol_type = unassigned DNA
gcttcccgggagccgtttgtgcccggggtaaccccgttccggccaagccgcttcagcgggggacgtagccatgaaggaagagaaggagcacaggcctaaggagaagcgagtaaccctgttaacccccgccggggccacaggcagcggtggtgggacctcgggggacagctccaagggggaagataagcaggatcgcaacaaggagaagaaagaagcgctgagcaaggtggtaattcgaagattacctcccactttgaccaaggagcagcttcaggaacatcttcaacctatgcctgagcatgattattttgagtttttttctaatgatacgagtttgtatcctcatatgtatgccagagcatacatcaactttaaaaaccaagaggacattattttgttcagggatcgctttgatggttatgtattccttgacaataaaggtcaggaatatcccgctatagtagaatttgcaccttttcaaaaagctgcaaaaaagaagactaagaaaagagataccaaagtcgggactatcgatgatgatccagaatatagaaagtttttggaaagttatgccacagataatgagaaaatgacatctactccagagacactgctagaggaaatagaagcaaaaaatagagaattaatagctaaaaagacaaccccacttttgagcttcctgaaaaacaagcagagaatgagagaagaaaagagagaagaaaggaggaggagagaaatagaaagaaaaagacaaagagaagaagagaggaggaaatggaaagaagaagagaaacgaaaaaggaaagatatagaaaagctaaagaagatagacagaattccagaaagggacaaattaaaggatgaaccaaagattaaggtacacaggtttctgttacaagctgtgaatcagaaaaatctgctcaagaagccagaaaaaggagatgaaaaagaattggacaaaagagaaaaagccaagaaattggacaaagagaatctcagtgatgaaagagccagtgggcaaagttgtacattgcccaagcgttctgatagcgaacttaaagatgaaaaaccaaagagacctgaagatgagagcggcagagactatagggagagggaacgggaatatgaacgagatcaggagcgcatacttcgagaaagagagaggctgaagcggcaagaagaagagcgccgtaggcagaaggagcgctatgagaaagagaagacttttaagagaaaagaagaagaaatgaaaaaagagaaagacacacttcgggataaaggaaagaaggctgaaagtacagaatcaataggcagctcagaaaaaactgaaaagaaagaagaagtggtcaagagagatcgaataagaaacaaggatcgtccagcgatgcagctttaccaaccaggagctcgaagccgaaatcgactctgtccccctgatgacagcaccaagtctggagattcagcagcagaaaggaagcaggaaagtggtattagccatagaaaagaaggaggagaggagtgataagtccagatggccttaggtgtcctgactgtctaggcagccaaagagcacacgttaagcaatccagaggtgccttcagggcaaagaatagagagaaagggagccgctgtgctggtggggtacactgcagaggagtaagtcttgtgtcaaagcaggaatctgatcagaggttcagaattggaagtacaatttcattgcttttgcaatttctacaaattaattttaaagtgtcagaaaaaggtgacggcaaggacatgcattgcaatttgcagggggaattgtcaagtgaggacttcatcacatatgacacgagagaaaagtaagagctggttctaaaatcaaaagctgttgttcatcctgaattgaattttctgaatttgggtggagcagagtcgctttgaagccttgttccgatctaattctattgtattgttgatgataagtgttgacattgggtagtgtagaagcaacaagcatgtccttgtagtacaggtacagtgaaggatagaacacactttcgttgatacaaaaatttaaatagttatgttacttctgtatccagtgtcctaaagttttaggattagttttagttttttgtttgcttatatgagcttagcgtaaagaatatttttaaacttcgtgttttgtcatcagcatcttttctattaagaggtaaaatgtagtccttgtttgactcttgacaatccagtgtgtttgatcttaggtctcatgatctgagtgcataccctctccaggaaggaaactgcaccagtgtctattcctgttaaatagcaacttttagtctcagcttgtttcgttttgatgtcaataaatagtaacagcattcaagtgtgaa

SEQ ID NO: 33869 - DNA, 2335 bp, Homo sapiens
  source 1..2335: mol_type = unassigned DNA
gcttcccgggagccgtttgtgcccggggtaaccccgttccggccaagccgcttcagcgggggacgtagccatgaaggaagagaaggagcacaggcctaaggagaagcgagtaaccctgttaacccccgccggggccacaggcagcggtggtgggacctcgggggacagctccaagggggaagataagcaggatcgcaacaaggagaagaaagaagcgctgagcaaggtggtaattcgaagattacctcccactttgaccaaggagcagcttcaggaacatcttcaacctatgcctgagcatgattattttgagtttttttctaatgatacgagtttgtatcctcatatgtatgccagagcatacatcaactttaaaaaccaagaggacattattttgttcagggatcgctttgatggttatgtattccttgacaataaaggtcaggaatatcccgctatagtagaatttgcaccttttcaaaaagctgcaaaaaagaagactaagaaaagagataccaaagtcgggactatcgatgatgatccagaatatagaaagtttttggaaagttatgccacagataatgagaaaatgacatctactccagagacactgctagaggaaatagaagcaaaaaatagagaattaatagctaaaaagacaaccccacttttgagcttcctgaaaaacaagcagagaatgagagaagaaaagagagaagaaaggaggaggagagaaatagaaagaaaaagacaaagagaagaagagaggaggaaatggaaagaagaagagaaacgaaaaaggaaagatatagaaaagctaaagaagatagacagaattccagaaagggacaaattaaaggatgaaccaaagattaagctgctcaagaagccagaaaaaggagatgaaaaagaattggacaaaagagaaaaagccaagaaattggacaaagagaatctcagtgatgaaagagccagtgggcaaagttgtacattgcccaagcgttctgatagcgaacttaaagatgaaaaaccaaagagacctgaagatgagagcggcagagactatagggagagggaacgggaatatgaacgagatcaggagcgcatacttcgagaaagagagaggctgaagcggcaagaagaagagcgccgtaggcagaaggagcgctatgagaaagagaagacttttaagagaaaagaagaagaaatgaaaaaagagaaagacacacttcgggataaaggaaagaaggctgaaagtacagaatcaataggcagctcagaaaaaactgaaaagaaagaagaagtggtcaagagagatcgaataagaaacaaggatcgtccagcgatgcagctttaccaaccaggagctcgaagccgaaatcgactctgtccccctgatgacagcaccaagtctggagattcagcagcagaaaggaagcaggaaagtggtattagccatagaaaagaaggaggagaggagtgataagtccagatggccttaggtgtcctgactgtctaggcagccaaagagcacacgttaagcaatccagaggtgccttcagggcaaagaatagagagaaagggagccgctgtgctggtggggtacactgcagaggagtaagtcttgtgtcaaagcaggaatctgatcagaggttcagaattggaagtacaatttcattgcttttgcaatttctacaaattaattttaaagtgtcagaaaaaggtgacggcaaggacatgcattgcaatttgcagggggaattgtcaagtgaggacttcatcacatatgacacgagagaaaagtaagagctggttctaaaatcaaaagctgttgttcatcctgaattgaattttctgaatttgggtggagcagagtcgctttgaagccttgttccgatctaattctattgtattgttgatgataagtgttgacattgggtagtgtagaagcaacaagcatgtccttgtagtacaggtacagtgaaggatagaacacactttcgttgatacaaaaatttaaatagttatgttacttctgtatccagtgtcctaaagttttaggattagttttagttttttgtttgcttatatgagcttagcgtaaagaatatttttaaacttcgtgttttgtcatcagcatcttttctattaagaggtaaaatgtagtccttgtttgactcttgacaatccagtgtgtttgatcttaggtctcatgatctgagtgcataccctctccaggaaggaaactgcaccagtgtctattcctgttaaatagcaacttttagtctcagcttgtttcgttttgatgtcaataaatagtaacagcattcaagtg

SEQ ID NO: 33870 - DNA, 1388 bp, Homo sapiens
  source 1..1388: mol_type = unassigned DNA
gtaaccccgttccggccaagccgcttcagcgggggacgtagccatgaaggaagagaaggagcacaggcctaaggagaagcgagtaaccctgttaacccccgccggggccacaggcagcggtggtgggacctcgggggacagctccaagggggaagataagcaggatcgcaacaaggagaagaaagaagcgctgagcaaggtggtaattcgaagattacctcccactttgaccaaggagcagcttcaggaacatcttcaacctatgcctgagcatgattattttgagtttttttctaatgatacgagtttgtatcctcatatgtatgccagagcatacatcaactttaaaaaccaagaggacattattttgttcagggatcgctttgatggttatgtattccttgacaataaaggtcaggaatatcccgctatagtagaatttgcaccttttcaaaaagctgcaaaaaagaagactaagaaaagagataccaaagtcgggactatcgatgatgatccagaatatagaaagtttttggaaagttatgccacagataatgagaaaatgacatctactccagagacactgctagaggaaatagaagcaaaaaatagagaattaatagctaaaaagacaaccccacttttgagcttcctgaaaaacaagcagagaatgagagaagaaaagagagaagacttttaagagaaaagaagaagaaatgaaaaaagagaaagacacacttcgggataaaggaaagaaggctgaaagtacagaatcaataggcagctcagaaaaaactgaaaagaaagaagaagtggtcaagagagatcgaataagaaacaaggatcgtccagcgatgcagctttaccaaccaggagctcgaagccgaaatcgactctgtccccctgatgacagcaccaagtctggagattcagcagcagaaaggaagcaggaaagtggtattagccatagaaaagaaggaggagaggagtgataagtccagatggccttaggtgtcctgactgtctaggcagccaaagagcacacgttaagcaatccagaggtgccttcagggcaaagaatagagagaaagggagccgctgtgctggtggggtacactgcagaggagtaagtcttgtgtcaaagcaggaatctgatcagaggttcagaattggaagtacaatttcattgcttttgcaatttctacaaattaattttaaagtgtcagaaaaaggtgacggcaaggacatgcattgcaatttgcagggggaattgtcaagtgaggacttcatcacatatgacacgagagaaaagtaagagctggttctaaaatcaaaagctgttgttcatcctgaattgaattttctgaatttgggtggagcagagtcgc
